(19) United States
(12) Patent Application Publication
(10) Pub. No.: US 2023/0132042 A1
(43) Pub. Date: Apr. 27, 2023

(54) Methods for Reproducing Plants Asexually and Compositions Thereof

(71) Applicants: Pioneer Hi-Bred International, Inc., Johnston, IA (US); Centro de Investigacion y de Estudios Avanzados del Instituto Politecnico Nacional (Cinvestav), Col. San Pedro Zacatenco (MX)

(72) Inventors: SHAI J. LAWIT, Johnston, IA (US); Marc C. Albertsen, Grimes, IA (US); Tim Fox, Des Moines, IA (US); William Gordon-Kamm, Urbandale, IA (US); Michelle M. Van Allen, Urbandale, IA (US); Jean-Philippe Vielle Calzada, Guanajuato (MX); Carlos Barragan Rosillo, Guanajuato (MX); Edgar Demesa Arevalo, Guanajuato (MX); Carlos Gonzalez Chavez, Guanajuato (MX); Elvira Hernandez Lagana, Guanajuato (MX); Gloria Leon Martinez, Guanajuato (MX); Nidia Sanchez Leon, Guanajuato (MX); Daniel Rodriguez Leal, Guanajuato (MX); Isaac Rodriguez Arevalo, Guanajuato (MX); Jaime Padilla Calzada, Guanajuato (MX)

(21) Appl. No.: 17/936,824

(22) Filed: Sep. 29, 2022

Related U.S. Application Data
(63) Continuation of application No. 15/512,629, filed on Mar. 20, 2017, now Pat. No. 11,466,288.
(60) Provisional application No. 62/053,587, filed on Sep. 22, 2014.

(51) Int. Cl. C12N 15/82; A01H 6/20; A01H 1/08

(52) U.S. Cl. CPC C12N 15/8287; A01H 6/203; A01H 1/08; A01H 6/202; A01H 6/206; C07K 14/415

(57) ABSTRACT

Disclosed are methods of obtaining clonal seeds, methods of plant cloning, methods of screening for maternal plants that produce clonal seeds asexually and methods of increasing yield of clonal seeds. Also disclosed are constructs comprising a nucleic acid that may silence the activity of a RNA-dependent DNA methylation pathway gene. Further disclosed are maternal plants comprising a construct wherein the construct comprises an exogenous nucleic acid sequence, wherein the construct renders the maternal plant defective for RNA-dependent DNA methylation.

### CROSS REFERENCE TO RELATED PATENT APPLICATIONS

[0001] This application is a continuation of U.S. application Ser. No. 15/512,629 (U.S. Pat. No. 11,466,288), filed on Mar. 20, 2017, which claims the benefit of priority under 35 U.S.C. § 371 of International Application No. PCT/US2015/051260, filed on Sep. 21, 2015, which claims priority to U.S. Provisional Application No. 62/053,587, filed on Sep. 22, 2014, The content of these earlier filed applications is hereby incorporated by reference in their entirety.

### REFERENCE TO SEQUENCE LISTING

[0002] The present application contains a sequence listing submitted herewith via EFS-Web containing the file name 37487_0002U3_SL, which is 5,275,648 bytes in size, created on Sep. 26, 2022, is hereby incorporated by reference in its entirety pursuant to 37 C.F.R. § 1.52(e)(5).

### BACKGROUND

[0003] The majority of cultivated plants reproduce in a sexual manner. In sexual reproduction, the fusion of male and female gametes leads to the formation of seeds that combine maternal and paternal traits.

[0004] Although sexual reproduction predominates, plant species exist that reproduce themselves asexually through seeds. This asexual reproduction, termed apomixis, is a natural cloning process by which the female reproductive organ of a plant, the ovule, is able to form the embryonic portion of seeds, without the need for a genetic contribution from male gametes. In particular, an ovule of an apomictic plant produces one or more unreduced female gametes that form without undergoing meiosis. Accordingly, each unreduced female gamete maintains the somatic genotype of the parent plant when the gamete is incorporated into a seed and ultimately develops to form a child plant that is a clone of the parent.

[0005] The induction of apomixes in cultivated plants, such as in edible cereals, constitutes one of the most attractive challenges of agricultural biotechnology. Currently, the majority of improved, commercial seeds are the result of a long hybridization process in which certain plants that present desirable traits are selected and crossed to obtain seeds for an improved hybrid. However, the agronomic value of the improved hybrid is maintained only during one cultivation cycle. The natural sexuality of the hybrid causes the next generation to lose many of the desirable characteristics of the hybrid through separation of genetic traits. As a consequence, competitive producers find themselves obliged to buy seed year after year if they want to maintain high performance.

[0006] The ability to generate apomictic plant varieties would have tremendous commercial benefits. For example, creation of improved hybrids that exhibit a high rate of apomixis can, in some cases, make it possible for farmers to recurrently sow the seed produced by the improved hybrid, thereby maintaining the agronomic value of the seed for multiple generations (and potentially indefinitely). Also, by genetically fixing the agronomic value of any sexual cultivation, the ability to induce apomixis can encourage plant breeders to develop customized plant varieties adapted to specific environmental conditions. Additionally, the induction of apomixis offers the possibility of eliminating the use of costly cultivation techniques associated with vegetative reproduction of crop plants (e.g., potato, agave, and strawberry, among others). An ability to induce apomixis also can permit the preservation of individual plants with high rates of heterozygosis, such as vegetable species that are in danger of extinction.

[0007] Thus, there is a need for a maternal plant that produces clonal seeds asexually, with each clonal seed containing an embryo that is a clone of the maternal plant, and with germination of each clonal seed forming a progeny plant that is a clone of the maternal plant.

### BRIEF SUMMARY

[0008] Disclosed are methods of obtaining clonal seeds comprising a) obtaining a maternal plant, wherein the maternal plant is unable to be pollinated; and b) collecting one or more seeds produced by the maternal plant, wherein the one or more seeds comprise an embryo that is a clone of the maternal plant.

[0009] Disclosed are methods of obtaining clonal seeds comprising a) obtaining a maternal plant, wherein the maternal plant is unable to be pollinated; and b) collecting one or more seeds produced by the maternal plant, wherein the one or more seeds comprise an embryo that is a clone of the maternal plant, wherein the maternal plant is defective in at least one RNA dependent DNA methylation pathway gene. For example, the RNA dependent DNA methylation pathway gene may be any of the polynucleotides or polypeptides included in Table 1 and the sequences in the accompanying sequence listing, AGO4 (ARGONAUTE 4), AGOG (ARGONAUTE 6), AGO8 (ARGONAUTE 8), AGO9 (ARGONAUTE 9), CMT3 (CHROMOMETHYLASE 3), DCL3 (DICER-LIKE 3), DRM2 (DOMAINS REARRANGED METHYLASE 2), EXS1 (EXTRA SPOROGENOUS CELLS1), IDN2 (INVOLVED IN DE NOVO 2), MET1 (METHYL TRANSFERASE 1), NPRD1a (NUCLEAR POLYMERASE D 1a), NRPD1b (NUCLEAR POLYMERASE D 1b), NRPD2 (NUCLEAR POLYMERASE D 2), NRPE1 (NUCLEAR RNA POLYMERASE E 1), NRPE2 (NUCLEAR RNA POLYMERASE E 2), RDR2 (RNA-DEPENDENT RNA POLYMERASE 2), RDR6 (RNA-DEPENDENT RNA POLYMERASE 6), SGS3 (SUPPRESSOR OF GENE SILENCING 3), SUVH2 (SUPPRESSOR OF VARIEGATION 3-9 HOMOLOG 2), and SUVH9 (SUPPRESSOR OF VARIEGATION 3-9 HOMOLOG 9). In some instances, the AGO4 allele may be ago4-6 or ago4-1. In some instances, the AGOG allele may be ago6-2. In some instances, the AGO9 allele may be 9-2, 9-3 or 9-4. In some instances, the AGO8 allele may be ago 8-1. In some instances, the RDR2 allele may be rdr2-1. In some instances, the RDR6 allele may be rdr6-15 or rdr6-11. In some instances, the SGS3 allele may be sgs3-11. In some instances, the DRM2 allele may be drm2-2. In some instances, the MET1 allele may be met1-7.

[0010] Disclosed are methods of obtaining clonal seeds comprising a) obtaining a maternal plant, wherein the maternal plant is unable to be pollinated; and b) collecting one or more seeds produced by the maternal plant, wherein the one or more seeds comprise an embryo that is a clone of the maternal plant further comprising pollinating the maternal plant prior to collecting the seeds and sorting the seeds to separate clonal seeds from non-clonal seeds.

[0011] Disclosed are methods of obtaining clonal seeds comprising a) obtaining a maternal plant, wherein the maternal plant is unable to be pollinated; and b) collecting one or more seeds produced by the maternal plant, wherein the one or more seeds comprise an embryo that is a clone of the maternal plant further comprising pollinating the maternal plant prior to collecting the seeds and sorting the seeds to separate clonal seeds from non-clonal seeds, wherein sorting the seeds is based on distinguishing the size, shape, size and shape, or genetics of the embryos. The sorting may be performed manually or automatically. In some instances, automatic sorting comprises a machine comprising an optical detector. In some instances, the sorting may be done visually.

[0012] Disclosed are methods of obtaining clonal seeds comprising a) obtaining a maternal plant, wherein the maternal plant is unable to be pollinated; and b) collecting one or more seeds produced by the maternal plant, wherein the one or more seeds comprise an embryo that is a clone of the maternal plant, wherein the maternal plant is exposed to a gametocide that abolishes pollen formation. Gametocides may include at least one of maleic hydrazide (1,2-dihydropyridazine, 3-6-dione) (MH), 2,4-dichlorophenoxyacetic acid (2,4-D), a-naphthalene acetic acid (NAA), and tri-iodobenzoic acid (TIBA).

[0013] Disclosed are methods of obtaining clonal seeds comprising a) obtaining a maternal plant, wherein the maternal plant is unable to be pollinated; and b) collecting one or more seeds produced by the maternal plant, wherein the one or more seeds comprise an embryo that is a clone of the maternal plant further comprising emasculating the maternal plant before collecting the seeds.

[0014] Also disclosed are methods of screening for maternal plants that produce clonal seeds asexually comprising a) obtaining a maternal plant; b) silencing the activity of a gene of interest producing a transformed maternal plant; crossing the transformed maternal plant with a sterile male plant; and d) harvesting the seeds; wherein the presence of clonal seeds indicates the maternal plant may produce clonal seeds asexually.

[0015] Disclosed are methods of screening for maternal plants that produce clonal seeds asexually comprising a) obtaining a maternal plant; b) silencing the activity of a gene of interest producing a transformed maternal plant; crossing the transformed maternal plant with a sterile male plant; and d) harvesting the seeds; wherein the presence of clonal seeds indicates the maternal plant may produce clonal seeds asexually, wherein silencing the activity of a gene of interest comprises RNA interference.

[0016] Disclosed are methods of screening for maternal plants that produce clonal seeds asexually comprising a) obtaining a maternal plant; b) silencing the activity of a gene of interest producing a transformed maternal plant; crossing the transformed maternal plant with a sterile male plant; and d) harvesting the seeds; wherein the presence of clonal seeds indicates the maternal plant may produce clonal seeds asexually, wherein the gene of interest is a RNA dependent DNA methylation pathway gene. The gene of interest may be any of the polynucleotides included in Table 1 and sequences in the accompanying sequence listing, AGO4 (ARGONAUTE 4), AGOG (ARGONAUTE 6), AGO8 (ARGONAUTE 8), AGO9 (ARGONAUTE 9), CMT3 (CHROMOMETHYLASE 3), DCL3 (DICER-LIKE 3), DRM2 (DOMAINS REARRANGED METHYLASE 2), EXS1 (EXTRA SPOROGENOUS CELLS1), IDN2 (INVOLVED IN DE NOVO 2), MET1 (METHYL TRANSFERASE 1), NPRD1a (NUCLEAR POLYMERASE D 1a), NPRD1b (NUCLEAR POLYMERASE D 1b), NPRD2 (NUCLEAR POLYMERASE D 2), NRPE1 (NUCLEAR RNA POLYMERASE E 1), NRPE2 (NUCLEAR RNA POLYMERASE E 2), RDR2 (RNA-DEPENDENT RNA POLYMERASE 2), RDR6 (RNA-DEPENDENT RNA POLYMERASE 6), SGS3 (SUPPRESSOR OF GENE SILENCING 3), SUVH2 (SUPPRESSOR OF VARIEGATION 3-9 HOMOLOG 2), and SUVH9 (SUPPRESSOR OF VARIEGATION 3-9 HOMOLOG 9).

[0017] Disclosed are methods of increasing the yield of clonal seeds comprising obtaining a maternal plant; pollinating the maternal plant; collecting a mixture of seeds produced by the maternal plant; and sorting the mixture to separate clonal seeds from non-clonal seeds.

[0018] Disclosed are methods of increasing the yield of clonal seeds comprising obtaining a maternal plant; pollinating the maternal plant; collecting a mixture of seeds produced by the maternal plant; and sorting the mixture to separate clonal seeds from non-clonal seeds, wherein sorting the mixture to separate clonal seeds from non-clonal seeds comprises distinguishing clonal embryos from non-clonal embryos. Distinguishing clonal embryos from non-clonal embryos may comprise determining the size, shape, size and shape, or genetics of the embryos. In some instances, the sorting may be performed manually or automatically. Automatic sorting may comprise a machine comprising an optical detector. In some instances, sorting may be done visually.

[0019] Disclosed are methods of increasing the yield of clonal seeds comprising obtaining a maternal plant; pollinating the maternal plant; collecting a mixture of seeds produced by the maternal plant; and sorting the mixture to separate clonal seeds from non-clonal seeds, wherein the maternal plant is defective in at least one RNA dependent DNA methylation pathway gene. RNA dependent DNA methylation pathway genes may be any of the polynucleotides included in Table 1 and sequences in the accompanying sequence listing, AGO4 (ARGONAUTE 4), AGOG (ARGONAUTE 6), AGO8 (ARGONAUTE 8), AGO9 (ARGONAUTE 9), CMT3 (CHROMOMETHYLASE 3), DCL3 (DICER-LIKE 3), DRM2 (DOMAINS REARRANGED METHYLASE 2), EXS1 (EXTRA SPOROGENOUS CELLS1), IDN2 (INVOLVED IN DE NOVO 2), MET1 (METHYL TRANSFERASE 1), NPRD1a (NUCLEAR POLYMERASE D 1a), NPRD1b (NUCLEAR POLYMERASE D 1b), NPRD2 (NUCLEAR POLYMERASE D 2), NRPE1 (NUCLEAR RNA POLYMERASE E 1), NRPE2 (NUCLEAR RNA POLYMERASE E 2), RDR2 (RNA-DEPENDENT RNA POLYMERASE 2), RDR6 (RNA-DEPENDENT RNA POLYMERASE 6), SGS3 (SUPPRESSOR OF GENE SILENCING 3), SUVH2 (SUPPRESSOR OF VARIEGATION 3-9 HOMOLOG 2), and SUVH9 (SUPPRESSOR OF VARIEGATION 3-9 HOMOLOG 9).

[0020] Disclosed are maternal plants comprising a construct, wherein the construct comprises an exogenous nucleic acid sequence, wherein the construct renders the maternal plant defective for RNA-dependent DNA methylation.

[0021] Disclosed are maternal plants comprising a construct, wherein the construct comprises an exogenous nucleic acid sequence, wherein the construct renders the maternal plant defective for RNA-dependent DNA methylation, wherein the exogenous nucleic acid sequence silences activity of a RNA-dependent DNA methylation pathway gene.

[0022] Disclosed are maternal plants comprising a construct, wherein the construct comprises an exogenous nucleic acid sequence, wherein the construct renders the maternal plant defective for RNA-dependent DNA methylation, wherein the exogenous nucleic acid sequence silences activity of a RNA-dependent DNA methylation pathway gene further comprising a clonal seed.

[0023] Also disclosed are maternal plants comprising a defective RNA-dependent DNA methylation pathway gene.

[0024] Disclosed are maternal plants comprising a defective RNA-dependent DNA methylation pathway gene, wherein the RNA dependent DNA methylation pathway gene is AGO4 (ARGONAUTE 4), AGOG (ARGONAUTE 6), AGO8 (ARGONAUTE 8), AGO9 (ARGONAUTE 9), CMT3 (CHROMOMETHYLASE 3), DCL3 (DICER-LIKE 3), DRM2 (DOMAINS REARRANGED METHYLASE 2), EXS1 (EXTRA SPOROGENOUS CELLS1), IDN2 (INVOLVED IN DE NOVO 2), MET1 (METHYL TRANSFERASE 1), NPRD1a (NUCLEAR POLYMERASE D 1a), NPRD1b (NUCLEAR POLYMERASE D 1b), NPRD2 (NUCLEAR POLYMERASE D 2), NRPE1 (NUCLEAR RNA POLYMERASE E 1), NRPE2 (NUCLEAR RNA POLYMERASE E 2), RDR2 (RNA-DEPENDENT RNA POLYMERASE 2), RDR6 (RNA-DEPENDENT RNA POLYMERASE 6), SGS3 (SUPPRESSOR OF GENE SILENCING 3), SUVH2 (SUPPRESSOR OF VARIEGATION 3-9 HOMOLOG 2), and SUVH9 (SUPPRESSOR OF VARIEGATION 3-9 HOMOLOG 9).

[0025] Additional advantages of the disclosed method and compositions will be set forth in part in the description which follows, and in part will be understood from the description, or can be learned by practice of the disclosed method and compositions. The advantages of the disclosed method and compositions will be realized and attained by means of the elements and combinations particularly pointed out in the appended claims. It is to be understood that both the foregoing general description and the following detailed description are exemplary and explanatory only and are not restrictive of the invention as claimed.

### BRIEF DESCRIPTION OF THE DRAWINGS

[0026] The accompanying drawings, which are incorporated in and constitute a part of this specification, illustrate several embodiments of the disclosed method and compositions and together with the description, serve to explain the principles of the disclosed method and compositions.

[0027] FIG. 1 shows that homozygous mutant individuals of rdr6-15, ago4-1, and ago9-3 form viable 2n gametes. Flow cytometry was used to estimate the number of triploid progeny that was recovered; triploid seeds are usually larger than diploid seeds. In all three cases, triploid progeny was recovered.

[0028] FIGS. 2A-2G show seed formation in unpollinated siliques of heterozygous rdr6-15 plants. In contrast to unpollinated pistillata gynoecia (FIG. 2A), unpollinated siliques of rdr16-15/+ individuals show a large frequency of growing seeds (FIG. 2B and FIG. 2C). FIG. 2D shows frequency of turgid developing seed-like organs in unpollinated siliques of pi, F2 pi rdr6-15/+(Group A), and F3 pi rdr6-15/+(Group B) individuals. FIGS. 2E-2G show whole-mount cleared seeds, which contained free nuclear endosperm and normally organized embryos.

[0029] FIGS. 3A-31 show autonomous seed formation in emasculated plants of ago4-5, ago9-2 and rdr6-15 plants. FIG. 3A shows an embryo from a rdr6-15 autonomous developing seed. FIG. 3B and FIG. 3C show embryos from ago4-6 autonomous seeds; uncellularized endosperm nuclei are marked by an arrow. FIG. 3D to FIG. 3F show autonomous seeds of ago9-2 showing an early globular embryo (dashed) with embryo-proper (Emb) and suspensor (S). FIG. 3G to FIG. 31 show vanillin stain in the micropylar region of a young autonomous developing seed. A and F, scale bar=50 μm; B, E, G and H, scale bar=12.5 μm; C and D, scale bar=25 μm.

[0030] FIG. 4 shows that plants originating from mature seeds produced in the absence of pollination are genetically equivalent to their mother. Maternal individuals and their progeny were genotyped for polymorphic loci; each row represents a plant and each column is a locus.

[0031] FIG. 5 shows the quantitation of ploidy levels and seed recovery in nonpollinated pi individuals that carried mutations in rdr6 or ago4.

[0032] FIGS. 6A and 6B show ectopic gametic precursors and gametophytes in homozygous ago4 individuals. Several ectopic pre-meiotic cells differentiated in the young ovule primordial (FIG. 6A), which resulted in several developing female gametophytes ectopically located at the micropylar and chalazal regions of the ovule (FIG. 6B).

[0033] FIGS. 7A-7F show emasculated inflorescences and siliques bearing developing seeds. FIGS. 7A-7C show inflorescences for the genotype indicated in the figure (scale bar=1 mm); and FIGS. 7D-7F show siliques for the genotypes indicated in the respective left side panels (scale bar=0.5 mm).

[0034] FIG. 8 shows the frequency of turgid and aborted seeds and ovules in pi and pi rdr6-15/+F2 and F3 individuals. S4 refers to the 4th siliques top to bottom (51 being the first gynoecia within the inflorescence that completely lost its floral organs following floral senescence); S20 is the oldest unpollinated silique.

[0035] FIG. 9 provides general data of emasculated rdr6-15, ago4-6, and ago9-2 mutants.

[0036] FIG. 10 shows the individual analysis of emasculated ago9-2 plants.

[0037] FIG. 11 shows the individual analysis of emasculated rdr6-15 plants.

[0038] FIG. 12 shows the individual analysis of emasculated ago4-6 plants.

[0039] FIGS. 13A and 13B show the quantitation of ploidy levels and seed recovery in nonpollinated pi individuals that carried the mutations pistillata and rdr6-15 or ago4-1. Screening used a male sterile background and showed the potential of small RNA mutants for autonomous seed formation.

[0040] FIGS. 14A and 14B show demonstrating that genotyping using 89 SNPs markers proved that part of the recovered progeny was clonal. The parental lines and progeny were confirmed to be 2n by flow cytometry.

[0041] FIGS. 15A and 15B show data demonstrating that individuals showed variation in one or two out of the 89 SNPs with respect to its parental line. The parental lines and progeny were confirmed to be 2n by flow cytometry.

[0042] FIGS. 16A-16C show ovules in double mutants (pi rdr-15) were long-lived compared to pistillata controls and exhibited seed-like features.

[0043] FIGS. 17A-17C show that ago9-2, ago9-3, ago4-6, and rdr6-15/+ exhibited a higher frequency of long-lived ovules after 7, 10 and 14 days after emasculation (DAE) compared to wild-type plants. Without wishing to be bound by a particular theory, the delay of ovule degeneration in the mutant backgrounds could be indicative of the activation of an autonomous seed formation program.

[0044] FIGS. 18A-18D show data pertaining to the percentage of seeds recovered from ago4-6, ago9-2, rdr6-15/+, and wild type plants at 7 DAE.

[0045] FIGS. 19A-19D show data pertaining to the seeds recovered from fully-dried emasculated carpels of more than 30 DAE.

[0046] FIGS. 20A-20C show data pertaining to the seed coat formation in non-fertilized ovules. Detailed cytological analysis of non-pollinated wild type and mutant ovules after 7, 10 and 14 DAE confirmed that ago9, ago4, and rdr6 single mutants initiated autonomous seed formation.

[0047] FIGS. 21A-21E show data pertaining to proanthocyanidin accumulation in the endothelium in Col-0, rdr6-15/+, ago9-2, ago9-3, and ago4-6 mutants. Vanillin red staining, as indicated by the white dashed circles, was positive for the presence of proanthocyanidins.

[0048] FIGS. 22A-22C show data demonstrating that all three mutants, rdr6-15, ago9-3 and ago4-6, were able to form autonomous endosperms in the absence of pollination.

[0049] FIG. 23 shows data demonstrating that ago9 ovules showed premature and higher frequency of autonomous endosperm proliferation than ago4 or rdr6.

[0050] FIGS. 24A-24D show data demonstrating that autonomous embryo development was also detected at low frequencies. FIG. 24A shows ago4-6. FIG. 24B shows ago9-2. FIG. 24C shows ago4-6. FIG. 24D shows ago4-6.

[0051] FIG. 25 provides a complete list of mutants and alleles that show ectopic gametic precursor cells reminiscent of aposporous initials (apomixis).

[0052] FIGS. 26A-26G show the ovule and megagametophyte development in wild-type (FIG. 26A and FIG. 26E) and ago4-1 (FIGS. 26B, 26C, 26D, 26F, and 26G) individuals.

[0053] FIGS. 27A-27F show ASY1 expression in ovules. FIGS. 27A and 27B show ASY1 expression in meiotic ovules of, respectively, apomict Boechera stricta and the mutant ago4-6. FIGS. 27C, 27D, 27E and 27F show that in ago4, ASY1 is localized in several cells of the nucleus. The ASY1 antibody signal is shown as a white signal. In both genotypes several cells show ASY1 localization in both cytoplasm and nucleus. Ovules are counter-stained with propidium iodide (grey signal).

[0054] FIG. 28 shows quantitative analysis of autonomous seed development in consecutive siliques of pistillata (pi) and pistillata rdr6-15 (pi rdr6-15/+) individuals.

### DETAILED DESCRIPTION

[0055] The disclosed methods and compositions can be understood more readily by reference to the following detailed description of particular embodiments and the Example included therein and to the Figures and their previous and following description.

[0056] It is to be understood that the disclosed methods and compositions are not limited to specific synthetic methods, specific analytical techniques, or to particular reagents unless otherwise specified, and, as such, can vary. It is also to be understood that the terminology used herein is for the purpose of describing particular embodiments only and is not intended to be limiting.

[0057] Disclosed are materials, compositions, and components that may be used for, may be used in conjunction with, may be used in preparation for, or are products of the disclosed method and compositions. These and other materials are disclosed herein, and it is understood that when combinations, subsets, interactions, groups, etc. of these materials are disclosed that while specific reference of each various individual and collective combinations and permutation of these compounds can not be explicitly disclosed, each is specifically contemplated and described herein. For example, if a maternal plant is disclosed and discussed and a number of modifications that may be made are discussed, each and every combination and permutation of the maternal plant and the modifications that are possible are specifically contemplated unless specifically indicated to the contrary. Thus, if a class of molecules A, B, and C are disclosed as well as a class of molecules D, E, and F and an example of a combination molecule, A-D is disclosed, then even if each is not individually recited, each is individually and collectively contemplated. Thus, is this example, each of the combinations A-E, A-F, B-D, B-E, B-F, C-D, C-E, and C-F are specifically contemplated and should be considered disclosed from disclosure of A, B, and C; D, E, and F; and the example combination A-D. Likewise, any subset or combination of these is also specifically contemplated and disclosed. Thus, for example, the sub-group of A-E, B-F, and C-E are specifically contemplated and should be considered disclosed from disclosure of A, B, and C; D, E, and F; and the example combination A-D. This concept applies to all aspects of this application including, but not limited to, steps in methods of making and using the disclosed compositions. Thus, if there are a variety of additional steps that may be performed it is understood that each of these additional steps may be performed with any specific embodiment or combination of embodiments of the disclosed methods, and that each such combination is specifically contemplated and should be considered disclosed.

### A. Definitions

[0058] It must be noted that as used herein and in the appended claims, the singular forms “a”, “an”, and “the” include plural reference unless the context clearly dictates otherwise. Thus, for example, reference to “a polypeptide” includes a plurality of such polypeptides, reference to “the polypeptide” is a reference to one or more polypeptide and equivalents thereof known to those skilled in the art, and so forth.

[0059] Throughout the description and claims of this specification, the word “comprise” and variations of the word, such as “comprising” and “comprises,” means “including but not limited to,” and is not intended to exclude, for example, other additives, components, integers or steps. In particular, in methods stated as comprising one or more steps or operations it is specifically contemplated that each step comprises what is listed (unless that step includes a limiting term such as “consisting of”), meaning that each step is not intended to exclude, for example, other additives, components, integers or steps that are not listed in the step.

[0060] The word “autonomous” as used herein means in the absence of fertilization or by the process of pseudogamy. Accordingly, the terms “autonomous endosperm development” and “autonomous embryogenesis” or similar term, shall be taken to mean endosperm development and embryogenesis respectively, in the absence of fertilization or by the process of pseudogamy.

[0061] Similarly, the term “autonomous seed development” shall be taken to refer to the development of seed independent of fertilization or by the process of pseudogamy, wherein said seed comprise one or more organs of a seed, including any one or more of female gametophyte, endosperm, embryo and a seed coat, irrespective of whether or not said seed structure is fertile or infertile. Accordingly, autonomous seed development clearly includes the process of “apomixis” wherein viable seed are produced either in the absence of fertilisation or by the process of pseudogamy. Where the production of fertile seed is required, it is essential that autonomous seed development leads to the formation of at least an endosperm and an embryo, notwithstanding that the endosperm can subsequently degenerate. In certain commercial applications involving the production of soft-seeded or parthenocarpic fruit varieties, autonomous endosperm formation can comprise the formation of non-viable seed wherein the embryo crushes down, leaving only soft seed comprising an endosperm. Alternatively, the endosperm can commence development autonomously and later degenerate, leaving seedless fruit.

TABLE 1

| | | PN/PP | |
|---|---|---|---|
| SEQ | | (polynucleotide/ | |
| ID # | IDENTITY | polypeptide) | Genus species |
| 1 | AGO4 AT2G27040.1-CDS | PN | Arabidopsis thaliana |
| 2 | AGO4 AT2G27040.2-CDS | PN | Arabidopsis thaliana |
| 3 | SUVH2H9AT2G33290.1-CDS | PN | Arabidopsis thaliana |
| 4 | SUVH2H9AT4G13460.1-CDS | PN | Arabidopsis thaliana |
| 5 | RDR6 AT3G49500.1-CDS | PN | Arabidopsis thaliana |
| 6 | RDR2 AT4G11130.1-CDS | PN | Arabidopsis thaliana |
| 7 | NRPD2 AT3G23780.1-CDS | PN | Arabidopsis thaliana |
| 8 | NRPD2 AT3G23780.2-CDS | PN | Arabidopsis thaliana |
| 9 | NRPD2 AT3G18090.1-CDS | PN | Arabidopsis thaliana |
| 10 | NRPD1a AT1G63020.1-CDS | PN | Arabidopsis thaliana |
| 11 | NRPD1a AT1G63020.2-CDS | PN | Arabidopsis thaliana |
| 12 | NRPD1b AT2G40030.1-CDS | PN | Arabidopsis thaliana |
| 13 | MET1 AT5G49160.1-CDS | PN | Arabidopsis thaliana |
| 14 | IDN2 At3g48670.1-CDS | PN | Arabidopsis thaliana |
| 15 | IDN2 AT2G16490.1-CDS | PN | Arabidopsis thaliana |
| 16 | IDN2 AT4G01180.1-CDS | PN | Arabidopsis thaliana |
| 17 | IDN2 AT1G13790.1-CDS | PN | Arabidopsis thaliana |
| 18 | IDN2 AT3G48670.2-CDS | PN | Arabidopsis thaliana |
| 19 | IDN2 AT3G12550.1-CDS | PN | Arabidopsis thaliana |
| 20 | IDN2 AT3G12550.2-CDS | PN | Arabidopsis thaliana |
| 21 | IDN2 AT5G59390.1-CDS | PN | Arabidopsis thaliana |
| 22 | DRM2 AT5G14620.1-CDS | PN | Arabidopsis thaliana |
| 23 | DCL3 AT3G43920.2-CDS | PN | Arabidopsis thaliana |
| 24 | DCL3 AT3G43920.3-CDS | PN | Arabidopsis thaliana |
| 25 | DCL3 AT3G43920.1-CDS | PN | Arabidopsis thaliana |
| 26 | CMT3 AT1G69770.1-CDS | PN | Arabidopsis thaliana |
| 27 | AGO6-8-9 AT5G21150.1-CDS | PN | Arabidopsis thaliana |
| 28 | AGO6-8-9 AT2G32940.1-CDS | PN | Arabidopsis thaliana |
| 29 | AGO6-8-9 AT5G21030.1-CDS | PN | Arabidopsis thaliana |
| 30 | AGO5 AT2G27880.1-CDS | PN | Arabidopsis thaliana |
| 31 | DCL4 AT5G20320.1 CDS-CDS | PN | Arabidopsis thaliana |
| 32 | DCL4 AT5G20320.2\|AT5G20320-CDS | PN | Arabidopsis thaliana |
| 33 | RDR1 AT1G14790.1 CDS-CDS | PN | Arabidopsis thaliana |
| 34 | AGO4 AT2G27040.1-Promoter_Genomic | PN | Arabidopsis thaliana |
| 35 | AGO4 AT2G27040.2-Promoter_Genomic | PN | Arabidopsis thaliana |
| 36 | AGO6-8-9 AT5G21150.1-Promoter_Genomic | PN | Arabidopsis thaliana |
| 37 | AGO6-8-9 AT2G32940.1-Promoter_Genomic | PN | Arabidopsis thaliana |
| 38 | AGO6-8-9 AT5G21030.1-Promoter_Genomic | PN | Arabidopsis thaliana |
| 39 | CMT3 AT1G69770.1-Promoter_Genomic | PN | Arabidopsis thaliana |
| 40 | DCL3 AT3G43920.2-Promoter_Genomic | PN | Arabidopsis thaliana |
| 41 | DCL3 AT3G43920.3-Promoter_Genomic | PN | Arabidopsis thaliana |
| 42 | DCL3 AT3G43920.1-Promoter_Genomic | PN | Arabidopsis thaliana |
| 43 | DRM2 AT5G14620.1-Promoter_Genomic | PN | Arabidopsis thaliana |
| 44 | IDN2 AT3G48670.1-Promoter_Genomic | PN | Arabidopsis thaliana |
| 45 | IDN2 AT2G16490.1-Promoter_Genomic | PN | Arabidopsis thaliana |
| 46 | IDN2 AT4G01180.1-Promoter_Genomic | PN | Arabidopsis thaliana |
| 47 | IDN2 AT1G13790.1-Promoter_Genomic | PN | Arabidopsis thaliana |
| 48 | IDN2 AT3G48670.2-Promoter_Genomic | PN | Arabidopsis thaliana |
| 49 | IDN2 AT3G12550.1-Promoter_Genomic | PN | Arabidopsis thaliana |
| 50 | IDN2 AT3G12550.2-Promoter_Genomic | PN | Arabidopsis thaliana |
| 51 | IDN2 AT5G59390.1-Promoter_Genomic | PN | Arabidopsis thaliana |
| 52 | MET1 AT5G49160.1-Promoter_Genomic | PN | Arabidopsis thaliana |
| 53 | NRPD1a AT1G63020.1-Promoter_Genomic | PN | Arabidopsis thaliana |
| 54 | NRPD1a AT1G63020.2-Promoter_Genomic | PN | Arabidopsis thaliana |
| 55 | NRPD1b AT2G40030.1-Promoter_Genomic | PN | Arabidopsis thaliana |
| 56 | NRPD2 AT3G23780.1-Promoter_Genomic | PN | Arabidopsis thaliana |
| 57 | NRPD2 AT3G23780.2-Promoter_Genomic | PN | Arabidopsis thaliana |
| 58 | NRPD2 AT3G18090.1-Promoter_Genomic | PN | Arabidopsis thaliana |
| 59 | RDR6 AT3G49500.1-Promoter_Genomic | PN | Arabidopsis thaliana |
| 60 | SUVH2_H9 AT4G13460.1-Promoter_Genomic | PN | Arabidopsis thaliana |
| 61 | SUVH2_H9 AT4G13460.2-Promoter_Genomic | PN | Arabidopsis thaliana |
| 62 | AGO5 AT2G27880.1-Promoter_Genomic | PN | Arabidopsis thaliana |
| 63 | RDR1 AT1G14790-Promoter_Genomic | PN | Arabidopsis thaliana |
| 64 | DCL4 AT5G20320.2-Promoter_Genomic | PN | Arabidopsis thaliana |
| 65 | AGO4AT2G27040.1-amino acid | PP | Arabidopsis thaliana |
| 66 | AGO4 AT2G27040.2-amino acid | PP | Arabidopsis thaliana |
| 67 | AGO689 AT5G21150.1-amino acid | PP | Arabidopsis thaliana |
| 68 | AGO689 AT2G32940.1-amino acid | PP | Arabidopsis thaliana |
| 69 | AGO689 AT5G21030.1-amino acid | PP | Arabidopsis thaliana |
| 70 | CMT3 AT1G69770.1-amino acid | PP | Arabidopsis thaliana |
| 71 | DCL3 AT3G43920.2-amino acid | PP | Arabidopsis thaliana |
| 72 | DCL3 AT3G43920.3-amino acid | PP | Arabidopsis thaliana |
| 73 | DCL3 AT3G43920.1-amino acid | PP | Arabidopsis thaliana |
| 74 | DRM2 AT5G14620.1-amino acid | PP | Arabidopsis thaliana |
| 75 | IDN2 AT3G48670.1-amino acid | PP | Arabidopsis thaliana |
| 76 | IDN2 AT2G16490.1-amino acid | PP | Arabidopsis thaliana |
| 77 | IDN2 AT4G01180.1-amino acid | PP | Arabidopsis thaliana |
| 78 | IDN2 AT1G13790.1-amino acid | PP | Arabidopsis thaliana |
| 79 | IDN2 AT3G48670.2-amino acid | PP | Arabidopsis thaliana |
| 80 | IDN2 AT3G12550.1-amino acid | PP | Arabidopsis thaliana |
| 81 | IDN2 AT3G12550.2-amino acid | PP | Arabidopsis thaliana |
| 82 | IDN2 AT5G59390.1-amino acid | PP | Arabidopsis thaliana |
| 83 | MET1 AT5G49160.1-amino acid | PP | Arabidopsis thaliana |
| 84 | NRPD1a AT1G63020.1-amino acid | PP | Arabidopsis thaliana |
| 85 | NRPD1a AT1G63020.2-amino acid | PP | Arabidopsis thaliana |
| 86 | NRPD1b AT2G40030.1-amino acid | PP | Arabidopsis thaliana |
| 87 | NRPD2 AT3G23780.1-amino acid | PP | Arabidopsis thaliana |
| 88 | NRPD2 AT3G23780.2-amino acid | PP | Arabidopsis thaliana |
| 89 | NRPD2 AT3G18090.1-amino acid | PP | Arabidopsis thaliana |
| 90 | RDR2 AT4G11130.1-amino acid | PP | Arabidopsis thaliana |
| 91 | RDR6 AT3G49500.1-amino acid | PP | Arabidopsis thaliana |
| 92 | SGS3 AT5G23570.1-amino acid | PP | Arabidopsis thaliana |
| 93 | SUVH2H9 AT2G33290.1-amino acid | PP | Arabidopsis thaliana |
| 94 | SUVH2H9 AT4G13460.1-amino acid | PP | Arabidopsis thaliana |
| 95 | SUVH2H9 AT4G13460.2-amino acid | PP | Arabidopsis thaliana |
| 96 | RDR1 AT1G14790.1-amino acid | PP | Arabidopsis thaliana |
| 97 | DCL4 AT5G20320.1-amino acid | PP | Arabidopsis thaliana |
| 98 | DCL4 AT5G20320.2-amino acid | PP | Arabidopsis thaliana |
| 99 | AGO5 AT2G27880.1-amino acid | PP | Arabidopsis thaliana |
| 100 | AGO4 Glyma14g04510.1-CDS | PN | Glycine max |
| 101 | AGO4 Glyma02g44260.1-CDS | PN | Glycine max |
| 102 | AGO4 Glyma20g12070.3-CDS | PN | Glycine max |
| 103 | AGO4 Glyma20g12070.2-CDS | PN | Glycine max |
| 104 | SUVH2H9 Glyma20g00810.2-CDS | PN | Glycine max |
| 105 | SUVH2H9 Glyma07g19420.1-CDS | PN | Glycine max |
| 106 | SUVH2H9 Glyma16g18500.2-CDS | PN | Glycine max |
| 107 | SGS3 Glyma06g16960.2-CDS | PN | Glycine max |
| 108 | SGS3 Glyma06g16960.3-CDS | PN | Glycine max |
| 109 | SGS3 Glyma04g38100.2-CDS | PN | Glycine max |
| 110 | SGS3 Glyma04g38100.3-CDS | PN | Glycine max |
| 111 | SGS3 Glyma08g19690.2-CDS | PN | Glycine max |
| 112 | SGS3 Glyma08g19690.3-CDS | PN | Glycine max |
| 113 | SGS3 Glyma08g19690.4-CDS | PN | Glycine max |
| 114 | SGS3 Glyma08g19690.5-CDS | PN | Glycine max |
| 115 | SGS3 Glyma05g33260.1-CDS | PN | Glycine max |
| 116 | SGS3 Glyma15g05380.2-CDS | PN | Glycine max |
| 117 | RDR6 Glyma06g07251.1-CDS | PN | Glycine max |
| 118 | RDR6 Glyma06g07251.2-CDS | PN | Glycine max |
| 119 | RDR6 Glyma04g07151.1-CDS | PN | Glycine max |
| 120 | RDR6 Glyma04g07151.2-CDS | PN | Glycine max |
| 121 | RDR2 Glyma17g09920.1-CDS | PN | Glycine max |
| 122 | RDR2 Glyma05g02000.1-CDS | PN | Glycine max |
| 123 | RDR2 Glyma05g02000.2-CDS | PN | Glycine max |
| 124 | NRPD2 Glyma06g06480.1-CDS | PN | Glycine max |
| 125 | NRPD2 Glyma04g06440.2-CDS | PN | Glycine max |
| 126 | NRPD1a Glyma11g02921.1-CDS | PN | Glycine max |
| 127 | NRPD1a Glyma11g02921.2_CDS | PN | Glycine max |
| 128 | NRPD1a Glyma01g42480.1-CDS | PN | Glycine max |
| 129 | NRPD1a Glyma01g42480.2-CDS | PN | Glycine max |
| 130 | NRPD1b Glyma13g26691.1-CDS | PN | Glycine max |
| 131 | NRPD1b Glyma13g26691.2-CDS | PN | Glycine max |
| 132 | NRPD1b Glyma15g37710.1-CDS | PN | Glycine max |
| 133 | NRPD1b Glyma15g37710.2-CDS | PN | Glycine max |
| 134 | NRPD1b Glyma15g37710.3-CDS | PN | Glycine max |
| 135 | NRPD1b Glyma15g37710.4-CDS | PN | Glycine max |
| 136 | NRPD1b Glyma15g37710.5-CDS | PN | Glycine max |
| 137 | NRPD1b Glyma15g37710.6-CDS | PN | Glycine max |
| 138 | MET1 Glyma06g18790.1-CDS | PN | Glycine max |
| 139 | MET1 Glyma04g36150.1-CDS | PN | Glycine max |
| 140 | IDN2 Glyma13g41150.1-CDS | PN | Glycine max |
| 141 | IDN2 Glyma15g04250.1-CDS | PN | Glycine max |
| 142 | DRM2 Glyma02g04060.2-CDS | PN | Glycine max |
| 143 | DRM2 Glyma02g04060.3-CDS | PN | Glycine max |
| 144 | DRM2 Glyma05g08740.3-CDS | PN | Glycine max |
| 145 | DRM2 Glyma05g08740.4-CDS | PN | Glycine max |
| 146 | DRM2 Glyma19g00250.2-CDS | PN | Glycine max |
| 147 | DCL3 Glyma06g06061.1-CDS | PN | Glycine max |
| 148 | DCL3 Glyma04g06060.2-CDS | PN | Glycine max |
| 149 | CMT3 Glyma11g08861.1-CDS | PN | Glycine max |
| 150 | CMT3 Glyma01g36500.1-CDS | PN | Glycine max |
| 151 | CMT3 Glyma01g01120.2-CDS | PN | Glycine max |
| 152 | AGO6-8-9 Glyma06g47230.1-CDS | PN | Glycine max |
| 153 | AGO6-8-9 Glyma06g47230.2-CDS | PN | Glycine max |
| 154 | AGO6-8-9 Glyma06g47230.3-CDS | PN | Glycine max |
| 155 | AGO6-8-9 Glyma13g26240.2-CDS | PN | Glycine max |
| 156 | AGO6-8-9 Glyma13g26240.3-CDS | PN | Glycine max |
| 157 | AGO6-8-9 Glyma13g26240.4-CDS | PN | Glycine max |
| 158 | AGO6-8-9 Glyma13g26240.5-CDS | PN | Glycine max |
| 159 | AGO5 Glyma12g08860.1-CDS | PN | Glycine max |
| 160 | AGO5 Glyma11g19650.2-CDS | PN | Glycine max |
| 161 | DCL4 Glyma17g11235.1-CDS | PN | Glycine max |
| 162 | DCL4 Glyma13g22450.2-CDS | PN | Glycine max |
| 163 | DCL4 Glyma13g22450.3-CDS | PN | Glycine max |
| 164 | DCL4 Glyma13g22450.4-CDS | PN | Glycine max |
| 165 | DCL4 Glyma13g22450.5-CDS | PN | Glycine max |
| 166 | RDR1 Glyma02g09470.2-CDS | PN | Glycine max |
| 167 | RDR1 Glyma02g09470.3-CDS | PN | Glycine max |
| 168 | RDR1 Glyma02g09470.4-CDS | PN | Glycine max |
| 169 | AGO4 Glyma14g04510.1-Promoter_Genomic | PN | Glycine max |
| 170 | AGO4 Glyma02g44260.1-Promoter_Genomic | PN | Glycine max |
| 171 | AGO4 Glyma20g12070.3-Promoter_Genomic | PN | Glycine max |
| 172 | AGO4 Glyma20g12070.2-Promoter_Genomic | PN | Glycine max |
| 173 | AGO6-8-9 Glyma06g47230.1-Promoter_Genomic | PN | Glycine max |
| 174 | AGO6-8-9 Glyma06g47230.2-Promoter_Genomic | PN | Glycine max |
| 175 | AGO6-8-9 Glyma06g47230.3-Promoter_Genomic | PN | Glycine max |
| 176 | AGO6-8-9 Glyma13g26240.2-Promoter_Genomic | PN | Glycine max |
| 177 | AGO6-8-9 Glyma13g26240.3-Promoter_Genomic | PN | Glycine max |
| 178 | AGO6-8-9 Glyma13g26240.4-Promoter_Genomic | PN | Glycine max |
| 179 | AGO6-8-9 Glyma13g26240.5-Promoter_Genomic | PN | Glycine max |
| 180 | CMT3 Glyma11g08861.1-Promoter_Genomic | PN | Glycine max |
| 181 | CMT3 Glyma01g36500.1-Promoter_Genomic | PN | Glycine max |
| 182 | CMT3 Glyma01g01120.2-Promoter_Genomic | PN | Glycine max |
| 183 | DCL3 Glyma06g06061.1-Promoter_Genomic | PN | Glycine max |
| 184 | DCL3 Glyma04g06060.2-Promoter_Genomic | PN | Glycine max |
| 185 | DRM2 Glyma02g04060.2-Promoter_Genomic | PN | Glycine max |
| 186 | DRM2 Glyma02g04060.3-Promoter_Genomic | PN | Glycine max |
| 187 | DRM2 Glyma05g08740.3-Promoter_Genomic | PN | Glycine max |
| 188 | DRM2 Glyma05g08740.4-Promoter_Genomic | PN | Glycine max |
| 189 | DRM2 Glyma19g00250.2-Promoter_Genomic | PN | Glycine max |
| 190 | IDN2 Glyma13g41150.1-Promoter_Genomic | PN | Glycine max |
| 191 | IDN2 Glyma15g04250.1-Promoter_Genomic | PN | Glycine max |
| 192 | MET1 Glyma06g18790.1-Promoter_Genomic | PN | Glycine max |
| 193 | MET1 Glyma04g36150.1-Promoter_Genomic | PN | Glycine max |
| 194 | NRPD1a Glyma11g02921.1-Promoter_Genomic | PN | Glycine max |
| 195 | NRPD1a Glyma11g02921.2-Promoter_Genomic | PN | Glycine max |
| 196 | NRPD1a Glyma01g42480.1-Promoter_Genomic | PN | Glycine max |
| 197 | NRPD1a Glyma01g42480.2-Promoter_Genomic | PN | Glycine max |
| 198 | NRPD1b Glyma13g26691.2-Promoter_Genomic | PN | Glycine max |
| 199 | NRPD2 Glyma06g06480.1-Promoter_Genomic | PN | Glycine max |
| 200 | NRPD2 Glyma04g06440.2-Promoter_Genomic | PN | Glycine max |
| 201 | RDR2 Glyma17g09920.1-Promoter_Genomic | PN | Glycine max |
| 202 | RDR2 Glyma05g02000.1-Promoter_Genomic | PN | Glycine max |
| 203 | RDR2 Glyma05g02000.2-Promoter_Genomic | PN | Glycine max |
| 204 | RDR6 Glyma06g07251.1-Promoter_Genomic | PN | Glycine max |
| 205 | RDR6 Glyma06g07251.2-Promoter_Genomic | PN | Glycine max |
| 206 | RDR6 Glyma04g07151.1-Promoter_Genomic | PN | Glycine max |
| 207 | RDR6 Glyma04g07151.2-Promoter_Genomic | PN | Glycine max |
| 208 | SGS3 Glyma06g16960.2-Promoter_Genomic | PN | Glycine max |
| 209 | SGS3 Glyma06g16960.3-Promoter_Genomic | PN | Glycine max |
| 210 | SGS3 Glyma04g38100.2-Promoter_Genomic | PN | Glycine max |
| 211 | SGS3 Glyma04g38100.3-Promoter_Genomic | PN | Glycine max |
| 212 | SGS3 Glyma08g19690.2-Promoter_Genomic | PN | Glycine max |
| 213 | SGS3 Glyma08g19690.3-Promoter_Genomic | PN | Glycine max |
| 214 | SGS3 Glyma08g19690.4-Promoter_Genomic | PN | Glycine max |
| 215 | SGS3 Glyma08g19690.5-Promoter_Genomic | PN | Glycine max |
| 216 | SGS3 Glyma05g33260.1-Promoter_Genomic | PN | Glycine max |
| 217 | SGS3 Glyma15g05380.2-Promoter_Genomic | PN | Glycine max |
| 218 | SUVH2_H9 Glyma20g00810.2-Promoter_Genomic | PN | Glycine max |
| 219 | SUVH2_H9 Glyma07g19420.1-Promoter_Genomic | PN | Glycine max |
| 220 | SUVH2_H9 Glyma16g18500.2-Promoter_Genomic | PN | Glycine max |
| 221 | AGO5 Glyma12g08860.1-Promoter_Genomic | PN | Glycine max |
| 222 | AGO5 Glyma11g19650.2-Promoter_Genomic | PN | Glycine max |
| 223 | RDR1 Glyma02g09470.2-Promoter_Genomic | PN | Glycine max |
| 224 | RDR1 Glyma02g09470.3-Promoter_Genomic | PN | Glycine max |
| 225 | RDR1 Glyma02g09470.4-Promoter_Genomic | PN | Glycine max |
| 226 | DCL4 Glyma17g11235.1-Promoter_Genomic | PN | Glycine max |
| 227 | DCL4 Glyma13g22450.2-Promoter_Genomic | PN | Glycine max |
| 228 | DCL4 Glyma13g22450.3-Promoter_Genomic | PN | Glycine max |
| 229 | DCL4 Glyma13g22450.4-Promoter_Genomic | PN | Glycine max |
| 230 | DCL4 Glyma13g22450.5-Promoter_Genomic | PN | Glycine max |
| 231 | AGO4 Glyma14g04510.1-amino acid | PP | Glycine max |
| 232 | AGO4 Glyma02g44260.1-amino acid | PP | Glycine max |
| 233 | AGO4 Glyma20g12070.3-amino acid | PP | Glycine max |
| 234 | AGO4 Glyma20g12070.2-amino acid | PP | Glycine max |
| 235 | AGO689 Glyma06g47230.1-amino acid | PP | Glycine max |
| 236 | AGO689 Glyma06g47230.2-amino acid | PP | Glycine max |
| 237 | AGO689 Glyma06g47230.3-amino acid | PP | Glycine max |
| 238 | AGO689 Glyma13g26240.2-amino acid | PP | Glycine max |
| 239 | AGO689 Glyma13g26240.3-amino acid | PP | Glycine max |
| 240 | AGO689 Glyma13g26240.4-amino acid | PP | Glycine max |
| 241 | AGO689 Glyma13g26240.5-amino acid | PP | Glycine max |
| 242 | CMT3 Glyma11g08861.1-amino acid | PP | Glycine max |
| 243 | CMT3 Glyma01g36500.1-amino acid | PP | Glycine max |
| 244 | CMT3 Glyma01g01120.2-amino acid | PP | Glycine max |
| 245 | DCL3 Glyma06g06061.1-amino acid | PP | Glycine max |
| 246 | DCL3 Glyma04g06060.2-amino acid | PP | Glycine max |
| 247 | DRM2 Glyma02g04060.2-amino acid | PP | Glycine max |
| 248 | DRM2 Glyma02g04060.3-amino acid | PP | Glycine max |
| 249 | DRM2 Glyma05g08740.3-amino acid | PP | Glycine max |
| 250 | DRM2 Glyma05g08740.4-amino acid | PP | Glycine max |
| 251 | DRM2 Glyma19g00250.2-amino acid | PP | Glycine max |
| 252 | IDN2 Glyma13g41150.1-amino acid | PP | Glycine max |
| 253 | IDN2 Glyma15g04250.1-amino acid | PP | Glycine max |
| 254 | MET1 Glyma06g18790.1-amino acid | PP | Glycine max |
| 255 | MET1 Glyma04g36150.1-amino acid | PP | Glycine max |
| 256 | NRPD1a Glyma11g02921.1-amino acid | PP | Glycine max |
| 257 | NRPD1a Glyma11g02921.2-amino acid | PP | Glycine max |
| 258 | NRPD1a Glyma01g42480.1-amino acid | PP | Glycine max |
| 259 | NRPD1a Glyma01g42480.2-amino acid | PP | Glycine max |
| 260 | NRPD1b Glyma13g26691.1-amino acid | PP | Glycine max |
| 261 | NRPD1b Glyma13g26691.2-amino acid | PP | Glycine max |
| 262 | NRPD1b Glyma15g37710.1-amino acid | PP | Glycine max |
| 263 | NRPD1b Glyma15g37710.2-amino acid | PP | Glycine max |
| 264 | NRPD1b Glyma15g37710.3-amino acid | PP | Glycine max |
| 265 | NRPD1b Glyma15g37710.4-amino acid | PP | Glycine max |
| 266 | NRPD1b Glyma15g37710.5-amino acid | PP | Glycine max |
| 267 | NRPD1b Glyma15g37710.6-amino acid | PP | Glycine max |
| 268 | NRPD2 Glyma06g06480.1-amino acid | PP | Glycine max |
| 269 | NRPD2 Glyma04g06440.2-amino acid | PP | Glycine max |
| 270 | RDR2 Glyma17g09920.1-amino acid | PP | Glycine max |
| 271 | RDR2 Glyma05g02000.1-amino acid | PP | Glycine max |
| 272 | RDR2 Glyma05g02000.2-amino acid | PP | Glycine max |
| 273 | RDR6 Glyma06g07251.1-amino acid | PP | Glycine max |
| 274 | RDR6 Glyma06g07251.2-amino acid | PP | Glycine max |
| 275 | RDR6 Glyma04g07151.1-amino acid | PP | Glycine max |
| 276 | RDR6 Glyma04g07151.2-amino acid | PP | Glycine max |
| 277 | SGS3 Glyma06g16960.2-amino acid | PP | Glycine max |
| 278 | SGS3 Glyma06g16960.3-amino acid | PP | Glycine max |
| 279 | SGS3 Glyma04g38100.2-amino acid | PP | Glycine max |
| 280 | SGS3 Glyma04g38100.3-amino acid | PP | Glycine max |
| 281 | SGS3 Glyma08g19690.2-amino acid | PP | Glycine max |
| 282 | SGS3 Glyma08g19690.3-amino acid | PP | Glycine max |
| 283 | SGS3 Glyma08g19690.4-amino acid | PP | Glycine max |
| 284 | SGS3 Glyma08g19690.5-amino acid | PP | Glycine max |
| 285 | SGS3 Glyma05g33260.1-amino acid | PP | Glycine max |
| 286 | SGS3 Glyma15g05380.2-amino acid | PP | Glycine max |
| 287 | SUVH2H9 Glyma20g00810.2-amino acid | PP | Glycine max |
| 288 | SUVH2H9 Glyma07g19420.1-amino acid | PP | Glycine max |
| 289 | SUVH2H9 Glyma16g18500.2-amino acid | PP | Glycine max |
| 290 | RDR1 Glyma02g09470.2-amino acid | PP | Glycine max |
| 291 | RDR1 Glyma02g09470.3-amino acid | PP | Glycine max |
| 292 | RDR1 Glyma02g09470.4-amino acid | PP | Glycine max |
| 293 | DCL4 Glyma17g11235.1-amino acid | PP | Glycine max |
| 294 | DCL4 Glyma13g22450.2-amino acid | PP | Glycine max |
| 295 | DCL4 Glyma13g22450.3-amino acid | PP | Glycine max |
| 296 | DCL4 Glyma13g22450.4-amino acid | PP | Glycine max |
| 297 | DCL4 Glyma13g22450.5-amino acid | PP | Glycine max |
| 298 | AGO5 Glyma12g08860.1-amino acid | PP | Glycine max |
| 299 | AGO5 Glyma11g19650.2-amino acid | PP | Glycine max |
| 300 | AGO4 Bra034318-CDS | PN | Brassica rapa |
| 301 | SUVH2H9 Bra005511-CDS | PN | Brassica rapa |
| 302 | SUVH2H9 Bra007048-CDS | PN | Brassica rapa |
| 303 | SUVH2H9 Bra021840-CDS | PN | Brassica rapa |
| 304 | SGS3 Bra009695-CDS | PN | Brassica rapa |
| 305 | RDR6 Bra029957-CDS | PN | Brassica rapa |
| 306 | RDR2 Bra035249-CDS | PN | Brassica rapa |
| 307 | NRPD2 Bra022279-CDS | PN | Brassica rapa |
| 308 | NRPD1a Bra041010-CDS | PN | Brassica rapa |
| 309 | NRPD1a Bra027611-CDS | PN | Brassica rapa |
| 310 | NRPD1b Bra000162-CDS | PN | Brassica rapa |
| 311 | MET1 Bra010026-CDS | PN | Brassica rapa |
| 312 | MET1 Bra039939-CDS | PN | Brassica rapa |
| 313 | MET1 Bra030191-CDS | PN | Brassica rapa |
| 314 | IDN2 Bra034752-CDS | PN | Brassica rapa |
| 315 | IDN2 Bra002570-CDS | PN | Brassica rapa |
| 316 | IDN2 Bra019557-CDS | PN | Brassica rapa |
| 317 | IDN2 Bra018043-CDS | PN | Brassica rapa |
| 318 | IDN2 Bra026932-CDS | PN | Brassica rapa |
| 319 | DRM2 Bra023480-CDS | PN | Brassica rapa |
| 320 | DRM2 Bra023479-CDS | PN | Brassica rapa |
| 321 | DRM2 Bra008749-CDS | PN | Brassica rapa |
| 322 | DCL3 Bra019456-CDS | PN | Brassica rapa |
| 323 | CMT3 Bra024340-CDS | PN | Brassica rapa |
| 324 | AGO6-8-9 Bra020152-CDS | PN | Brassica rapa |
| 325 | AGO6-8-9 Bra002360-CDS | PN | Brassica rapa |
| 326 | AGO6-8-9 Bra002349-CDS | PN | Brassica rapa |
| 327 | AGO6-8-9 Bra002361-CDS | PN | Brassica rapa |
| 328 | AGO6-8-9 Bra022918-CDS | PN | Brassica rapa |
| 329 | AGO6-8-9 Bra005981-CDS | PN | Brassica rapa |
| 330 | AGO5 Bra011993-CDS | PN | Brassica rapa |
| 331 | DCL4 Bra002293-CDS | PN | Brassica rapa |
| 332 | RDR1 Bra026187-CDS | PN | Brassica rapa |
| 333 | AGO4 Bra034318-Promoter_Genomic | PN | Brassica rapa |
| 334 | AGO6-8-9 Bra020152-Promoter_Genomic | PN | Brassica rapa |
| 335 | AGO6-8-9 Bra002360-Promoter_Genomic | PN | Brassica rapa |
| 336 | AGO6-8-9 Bra002349-Promoter_Genomic | PN | Brassica rapa |
| 337 | AGO6-8-9 Bra002361-Promoter_Genomic | PN | Brassica rapa |
| 338 | AGO6-8-9 Bra022918-Promoter_Genomic | PN | Brassica rapa |
| 339 | AGO6-8-9 Bra005981-Promoter_Genomic | PN | Brassica rapa |
| 340 | CMT3 Bra024340-Promoter_Genomic | PN | Brassica rapa |
| 341 | DCL3 Bra019456-Promoter_Genomic | PN | Brassica rapa |
| 342 | DRM2 Bra023480-Promoter_Genomic | PN | Brassica rapa |
| 343 | DRM2 Bra023479-Promoter_Genomic | PN | Brassica rapa |
| 344 | DRM2 Bra008749-Promoter_Genomic | PN | Brassica rapa |
| 345 | IDN2 Bra034752-Promoter_Genomic | PN | Brassica rapa |
| 346 | IDN2 Bra002570-Promoter_Genomic | PN | Brassica rapa |
| 347 | IDN2 Bra019557-Promoter_Genomic | PN | Brassica rapa |
| 348 | IDN2 Bra018043-Promoter_Genomic | PN | Brassica rapa |
| 349 | IDN2 Bra026932-Promoter_Genomic | PN | Brassica rapa |
| 350 | MET1 Bra010026-Promoter_Genomic | PN | Brassica rapa |
| 351 | MET1 Bra039939-Promoter_Genomic | PN | Brassica rapa |
| 352 | MET1 Bra030191-Promoter_Genomic | PN | Brassica rapa |
| 353 | NRPD1a Bra041010-Promoter_Genomic | PN | Brassica rapa |
| 354 | NRPD1a Bra027611-Promoter_Genomic | PN | Brassica rapa |
| 355 | NRPD1b Bra000162-Promoter_Genomic | PN | Brassica rapa |
| 356 | NRPD2 Bra022279-Promoter_Genomic | PN | Brassica rapa |
| 357 | RDR2 Bra035249-Promoter_Genomic | PN | Brassica rapa |
| 358 | RDR6 Bra029957-Promoter_Genomic | PN | Brassica rapa |
| 359 | SGS3 Bra009695-Promoter_Genomic | PN | Brassica rapa |
| 360 | SUVH2_H9 Bra005511-Promoter_Genomic | PN | Brassica rapa |
| 361 | SUVH2_H9 Bra007048-Promoter_Genomic | PN | Brassica rapa |
| 362 | SUVH2_H9 Bra021840-Promoter_Genomic | PN | Brassica rapa |
| 363 | AGO5 Bra011993-Promoter_Genomic | PN | Brassica rapa |
| 364 | RDR1 Bra026187-Promoter_Genomic | PN | Brassica rapa |
| 365 | DCL4 Bra002293-Promoter_Genomic | PN | Brassica rapa |
| 366 | AGO4 Bra034318-amino acid | PP | Brassica rapa |
| 367 | AGO689 Bra020152-amino acid | PP | Brassica rapa |
| 368 | AGO689 Bra002360-amino acid | PP | Brassica rapa |
| 369 | AGO689 Bra002349-amino acid | PP | Brassica rapa |
| 370 | AGO689 Bra002361-amino acid | PP | Brassica rapa |
| 371 | AGO689 Bra022918-amino acid | PP | Brassica rapa |
| 372 | AGO689 Bra005981-amino acid | PP | Brassica rapa |
| 373 | CMT3 Bra024340-amino acid | PP | Brassica rapa |
| 374 | DCL3 Bra019456-amino acid | PP | Brassica rapa |
| 375 | DRM2 Bra023480-amino acid | PP | Brassica rapa |
| 376 | DRM2 Bra023479-amino acid | PP | Brassica rapa |
| 377 | DRM2 Bra008749-amino acid | PP | Brassica rapa |
| 378 | IDN2 Bra034752-amino acid | PP | Brassica rapa |
| 379 | IDN2 Bra002570-amino acid | PP | Brassica rapa |
| 380 | IDN2 Bra019557-amino acid | PP | Brassica rapa |
| 381 | IDN2 Bra018043-amino acid | PP | Brassica rapa |
| 382 | IDN2 Bra026932-amino acid | PP | Brassica rapa |
| 383 | MET1 Bra010026-amino acid | PP | Brassica rapa |
| 384 | MET1 Bra039939-amino acid | PP | Brassica rapa |
| 385 | MET1 Bra030191-amino acid | PP | Brassica rapa |
| 386 | NRPD1a Bra041010-amino acid | PP | Brassica rapa |
| 387 | NRPD1a Bra027611-amino acid | PP | Brassica rapa |
| 388 | NRPD1b Bra000162-amino acid | PP | Brassica rapa |
| 389 | NRPD2 Bra022279-amino acid | PP | Brassica rapa |
| 390 | RDR2 Bra035249-amino acid | PP | Brassica rapa |
| 391 | RDR6 Bra029957-amino acid | PP | Brassica rapa |
| 392 | SGS3 Bra009695-amino acid | PP | Brassica rapa |
| 393 | SUVH2H9 Bra005511-amino acid | PP | Brassica rapa |
| 394 | SUVH2H9 Bra007048-amino acid | PP | Brassica rapa |
| 395 | SUVH2H9 Bra021840-amino acid | PP | Brassica rapa |
| 396 | RDR1 Bra026187-amino acid | PP | Brassica rapa |
| 397 | DCL4 Bra002293-amino acid | PP | Brassica rapa |
| 398 | AGO5 Bra011993-amino acid | PP | Brassica rapa |
| 399 | AGO4 Gorai.009G105600.2-CDS | PN | Gossypium raimondii |
| 400 | AGO4 Gorai.009G105600.1-CDS | PN | Gossypium raimondii |
| 401 | AGO4 Gorai.009G105600.7-CDS | PN | Gossypium raimondii |
| 402 | AGO4 Gorai.009G105600.3-CDS | PN | Gossypium raimondii |
| 403 | AGO4 Gorai.009G105600.4-CDS | PN | Gossypium raimondii |
| 404 | AGO4 Gorai.009G105600.5-CDS | PN | Gossypium raimondii |
| 405 | AGO4 Gorai.009G105600.6-CDS | PN | Gossypium raimondii |
| 406 | AGO4 Gorai.004G228100.1-CDS | PN | Gossypium raimondii |
| 407 | SUVH2H9 Gorai.006G254500.1-CDS | PN | Gossypium raimondii |
| 408 | SGS3 Gorai.009G148800.1-CDS | PN | Gossypium raimondii |
| 409 | SGS3 Gorai.009G009900.1-CDS | PN | Gossypium raimondii |
| 410 | SGS3 Gorai.009G009900.2-CDS | PN | Gossypium raimondii |
| 411 | SGS3 Gorai.009G009900.3-CDS | PN | Gossypium raimondii |
| 412 | SGS3 Gorai.002G209000.1-CDS | PN | Gossypium raimondii |
| 413 | SGS3 Gorai.002G209000.2-CDS | PN | Gossypium raimondii |
| 414 | SGS3 Gorai.005G260400.2-CDS | PN | Gossypium raimondii |
| 415 | SGS3 Gorai.005G260400.1-CDS | PN | Gossypium raimondii |
| 416 | SGS3 Gorai.011G121000.1-CDS | PN | Gossypium raimondii |
| 417 | SGS3 Gorai.011G121100.4-CDS | PN | Gossypium raimondii |
| 418 | SGS3 Gorai.011G121100.1-CDS | PN | Gossypium raimondii |
| 419 | SGS3 Gorai.011G121100.3-CDS | PN | Gossypium raimondii |
| 420 | SGS3 Gorai.011G121100.2-CDS | PN | Gossypium raimondii |
| 421 | SGS3 Gorai.011G121100.5-CDS | PN | Gossypium raimondii |
| 422 | RDR6 Gorai.009G057700.1-CDS | PN | Gossypium raimondii |
| 423 | RDR2 Gorai.008G296900-CDS | PN | Gossypium raimondii |
| 424 | NRPD2 Gorai.001G037900.1-CDS | PN | Gossypium raimondii |
| 425 | NRPD2 Gorai.001G037900.2-CDS | PN | Gossypium raimondii |
| 426 | NRPD1a Gorai.004G207300.1-CDS | PN | Gossypium raimondii |
| 427 | NRPD1a Gorai.004G207300.2-CDS | PN | Gossypium raimondii |
| 428 | NRPD1a Gorai.004G207300.3-CDS | PN | Gossypium raimondii |
| 429 | NRPD1a Gorai.007G022200.1-CDS | PN | Gossypium raimondii |
| 430 | NRPD1b Gorai.010G216600.1-CDS | PN | Gossypium raimondii |
| 431 | NRPD1b Gorai.010G216600.3-CDS | PN | Gossypium raimondii |
| 432 | NRPD1b Gorai.010G216600.2-CDS | PN | Gossypium raimondii |
| 433 | NRPD1b Gorai.010G216600.4-CDS | PN | Gossypium raimondii |
| 434 | MET1 Gorai.004G180200.1-CDS | PN | Gossypium raimondii |
| 435 | MET1 Gorai.012G048000.1-CDS | PN | Gossypium raimondii |
| 436 | MET1 Gorai.012G048000.2-CDS | PN | Gossypium raimondii |
| 437 | MET1 Gorai.012G048000.3-CDS | PN | Gossypium raimondii |
| 438 | MET1 Gorai.012G048000.4-CDS | PN | Gossypium raimondii |
| 439 | IDN2 Gorai.013G263400.1-CDS | PN | Gossypium raimondii |
| 440 | IDN2 Gorai.013G263400.5-CDS | PN | Gossypium raimondii |
| 441 | DRM2 Gorai.012G062900.2-CDS | PN | Gossypium raimondii |
| 442 | DRM2 Gorai.012G062900.3-CDS | PN | Gossypium raimondii |
| 443 | DRM2 Gorai.012G062900.4-CDS | PN | Gossypium raimondii |
| 444 | DRM2 Gorai.006G031000.1-CDS | PN | Gossypium raimondii |
| 445 | DRM2 Gorai.006G031000.2-CDS | PN | Gossypium raimondii |
| 446 | DCL3 Gorai.010G093100.2-CDS | PN | Gossypium raimondii |
| 447 | DCL3 Gorai.010G093100.3-CDS | PN | Gossypium raimondii |
| 448 | DCL3 Gorai.010G093100.4-CDS | PN | Gossypium raimondii |
| 449 | DCL3 Gorai.013G221400.1-CDS | PN | Gossypium raimondii |
| 450 | CMT3 Gorai.001G052000.1-CDS | PN | Gossypium raimondii |
| 451 | AGO6-8-9 Gorai.009G105600.2-CDS | PN | Gossypium raimondii |
| 452 | AGO6-8-9 Gorai.009G105600.1-CDS | PN | Gossypium raimondii |
| 453 | AGO6-8-9 Gorai.009G105600.7-CDS | PN | Gossypium raimondii |
| 454 | AGO6-8-9 Gorai.004G228100.1-CDS | PN | Gossypium raimondii |
| 455 | AGO6-8-9 Gorai.001G195700.1-CDS | PN | Gossypium raimondii |
| 456 | AGO6-8-9 Gorai.001G195700.3-CDS | PN | Gossypium raimondii |
| 457 | AGO6-8-9 Gorai.001G195700.2-CDS | PN | Gossypium raimondii |
| 458 | AGO5 Gorai.006G103000.1-CDS | PN | Gossypium raimondii |
| 459 | AGO5 Gorai.006G103000.12-CDS | PN | Gossypium raimondii |
| 460 | AGO5 Gorai.006G103000.13-CDS | PN | Gossypium raimondii |
| 461 | AGO5 Gorai.006G103000.14-CDS | PN | Gossypium raimondii |
| 462 | AGO5 Gorai.006G103000.2-CDS | PN | Gossypium raimondii |
| 463 | AGO5 Gorai.006G103000.3-CDS | PN | Gossypium raimondii |
| 464 | AGO5 Gorai.006G103000.4-CDS | PN | Gossypium raimondii |
| 465 | AGO5 Gorai.006G103000.5-CDS | PN | Gossypium raimondii |
| 466 | AGO5 Gorai.006G103000.6-CDS | PN | Gossypium raimondii |
| 467 | AGO5 Gorai.006G103000.15-CDS | PN | Gossypium raimondii |
| 468 | DCL4 Gorai.009G053300.1-CDS | PN | Gossypium raimondii |
| 469 | DCL4 Gorai.009G053300.3-CDS | PN | Gossypium raimondii |
| 470 | DCL4 Gorai.009G053300.2-CDS | PN | Gossypium raimondii |
| 471 | RDR1 Gorai.009G352500.1-CDS | PN | Gossypium raimondii |
| 472 | RDR1 Gorai.013G029000.1-CDS | PN | Gossypium raimondii |
| 473 | RDR1 Gorai.002G196400.1-CDS | PN | Gossypium raimondii |
| 474 | AGO4 Gorai.009G105600.2-Promoter_Genomic | PN | Gossypium raimondii |
| 475 | AGO4 Gorai.009G105600.1-Promoter_Genomic | PN | Gossypium raimondii |
| 476 | AGO4 Gorai.009G105600.7-Promoter_Genomic | PN | Gossypium raimondii |
| 477 | AGO4 Gorai.004G228100.1-Promoter_Genomic | PN | Gossypium raimondii |
| 478 | AGO6-8-9 Gorai.009G105600.2-Promoter_Genomic | PN | Gossypium raimondii |
| 479 | AGO6-8-9 Gorai.009G105600.1-Promoter_Genomic | PN | Gossypium raimondii |
| 480 | AGO6-8-9 Gorai.009G105600.7-Promoter_Genomic | PN | Gossypium raimondii |
| 481 | AGO6-8-9 Gorai.004G228100.1-Promoter_Genomic | PN | Gossypium raimondii |
| 482 | AGO6-8-9 Gorai001G195700.1-Promoter_Genomic | PN | Gossypium raimondii |
| 483 | AGO6-8-9 Gorai.001G195700.3-Promoter_Genomic | PN | Gossypium raimondii |
| 484 | AGO6-8-9 Goria.001G195700.2-Promoter_Genomic | PN | Gossypium raimondii |
| 485 | CMT3 Gorai.001G052000.1-Promoter_Genomic | PN | Gossypium raimondii |
| 486 | DCL3 Gorai.010G093100.2-Promoter_Genomic | PN | Gossypium raimondii |
| 487 | DCL3 Gorai.010G093100.3-Promoter_Genomic | PN | Gossypium raimondii |
| 488 | DCL3 Gorai.010G093100.4-Promoter_Genomic | PN | Gossypium raimondii |
| 489 | DCL3 Gorai.013G221400.1-Promoter_Genomic | PN | Gossypium raimondii |
| 490 | DRM2 Gorai.012G062900.1-Promoter_Genomic | PN | Gossypium raimondii |
| 491 | DRM2 Gorai.012G062900.2-Promoter_Genomic | PN | Gossypium raimondii |
| 492 | DRM2 Gorai.012G062900.3-Promoter_Genomic | PN | Gossypium raimondii |
| 493 | DRM2 Gorai.006G031000.1-Promoter_Genomic | PN | Gossypium raimondii |
| 494 | DRM2 Gorai.006G031000.2-Promoter_Genomic | PN | Gossypium raimondii |
| 495 | IDN2 Gorai.013G263400.1-Promoter_Genomic | PN | Gossypium raimondii |
| 496 | IDN2 Gorai.013G263400.5-Promoter_Genomic | PN | Gossypium raimondii |
| 497 | MET1 Gorai.004G180200.1-Promoter_Genomic | PN | Gossypium raimondii |
| 498 | MET1 Gorai.012G048000.1-Promoter_Genomic | PN | Gossypium raimondii |
| 499 | MET1 Gorai.012G048000.2-Promoter_Genomic | PN | Gossypium raimondii |
| 500 | MET1 Gorai.012G048000.3-Promoter_Genomic | PN | Gossypium raimondii |
| 501 | MET1 Gorai.012G048000.4-Promoter_Genomic | PN | Gossypium raimondii |
| 502 | NRPD1a Gorai.004G207300.1-Promoter_Genomic | PN | Gossypium raimondii |
| 503 | NRPD1a Gorai.004G207300.2-Promoter_Genomic | PN | Gossypium raimondii |
| 504 | NRPD1a Gorai.004G207300.3-Promoter_Genomic | PN | Gossypium raimondii |
| 505 | NRPD1a Gorai.007G022200.1-Promoter_Genomic | PN | Gossypium raimondii |
| 506 | NRPD1b Gorai.010G216600.1-Promoter_Genomic | PN | Gossypium raimondii |
| 507 | NRPD2 Gorai.001G037900.1-Promoter_Genomic | PN | Gossypium raimondii |
| 508 | NRPD2 Gorai.001G037900.2-Promoter_Genomic | PN | Gossypium raimondii |
| 509 | RDR2 Gorai.008G296900.1-Promoter_Genomic | PN | Gossypium raimondii |
| 510 | RDR6 Gorai.009G057700.1-Promoter_Genomic | PN | Gossypium raimondii |
| 511 | SGS3 Gorai.009G148800.1-Promoter_Genomic | PN | Gossypium raimondii |
| 512 | SGS3 Gorai.009G009900.1-Promoter_Genomic | PN | Gossypium raimondii |
| 513 | SGS3 Gorai.009G009900.2-Promoter_Genomic | PN | Gossypium raimondii |
| 514 | SGS3 Gorai.009G009900.3-Promoter_Genomic | PN | Gossypium raimondii |
| 515 | SGS3 Gorai.002G209000.1-Promoter_Genomic | PN | Gossypium raimondii |
| 516 | SGS3 Gorai.002G209000.2-Promoter_Genomic | PN | Gossypium raimondii |
| 517 | SGS3 Gorai.005G260400.2-Promoter_Genomic | PN | Gossypium raimondii |
| 518 | SGS3 Gorai.005G260400.1-Promoter_Genomic | PN | Gossypium raimondii |
| 519 | SGS3 Gorai.011G121000.1-Promoter_Genomic | PN | Gossypium raimondii |
| 520 | SGS3 Gorai.011G121100.4-Promoter_Genomic | PN | Gossypium raimondii |
| 521 | SGS3 Gorai.011G121100.1-Promoter_Genomic | PN | Gossypium raimondii |
| 522 | SGS3 Gorai.011G121100.3-Promoter_Genomic | PN | Gossypium raimondii |
| 523 | SGS3 Gorai.011G121100.2-Promoter_Genomic | PN | Gossypium raimondii |
| 524 | SGS3 Gorai.011G121100.5-Promoter_Genomic | PN | Gossypium raimondii |
| 525 | SUVH2_H9 Gorai.006G254500.1-Promoter_Genomic | PN | Gossypium raimondii |
| 526 | AGO5 Gorai.006G103000.1-Promoter_Genomic | PN | Gossypium raimondii |
| 527 | AGO5 Gorai.006G103000.12-Promoter_Genomic | PN | Gossypium raimondii |
| 528 | AGO5 Gorai.006G103000.13-Promoter_Genomic | PN | Gossypium raimondii |
| 529 | AGO5 Gorai.006G103000.14-Promoter_Genomic | PN | Gossypium raimondii |
| 530 | AGO5 Gorai.006G103000.2-Promoter_Genomic | PN | Gossypium raimondii |
| 531 | AGO5 Gorai.006G103000.3-Promoter_Genomic | PN | Gossypium raimondii |
| 532 | AGO5 Gorai.006G103000.4-Promoter_Genomic | PN | Gossypium raimondii |
| 533 | AGO5 Gorai.006G103000.5-Promoter_Genomic | PN | Gossypium raimondii |
| 534 | AGO5 Gorai.006G103000.6-Promoter_Genomic | PN | Gossypium raimondii |
| 535 | AGO5 Gorai.006G103000.15-Promoter_Genomic | PN | Gossypium raimondii |
| 536 | RDR1 Gorai.009G352500.1-Promoter_Genomic | PN | Gossypium raimondii |
| 537 | RDR1 Gorai.013G029000.1-Promoter_Genomic | PN | Gossypium raimondii |
| 538 | RDR1 Gorai.002G196400.1-Promoter_Genomic | PN | Gossypium raimondii |
| 539 | DCL4 Gorai.009G053300.1-Promoter_Genomic | PN | Gossypium raimondii |
| 540 | DCL4 Gorai.009G053300.3-Promoter_Genomic | PN | Gossypium raimondii |
| 541 | DCL4 Gorai.009G053300.2-Promoter_Genomic | PN | Gossypium raimondii |
| 542 | AGO4 Gorai.009G105600.2-amino acid | PP | Gossypium raimondii |
| 543 | AGO4 Gorai.009G105600.1-amino acid | PP | Gossypium raimondii |
| 544 | AGO4 Gorai.009G105600.7-amino acid | PP | Gossypium raimondii |
| 545 | AGO4 Gorai.009G105600.3-amino acid | PP | Gossypium raimondii |
| 546 | AGO4 Gorai.009G105600.4-amino acid | PP | Gossypium raimondii |
| 547 | AGO4 Gorai.009G105600.5-amino acid | PP | Gossypium raimondii |
| 548 | AGO4 Gorai.009G105600.6-amino acid | PP | Gossypium raimondii |
| 549 | AGO4 Gorai.004G228100.1-amino acid | PP | Gossypium raimondii |
| 550 | AGO689 Gorai.009G105600.2-amino acid | PP | Gossypium raimondii |
| 551 | AGO689 Gorai.009G105600.1-amino acid | PP | Gossypium raimondii |
| 552 | AGO689 Gorai.009G105600.7-amino acid | PP | Gossypium raimondii |
| 553 | AGO689 Gorai.004G228100.1-amino acid | PP | Gossypium raimondii |
| 554 | AGO689 Gorai.001G195700.1-amino acid | PP | Gossypium raimondii |
| 555 | AGO689 Gorai.001G195700.3-amino acid | PP | Gossypium raimondii |
| 556 | AGO689 Gorai.001G195700.2-amino acid | PP | Gossypium raimondii |
| 557 | CMT3Gorai.001G052000.1-amino acid | PP | Gossypium raimondii |
| 558 | DCL3 Gorai.010G093100.2-amino acid | PP | Gossypium raimondii |
| 559 | DCL3 Gorai.010G093100.3-amino acid | PP | Gossypium raimondii |
| 560 | DCL3 Gorai.010G093100.4-amino acid | PP | Gossypium raimondii |
| 561 | DCL3 Gorai.013G221400.1-amino acid | PP | Gossypium raimondii |
| 562 | DRM2 Gorai.012G062900.1-amino acid | PP | Gossypium raimondii |
| 563 | DRM2 Gorai.012G062900.2-amino acid | PP | Gossypium raimondii |
| 564 | DRM2 Gorai.012G062900.3-amino acid | PP | Gossypium raimondii |
| 565 | DRM2 Gorai.006G031000.1-amino acid | PP | Gossypium raimondii |
| 566 | DRM2 Gorai.006G031000.2-amino acid | PP | Gossypium raimondii |
| 567 | IDN2 Gorai.013G263400.1-amino acid | PP | Gossypium raimondii |
| 568 | MET1 Gorai.004G180200.1-amino acid | PP | Gossypium raimondii |
| 569 | MET1 Gorai.012G048000.1-amino acid | PP | Gossypium raimondii |
| 570 | MET1 Gorai.012G048000.2-amino acid | PP | Gossypium raimondii |
| 571 | MET1 Gorai.012G048000.3-amino acid | PP | Gossypium raimondii |
| 572 | MET1 Gorai.012G048000.4-amino acid | PP | Gossypium raimondii |
| 573 | NRPD1a Gorai.004G207300.1-amino acid | PP | Gossypium raimondii |
| 574 | NRPD1a Gorai.004G207300.2-amino acid | PP | Gossypium raimondii |
| 575 | NRPD1a Gorai.004G207300.3-amino acid | PP | Gossypium raimondii |
| 576 | NRPD1a Gorai.007G022200.1-amino acid | PP | Gossypium raimondii |
| 577 | NRPD1b Gorai.010G216600.1-amino acid | PP | Gossypium raimondii |
| 578 | NRPD1b Gorai.010G216600.3-amino acid | PP | Gossypium raimondii |
| 579 | NRPD1b Gorai.010G216600.2-amino acid | PP | Gossypium raimondii |
| 580 | NRPD1b Gorai.010G216600.4-amino acid | PP | Gossypium raimondii |
| 581 | NRPD2 Gorai.001G037900.1-amino acid | PP | Gossypium raimondii |
| 582 | NRPD2 Gorai.001G037900.2-amino acid | PP | Gossypium raimondii |
| 583 | RDR2 Gorai.008G296900.1-amino acid | PP | Gossypium raimondii |
| 584 | RDR6 Gorai.009G057700.1-amino acid | PP | Gossypium raimondii |
| 585 | SGS3 Gorai.009G148800.1-amino acid | PP | Gossypium raimondii |
| 586 | SGS3 Gorai.009G009900.1-amino acid | PP | Gossypium raimondii |
| 587 | SGS3 Gorai.009G009900.2-amino acid | PP | Gossypium raimondii |
| 588 | SGS3 Gorai.009G009900.3-amino acid | PP | Gossypium raimondii |
| 589 | SGS3 Gorai.002G209000.1-amino acid | PP | Gossypium raimondii |
| 590 | SGS3 Gorai.002G209000.2-amino acid | PP | Gossypium raimondii |
| 591 | SGS3 Gorai.005G260400.2-amino acid | PP | Gossypium raimondii |
| 592 | SGS3 Gorai.005G260400.1-amino acid | PP | Gossypium raimondii |
| 593 | SGS3 Gorai.011G121000.1-amino acid | PP | Gossypium raimondii |
| 594 | SGS3 Gorai.011G121100.4-amino acid | PP | Gossypium raimondii |
| 595 | SGS3 Gorai.011G121100.1-amino acid | PP | Gossypium raimondii |
| 596 | SGS3 Gorai.011G121100.3-amino acid | PP | Gossypium raimondii |
| 597 | SGS3 Gorai.011G121100.2-amino acid | PP | Gossypium raimondii |
| 598 | SGS3 Gorai.011G121100.5-amino acid | PP | Gossypium raimondii |
| 599 | SUVH2H9 Gorai.006G254500.1-amino acid | PP | Gossypium raimondii |
| 600 | RDR1 Gorai.009G352500.1-amino acid | PP | Gossypium raimondii |
| 601 | RDR1 Gorai.013G029000.1-amino acid | PP | Gossypium raimondii |
| 602 | RDR1 Gorai.002G196400.1-amino acid | PP | Gossypium raimondii |
| 603 | DCL4 Gorai.009G053300.1-amino acid | PP | Gossypium raimondii |
| 604 | DCL4 Gorai.009G053300.3-amino acid | PP | Gossypium raimondii |
| 605 | DCL4 Gorai.009G053300.2-amino acid | PP | Gossypium raimondii |
| 606 | AGO5 Gorai.006G103000.1-amino acid | PP | Gossypium raimondii |
| 607 | AGO5 Gorai.006G103000.12-amino acid | PP | Gossypium raimondii |
| 608 | AGO5 Gorai.006G103000.13-amino acid | PP | Gossypium raimondii |
| 609 | AGO5 Gorai.006G103000.14-amino acid | PP | Gossypium raimondii |
| 610 | AGO5 Gorai.006G103000.2-amino acid | PP | Gossypium raimondii |
| 611 | AGO5 Gorai.006G103000.3-amino acid | PP | Gossypium raimondii |
| 612 | AGO5 Gorai.006G103000.4-amino acid | PP | Gossypium raimondii |
| 613 | AGO5 Gorai.006G103000.5-amino acid | PP | Gossypium raimondii |
| 614 | AGO5 Gorai.006G103000.6-amino acid | PP | Gossypium raimondii |
| 615 | AGO5 Gorai.006G103000.15-amino acid | PP | Gossypium raimondii |
| 616 | AGO4 GRMZM2G141818_T03-CDS | PN | Zea mays |
| 617 | AGO4 GRMZM2G141818_T02-CDS | PN | Zea mays |
| 618 | AGO4 GRMZM2G141818_T01-CDS | PN | Zea mays |
| 619 | AGO4 GRMZM2G089743_T01-CDS | PN | Zea mays |
| 620 | AGO4 GRMZM2G089743_T02-CDS | PN | Zea mays |
| 621 | AGO4 GRMZM2G589579_T01-CDS | PN | Zea mays |
| 622 | SUVH2H9 GRMZM2G034288_T01-CDS | PN | Zea mays |
| 623 | SUVH2H9 GRMZM2G025924_T01-CDS | PN | Zea mays |
| 624 | SGS3 GRMZM2G020187_T01-CDS | PN | Zea mays |
| 625 | RDR6 GRMZM2G145201_T01-CDS | PN | Zea mays |
| 626 | RDR6 GRMZM2G357825_T01-CDS | PN | Zea mays |
| 627 | RDR6 GRMZM2G347931_T01-CDS | PN | Zea mays |
| 628 | RDR2 GRMZM2G042443_T01-CDS | PN | Zea mays |
| 629 | NRPD2 GRMZM2G054225_T01-CDS | PN | Zea mays |
| 630 | NRPD2 GRMZM2G054225_T02-CDS | PN | Zea mays |
| 631 | NRPD2 GRMZM2G133512_T01-CDS | PN | Zea mays |
| 632 | NRPD2 GRMZM2G427031_T04-CDS | PN | Zea mays |
| 633 | NRPD1a GRMZM2G080176_T01-CDS | PN | Zea mays |
| 634 | NRPD1a GRMZM2G007681_T01-CDS | PN | Zea mays |
| 635 | NRPD1a GRMZM2G007681_T02-CDS | PN | Zea mays |
| 636 | NRPD1b GRMZM2G470305_T01-CDS | PN | Zea mays |
| 637 | NRPD1b GRMZM2G153797_T01-CDS | PN | Zea mays |
| 638 | NRPD1b GRMZM2G044306_T01-CDS | PN | Zea mays |
| 639 | MET1 GRMZM2G333916_T01-CDS | PN | Zea mays |
| 640 | MET1 GRMZM2G333916_T02-CDS | PN | Zea mays |
| 641 | MET1 GRMZM2G334041_T01-CDS | PN | Zea mays |
| 642 | MET1 GRMZM2G334041_T02-CDS | PN | Zea mays |
| 643 | IDN2 GRMZM2G100898_T01-CDS | PN | Zea mays |
| 644 | IDN2 GRMZM2G025059_T01-CDS | PN | Zea mays |
| 645 | DRM2 GRMZM2G137366_T01-CDS | PN | Zea mays |
| 646 | DCL3 GRMZM5G814985_T01-CDS | PN | Zea mays |
| 647 | DCL3 GRMZM2G413853_T01-CDS | PN | Zea mays |
| 648 | DCL3 GRMZM2G413853_T02-CDS | PN | Zea mays |
| 649 | DCL3 GRMZM2G413853_T03-CDS | PN | Zea mays |
| 650 | CMT3 GRMZM2G005310_T02-CDS | PN | Zea mays |
| 651 | AGO6-8-9 GRMZM2G141818_T01-CDS | PN | Zea mays |
| 652 | AGO6-8-9 GRMZM2G089743_T01-CDS | PN | Zea mays |
| 653 | AGO6-8-9 GRMZM2G089743_T02-CDS | PN | Zea mays |
| 654 | AGO6-8-9 GRMZM2G432075_T01-CDS | PN | Zea mays |
| 655 | AGO5 GRMZM2G079080_T02-CDS | PN | Zea mays |
| 656 | AGO5 AC189879.3_FGT003-CDS | PN | Zea mays |
| 657 | AGO5 GRMZM2G059033_T01-CDS | PN | Zea mays |
| 658 | AGO5 GRMZM2G123063_T01-CDS | PN | Zea mays |
| 659 | DCL4 GRMZM2G040762_T01-CDS | PN | Zea mays |
| 660 | DCL4 GRMZM2G024466-CDS | PN | Zea mays |
| 661 | RDR1 GRMZM2G481730_T01-CDS | PN | Zea mays |
| 662 | AGO4 GRMZM2G141818_T03-Promoter_Genomic | PN | Zea mays |
| 663 | AGO4 GRMZM2G141818_T02-Promoter_Genomic | PN | Zea mays |
| 664 | AGO4 GRMZM2G141818_T01-Promoter_Genomic | PN | Zea mays |
| 665 | AGO4 GRMZM2G089743_T01-Promoter_Genomic | PN | Zea mays |
| 666 | AGO4 GRMZM2G089743_T02-Promoter_Genomic | PN | Zea mays |
| 667 | AGO4 GRMZM2G589579_T01-Promoter_Genomic | PN | Zea mays |
| 668 | AGO6-8-9 GRMZM2G141818_T01-Promoter_Genomic | PN | Zea mays |
| 669 | AGO6-8-9 GRMZM2G089743_T01-Promoter_Genomic | PN | Zea mays |
| 670 | AGO6-8-9 GRMZM2G089743_T02-Promoter_Genomic | PN | Zea mays |
| 671 | AGO6-8-9 GRMZM2G432075_T01-Promoter_Genomic | PN | Zea mays |
| 672 | CMT3 GRMZM2G005310_T02-Promoter_Genomic | PN | Zea mays |
| 673 | CMT3 GRMZM2G005310_T01-Promoter_Genomic | PN | Zea mays |
| 674 | CMT3 GRMZM2G025592_T01-Promoter_Genomic | PN | Zea mays |
| 675 | DCL3 GRMZM5G814985_T01-Promoter_Genomic | PN | Zea mays |
| 676 | DCL3 GRMZM2G413853_T01-Promoter_Genomic | PN | Zea mays |
| 677 | DCL3 GRMZM2G413853_T02-Promoter_Genomic | PN | Zea mays |
| 678 | DCL3 GRMZM2G413853_T03-Promoter_Genomic | PN | Zea mays |
| 679 | DRM2 GRMZM2G137366_T01-Promoter_Genomic | PN | Zea mays |
| 680 | IDN2 GRMZM2G100898_T01-Promoter_Genomic | PN | Zea mays |
| 681 | IDN2 GRMZM2G025059_T01-Promoter_Genomic | PN | Zea mays |
| 682 | MET1 GRMZM2G333916_T01-Promoter_Genomic | PN | Zea mays |
| 683 | MET1 GRMZM2G333916_T02-Promoter_Genomic | PN | Zea mays |
| 684 | MET1 GRMZM2G334041_T01-Promoter_Genomic | PN | Zea mays |
| 685 | MET1 GRMZM2G334041_T02-Promoter_Genomic | PN | Zea mays |
| 686 | NRPD1a GRMZM2G080176_T01-Promoter_Genomic | PN | Zea mays |
| 687 | NRPD1a GRMZM2G007681_T01-Promoter_Genomic | PN | Zea mays |
| 688 | NRPD1b GRMZM2G470305_T01-Promoter_Genomic | PN | Zea mays |
| 689 | NRPD1b GRMZM2G153797_T01-Promoter_Genomic | PN | Zea mays |
| 690 | NRPD1b GRMZM2G044306_T01-Promoter_Genomic | PN | Zea mays |
| 691 | NRPD2 GRMZM2G054225_T01-Promoter_Genomic | PN | Zea mays |
| 692 | NRPD2 GRMZM2G054225_T02-Promoter_Genomic | PN | Zea mays |
| 693 | NRPD2 GRMZM2G133512_T01-Promoter_Genomic | PN | Zea mays |
| 694 | NRPD2 GRMZM2G427031_T04-Promoter_Genomic | PN | Zea mays |
| 695 | RDR2 GRMZM2G042443_T01-Promoter_Genomic | PN | Zea mays |
| 696 | RDR6 GRMZM2G145201_T01-Promoter_Genomic | PN | Zea mays |
| 697 | RDR6 GRMZM2G357825_T01-Promoter_Genomic | PN | Zea mays |
| 698 | RDR6 GRMZM2G347931_T01-Promoter_Genomic | PN | Zea mays |
| 699 | SGS3 GRMZM2G020187_T01-Promoter_Genomic | PN | Zea mays |
| 700 | SUVH2_H9 GRMZM2G034288_T01-Promoter_Genomic | PN | Zea mays |
| 701 | SUVH2_H9 GRMZM2G025924_T01-Promoter_Genomic | PN | Zea mays |
| 702 | AGO5 GRMZM2G079080_T02-Promoter_Genomic | PN | Zea mays |
| 703 | AGO5 AC189879.3_FGT003-Promoter_Genomic | PN | Zea mays |
| 704 | AGO5 GRMZM2G059033_T01-Promoter_Genomic | PN | Zea mays |
| 705 | AGO5 GRMZM2G123063_T01-Promoter_Genomic | PN | Zea mays |
| 706 | RDR1 GRMZM2G481730_T01-Promoter_Genomic | PN | Zea mays |
| 707 | DCL4 GRMZM2G040762_T01- | PN | Zea mays |
| 708 | DCL4 GRMZM2G024466_T01- | PN | Zea mays |
| 709 | AGO4 GRMZM2G141818_T03-amino acid | PP | Zea mays |
| 710 | AGO4 GRMZM2G141818_T02-amino acid | PP | Zea mays |
| 711 | AGO4 GRMZM2G141818_T01-amino acid | PP | Zea mays |
| 712 | AGO4 GRMZM2G089743_T01-amino acid | PP | Zea mays |
| 713 | AGO4 GRMZM2G089743_T02-amino acid | PP | Zea mays |
| 714 | AGO4 GRMZM2G589579_T01-amino acid | PP | Zea mays |
| 715 | AGO689 GRMZM2G141818_T01-amino acid | PP | Zea mays |
| 716 | AGO689 GRMZM2G089743_T01-amino acid | PP | Zea mays |
| 717 | AGO689 GRMZM2G089743_T02-amino acid | PP | Zea mays |
| 718 | AGO689 GRMZM2G432075_T01-amino acid | PP | Zea mays |
| 719 | CMT3 GRMZM2G005310_T02-amino acid | PP | Zea mays |
| 720 | CMT3 GRMZM2G005310_T01-amino acid | PP | Zea mays |
| 721 | CMT3 GRMZM2G025592_T01-amino acid | PP | Zea mays |
| 722 | DCL3 GRMZM5G814985_T01-amino acid | PP | Zea mays |
| 723 | DCL3 GRMZM2G413853_T01-amino acid | PP | Zea mays |
| 724 | DCL3 GRMZM2G413853_T02-amino acid | PP | Zea mays |
| 725 | DCL3 GRMZM2G413853_T03-amino acid | PP | Zea mays |
| 726 | DRM2 GRMZM2G137366_T01-amino acid | PP | Zea mays |
| 727 | IDN2 GRMZM2G100898_T01-amino acid | PP | Zea mays |
| 728 | IDN2 GRMZM2G025059_T01-amino acid | PP | Zea mays |
| 729 | MET1 GRMZM2G333916_T01-amino acid | PP | Zea mays |
| 730 | MET1 GRMZM2G333916_T02-amino acid | PP | Zea mays |
| 731 | MET1 GRMZM2G334041_T01-amino acid | PP | Zea mays |
| 732 | MET1 GRMZM2G334041_T02-amino acid | PP | Zea mays |
| 733 | NRPD1a GRMZM2G080176_T01-amino acid | PP | Zea mays |
| 734 | NRPD1a GRMZM2G007681_T01-amino acid | PP | Zea mays |
| 735 | NRPD1a GRMZM2G007681_T02-amino acid | PP | Zea mays |
| 736 | NRPD1b GRMZM2G470305_T01-amino acid | PP | Zea mays |
| 737 | NRPD1b GRMZM2G153797_T01-amino acid | PP | Zea mays |
| 738 | NRPD1b GRMZM2G044306_T01-amino acid | PP | Zea mays |
| 739 | NRPD2 GRMZM2G054225_T01-amino acid | PP | Zea mays |
| 740 | NRPD2 GRMZM2G054225_T02-amino acid | PP | Zea mays |
| 741 | NRPD2 GRMZM2G133512_T01-amino acid | PP | Zea mays |
| 742 | NRPD2 GRMZM2G427031_T04-amino acid | PP | Zea mays |
| 743 | RDR2 GRMZM2G042443_T01-amino acid | PP | Zea mays |
| 744 | RDR6 GRMZM2G145201_T01-amino acid | PP | Zea mays |
| 745 | RDR6 GRMZM2G357825_T01-amino acid | PP | Zea mays |
| 746 | RDR6 GRMZM2G347931_T01-amino acid | PP | Zea mays |
| 747 | SGS3 GRMZM2G020187_T01-amino acid | PP | Zea mays |
| 748 | SUVH2H9 GRMZM2G034288_T01-amino acid | PP | Zea mays |
| 749 | SUVH2H9 GRMZM2G025924_T01-amino acid | PP | Zea mays |
| 750 | RDR1 GRMZM2G481730_T01-amino acid | PP | Zea mays |
| 751 | DCL4 GRMZM2G040762_T01-amino acid | PP | Zea mays |
| 752 | DCL4 GRMZM2G024466_T01-amino acid | PP | Zea mays |
| 753 | AGO5 GRMZM2G079080_T02-amino acid | PP | Zea mays |
| 754 | AGO5 AC189879.3_FGT003-amino acid | PP | Zea mays |
| 755 | AGO5 GRMZM2G059033_T01-amino acid | PP | Zea mays |
| 756 | AGO5 GRMZM2G123063_T01-amino acid | PP | Zea mays |
| 757 | AGO4 Sb03g011020.1-CDS | PN | Sorghum bicolor |
| 758 | AGO4 Sb03g011020.2-CDS | PN | Sorghum bicolor |
| 759 | AGO4 Sb09g030910.1-CDS | PN | Sorghum bicolor |
| 760 | SUVH2H9 Sb07g023560.1-CDS | PN | Sorghum bicolor |
| 761 | SGS3 Sb08g006200.1-CDS | PN | Sorghum bicolor |
| 762 | SGS3 Sb08g006220.1-CDS | PN | Sorghum bicolor |
| 763 | RDR6 Sb03g022880.1-CDS | PN | Sorghum bicolor |
| 764 | RDR6 Sb07g006150.1-CDS | PN | Sorghum bicolor |
| 765 | RDR6 Sb10g025950.1-CDS | PN | Sorghum bicolor |
| 766 | RDR6 Sb10g025970.1-CDS | PN | Sorghum bicolor |
| 767 | RDR2 Sb06g019330.1-CDS | PN | Sorghum bicolor |
| 768 | NRPD2 Sb01g042100.1-CDS | PN | Sorghum bicolor |
| 769 | NRPD2 Sb06g030300.1-CDS | PN | Sorghum bicolor |
| 770 | NRPD2 Sb07g004600.1-CDS | PN | Sorghum bicolor |
| 771 | NRPD1a Sb06g025933.1-CDS | PN | Sorghum bicolor |
| 772 | NRPD1b Sb04g003760.1-CDS | PN | Sorghum bicolor |
| 773 | MET1 Sb01g005082.1-CDS | PN | Sorghum bicolor |
| 774 | MET1 Sb02g004680.1-CDS | PN | Sorghum bicolor |
| 775 | IDN2 Sb03g006150.1-CDS | PN | Sorghum bicolor |
| 776 | DRM2 Sb01g043010.1-CDS | PN | Sorghum bicolor |
| 777 | DRM2 Sb01g049860-CDS | PN | Sorghum bicolor |
| 778 | DRM2 Sb03g010500.1-CDS | PN | Sorghum bicolor |
| 779 | DCL3 Sb01g018890.1-CDS | PN | Sorghum bicolor |
| 780 | DCL3 Sb03g043355.1-CDS | PN | Sorghum bicolor |
| 781 | CMT3 Sb06g028430.1-CDS | PN | Sorghum bicolor |
| 782 | AGO6-8-9 Sb03g010990.1-CDS | PN | Sorghum bicolor |
| 783 | AGO6-8-9 Sb08g009100.1-CDS | PN | Sorghum bicolor |
| 784 | AGO5 Sb01g004920.1-CDS | PN | Sorghum bicolor |
| 785 | AGO5 Sb02g005150.1-CDS | PN | Sorghum bicolor |
| 786 | AGO5 Sb10g023230.1-CDS | PN | Sorghum bicolor |
| 787 | DCL4 Sb01g015670.1\|Sb01g015670-CDS | PN | Sorghum bicolor |
| 788 | DCL4 Sb06g022180.1\|Sb06g022180-CDS | PN | Sorghum bicolor |
| 789 | AGO4 Sb03g011020.1-Promoter_Genomic | PN | Sorghum bicolor |
| 790 | AGO4 Sb03g011020.2-Promoter_Genomic | PN | Sorghum bicolor |
| 791 | AGO4 Sb09g030910.1-Promoter_Genomic | PN | Sorghum bicolor |
| 792 | AGO6-8-9 Sb03g010990.1-Promoter_Genomic | PN | Sorghum bicolor |
| 793 | AGO6-8-9 Sb08g009100.1-Promoter_Genomic | PN | Sorghum bicolor |
| 794 | CMT3 Sb06g028430.1-Promoter_Genomic | PN | Sorghum bicolor |
| 795 | DCL3 Sb01g018890.1-Promoter_Genomic | PN | Sorghum bicolor |
| 796 | DCL3 Sb03g043355.1-Promoter_Genomic | PN | Sorghum bicolor |
| 797 | DRM2 Sb01g043010.1-Promoter_Genomic | PN | Sorghum bicolor |
| 798 | DRM2 Sb01g049860.1-Promoter_Genomic | PN | Sorghum bicolor |
| 799 | DRM2 Sb03g010500.1-Promoter_Genomic | PN | Sorghum bicolor |
| 800 | IDN2 Sb03g006150.1-Promoter_Genomic | PN | Sorghum bicolor |
| 801 | MET1 Sb01g005082.1-Promoter_Genomic | PN | Sorghum bicolor |
| 802 | MET1 Sb02g004680.1-Promoter_Genomic | PN | Sorghum bicolor |
| 803 | NRPD1a Sb06g025933.1-Promoter_Genomic | PN | Sorghum bicolor |
| 804 | NRPD1b Sb04g003760.1-Promoter_Genomic | PN | Sorghum bicolor |
| 805 | NRPD2 Sb01g042100.1-Promoter_Genomic | PN | Sorghum bicolor |
| 806 | NRPD2 Sb06g030300.1-Promoter_Genomic | PN | Sorghum bicolor |
| 807 | NRPD2 Sb07g004600.1-Promoter_Genomic | PN | Sorghum bicolor |
| 808 | RDR2 Sb06g019330.1-Promoter_Genomic | PN | Sorghum bicolor |
| 809 | RDR6 Sb03g022880\|Sb03g022880.1-Promoter_Genomic | PN | Sorghum bicolor |
| 810 | RDR6 Sb07g006150.1-Promoter_Genomic | PN | Sorghum bicolor |
| 811 | RDR6 Sb10g025950.1-Promoter_Genomic | PN | Sorghum bicolor |
| 812 | RDR6 Sb10g025970.1-Promoter_Genomic | PN | Sorghum bicolor |
| 813 | SGS3 Sb08g006200.1-Promoter_Genomic | PN | Sorghum bicolor |
| 814 | SGS3 Sb08g006220.1-Promoter_Genomic | PN | Sorghum bicolor |
| 815 | SUVH2_H9 Sb07g023560.1-Promoter_Genomic | PN | Sorghum bicolor |
| 816 | AGO5 Sb01g004920.1-Promoter_Genomic | PN | Sorghum bicolor |
| 817 | AGO5 Sb02g005150.1-Promoter_Genomic | PN | Sorghum bicolor |
| 818 | AGO5 Sb10g023230.1-Promoter_Genomic | PN | Sorghum bicolor |
| 819 | DCL4 Sb01g015670.1-Promoter_Genomic | PN | Sorghum bicolor |
| 820 | DCL4 Sb06g022180.1-Promoter_Genomic | PN | Sorghum bicolor |
| 821 | AGO4Sb03g011020.1-amino acid | PP | Sorghum bicolor |
| 822 | AGO4 Sb03g011020.2-amino acid | PP | Sorghum bicolor |
| 823 | AGO4 Sb09g030910.1-amino acid | PP | Sorghum bicolor |
| 824 | AGO689 Sb03g010990.1-amino acid | PP | Sorghum bicolor |
| 825 | AGO689 Sb08g009100.1-amino acid | PP | Sorghum bicolor |
| 826 | CMT3 Sb06g028430.1-amino acid | PP | Sorghum bicolor |
| 827 | DCL3 Sb01g018890.1-amino acid | PP | Sorghum bicolor |
| 828 | DCL3 Sb03g043355.1-amino acid | PP | Sorghum bicolor |
| 829 | DRM2 Sb01g043010.1-amino acid | PP | Sorghum bicolor |
| 830 | DRM2 Sb01g049860.1-amino acid | PP | Sorghum bicolor |
| 831 | DRM2 Sb03g010500.1-amino acid | PP | Sorghum bicolor |
| 832 | IDN2 Sb03g006150.1-amino acid | PP | Sorghum bicolor |
| 833 | MET1 Sb01g005084.1-amino acid | PP | Sorghum bicolor |
| 834 | MET1 Sb02g004680.1-amino acid | PP | Sorghum bicolor |
| 835 | NRPD1a Sb06g025933.1-amino acid | PP | Sorghum bicolor |
| 836 | NRPD1b Sb04g003760.1-amino acid | PP | Sorghum bicolor |
| 837 | NRPD2 Sb01g042100.1-amino acid | PP | Sorghum bicolor |
| 838 | NRPD2 Sb06g030300.1-amino acid | PP | Sorghum bicolor |
| 839 | NRPD2 Sb07g004600.1-amino acid | PP | Sorghum bicolor |
| 840 | RDR2 Sb06g019330.1-amino acid | PP | Sorghum bicolor |
| 841 | RDR6 Sb03g022880.1-amino acid | PP | Sorghum bicolor |
| 842 | RDR6 Sb07g006150.1-amino acid | PP | Sorghum bicolor |
| 843 | RDR6 Sb10g025950.1-amino acid | PP | Sorghum bicolor |
| 844 | RDR6 Sb10g025970.1-amino acid | PP | Sorghum bicolor |
| 845 | SGS3 Sb08g006200.1-amino acid | PP | Sorghum bicolor |
| 846 | SGS3 Sb08g006220.1-amino acid | PP | Sorghum bicolor |
| 847 | SUVH2H9 Sb07g023560.1-amino acid | PP | Sorghum bicolor |
| 848 | DCL4 Sb01g015670.1-amino acid | PP | Sorghum bicolor |
| 849 | DCL4 Sb06g022180.1-amino acid | PP | Sorghum bicolor |
| 850 | AGO5 Sb01g004920.1-amino acid | PP | Sorghum bicolor |
| 851 | AGO5 Sb02g005150.1-amino acid | PP | Sorghum bicolor |
| 852 | AGO5 Sb10g023230.1-amino acid | PP | Sorghum bicolor |
| 853 | AGO4 LOC_Os04g06770.1-CDS | PN | Oryza sativa |
| 854 | AGO4 LOC_Os04g06770.2-CDS | PN | Oryza sativa |
| 855 | AGO4 LOC_Os01g16870.1-CDS | PN | Oryza sativa |
| 856 | AGO4 LOC_Os01g16870.2-CDS | PN | Oryza sativa |
| 857 | AGO4 LOC_Os01g16870.3-CDS | PN | Oryza sativa |
| 858 | AGO4 LOC_Os01g16870.4-CDS | PN | Oryza sativa |
| 859 | SUVH2H9 Os07g25450.1-CDS | PN | Oryza sativa |
| 860 | SGS3 LOC_Os12g09580.1-CDS | PN | Oryza sativa |
| 861 | SGS3 LOC_Os12g09590.1-CDS | PN | Oryza sativa |
| 862 | RDR6 Os01g34350.1-CDS | PN | Oryza sativa |
| 863 | RDR2 LOC_Os04g39160.1-CDS | PN | Oryza sativa |
| 864 | NRPD2 LOC_Os08g07480.1-CDS | PN | Oryza sativa |
| 865 | NRPD2 LOC_Os04g54840.1-CDS | PN | Oryza sativa |
| 866 | NRPD1a Os06g40950.1-CDS | PN | Oryza sativa |
| 867 | NRPD1a Os04g48370.1-CDS | PN | Oryza sativa |
| 868 | NRPD1a Os04g41490.1-CDS | PN | Oryza sativa |
| 869 | NRPD1b LOC_Os01g73430.1-CDS | PN | Oryza sativa |
| 870 | NRPD1b LOC_Os02g05880.1-CDS | PN | Oryza sativa |
| 871 | MET1 LOC_Os03g58400.1-CDS | PN | Oryza sativa |
| 872 | IDN2 LOC_Os01g05470.1-CDS | PN | Oryza sativa |
| 873 | DRM2 LOC_Os03g02010.4-CDS | PN | Oryza sativa |
| 874 | DRM2 LOC_Os12g01800.1-CDS | PN | Oryza sativa |
| 875 | DRM2 LOC_Os11g01810.1-CDS | PN | Oryza sativa |
| 876 | DCL3 gi297610683O-CDS | PN | Oryza sativa |
| 877 | CMT3 LOC_Os03g12570.1-CDS | PN | Oryza sativa |
| 878 | AG06-8-9 LOC_Os07g16224.1-CDS | PN | Oryza sativa |
| 879 | AGO5 LOC_Os07g09020.1-CDS | PN | Oryza sativa |
| 880 | AGO5 LOC_Os03g58600.1-CDS | PN | Oryza sativa |
| 881 | AGO5 LOC_Os06g39640.1-CDS | PN | Oryza sativa |
| 882 | RDR1 LOC_Os02g50330.1-CDS | PN | Oryza sativa |
| 883 | AGO4 LOC_Os04g06770.1-Promoter_Genomic | PN | Oryza sativa |
| 884 | AGO4 LOC_Os04g06770.2-Promoter_Genomic | PN | Oryza sativa |
| 885 | AGO4 LOC_Os01g16870.1-Promoter_Genomic | PN | Oryza sativa |
| 886 | AGO4 LOC_Os01g16870.2-Promoter_Genomic | PN | Oryza sativa |
| 887 | AGO4 LOC_Os01g16870.3-Promoter_Genomic | PN | Oryza sativa |
| 888 | AGO4 LOC_Os01g16870.4-Promoter_Genomic | PN | Oryza sativa |
| 889 | AGO6-8-9 LOC_Os07g16224.1-Promoter_Genomic | PN | Oryza sativa |
| 890 | CMT3 LOC_Os03g12570.1-Promoter_Genomic | PN | Oryza sativa |
| 891 | DRM2 LOC_Os03g02010.4-Promoter_Genomic | PN | Oryza sativa |
| 892 | DRM2 LOC_Os12g01800.1-Promoter_Genomic | PN | Oryza sativa |
| 893 | DRM2 LOC_Os11g01810.1-Promoter_Genomic | PN | Oryza sativa |
| 894 | IDN2 LOC_Os01g05470.1-Promoter_Genomic | PN | Oryza sativa |
| 895 | MET1 LOC_Os03g58400.1-Promoter_Genomic | PN | Oryza sativa |
| 896 | NRPD1a LOC_Os06g40950.1-Promoter_Genomic | PN | Oryza sativa |
| 897 | NRPD1a LOC_Os04g48370.1-Promoter_Genomic | PN | Oryza sativa |
| 898 | NRPD1a LOC_Os04g41490.1-Promoter_Genomic | PN | Oryza sativa |
| 899 | NRPD1b LOC_Os01g73430.1-Promoter_Genomic | PN | Oryza sativa |
| 900 | NRPD1b LOC_Os02g05880.1-Promoter_Genomic | PN | Oryza sativa |
| 901 | NRPD2 LOC_Os08g07480.1-Promoter_Genomic | PN | Oryza sativa |
| 902 | NRPD2 LOC_Os04g54840.1-Promoter_Genomic | PN | Oryza sativa |
| 903 | RDR2 LOC_Os04g39160.1-Promoter_Genomic | PN | Oryza sativa |
| 904 | RDR6 LOC_Os01g34350.1-Promoter_Genomic | PN | Oryza sativa |
| 905 | SGS3 LOC_Os12g09580.1-Promoter_Genomic | PN | Oryza sativa |
| 906 | SGS3 LOC_Os12g09590.1-Promoter_Genomic | PN | Oryza sativa |
| 907 | SUVH2_H9 LOC_Os07g25450.1-Promoter_Genomic | PN | Oryza sativa |
| 908 | AGO5 LOC_Os07g09020.1-Promoter_Genomic | PN | Oryza sativa |
| 909 | AGO5 LOC_Os03g58600.1-Promoter_Genomic | PN | Oryza sativa |
| 910 | AGO5 LOC_Os06g39640.1-Promoter_Genomic | PN | Oryza sativa |
| 911 | RDR1 LOC_Os02g50330.1-Promoter_Genomic | PN | Oryza sativa |
| 912 | AGO4 LOC_Os04g06770.1-amino acid | PP | Oryza sativa |
| 913 | AGO4 LOC_Os04g06770.2-amino acid | PP | Oryza sativa |
| 914 | AGO4 LOC_Os01g16870.1-amino acid | PP | Oryza sativa |
| 915 | AGO4 LOC_Os01g16870.2-amino acid | PP | Oryza sativa |
| 916 | AGO4 LOC_Os01g16870.3-amino acid | PP | Oryza sativa |
| 917 | AGO4 LOC_Os01g16870.4-amino acid | PP | Oryza sativa |
| 918 | AGO689 LOC_Os07g16224.1-amino acid | PP | Oryza sativa |
| 919 | CMT3 LOC_Os03g12570.1-amino acid | PP | Oryza sativa |
| 920 | DCL3 Os10g0485600-amino acid | PP | Oryza sativa |
| 921 | DRM2 LOC_Os03g02010.4-amino acid | PP | Oryza sativa |
| 922 | DRM2 LOC_Os12g01800.1-amino acid | PP | Oryza sativa |
| 923 | DRM2 LOC_Os11g01810.1-amino acid | PP | Oryza sativa |
| 924 | IDN2 LOC_Os01g05470.1-amino acid | PP | Oryza sativa |
| 925 | MET1 LOC_Os03g58400.1-amino acid | PP | Oryza sativa |
| 926 | NRPD1a LOC_Os06g40950.1-amino acid | PP | Oryza sativa |
| 927 | NRPD1a LOC_Os04g48370.1-amino acid | PP | Oryza sativa |
| 928 | NRPD1a LOC_Os04g41490.1-amino acid | PP | Oryza sativa |
| 929 | NRPD1b LOC_Os01g73430.1-amino acid | PP | Oryza sativa |
| 930 | NRPD1b LOC_Os02g05880.1-amino acid | PP | Oryza sativa |
| 931 | NRPD2 LOC_Os08g07480.1-amino acid | PP | Oryza sativa |
| 932 | NRPD2 LOC_Os04g54840.1-amino acid | PP | Oryza sativa |
| 933 | RDR2 LOC_Os04g39160.1-amino acid | PP | Oryza sativa |
| 934 | RDR6 LOC_Os01g34350.1-amino acid | PP | Oryza sativa |
| 935 | SGS3 LOC_Os12g09580.1-amino acid | PP | Oryza sativa |
| 936 | SGS3 LOC_Os12g09590.1-amino acid | PP | Oryza sativa |
| 937 | SUVH2H9 LOC_Os07g25450.1-amino acid | PP | Oryza sativa |
| 938 | RDR1 LOC_Os02g50330.1-amino acid | PP | Oryza sativa |
| 939 | AGO5 LOC_Os07g09020.1-amino acid | PP | Oryza sativa |
| 940 | AGO5 LOC_Os03g58600.1-amino acid | PP | Oryza sativa |
| 941 | AGO5 LOC_Os06g39640.1-amino acid | PP | Oryza sativa |
| 942 | SUVH2H9 gi474402932-CDS | PN | Triticum urartu |
| 943 | SUVH2H9 gi48927668accAY634575.1-CDS | PN | Triticum aestivum |
| 944 | SGS3 GPAAP80862.1-CDS | PN | Triticum aestivum |
| 945 | RDR2 gi474049152_3-CDS | PN | Triticum urartu |
| 946 | RDR2 gi73486682_3-CDS | PN | Triticum aestivum |
| 947 | RDR2 gi4138609AJ011978.1-CDS | PN | Triticum aestivum |
| 948 | NRPD2 gi14017551-CDS | PN | Triticum aestivum |
| 949 | NRPD2 gi474308450-CDS | PN | Triticum urartu |
| 950 | NRPD1a gi14017551_23184-25235-CDS | PN | Triticum aestivum |
| 951 | NRPD1a G1812gi474413220-CDS | PN | Triticum urartu |
| 952 | NRPD1b gi474413146_G1812-CDS | PN | Triticum urartu |
| 953 | MET1 gi474175088-CDS | PN | Triticum urartu |
| 954 | MET1 gi47834699-CDS | PN | Triticum aestivum |
| 955 | CMT3 gi16755863-CDS | PN | Triticum aestivum |
| 956 | CMT3 gi473982126-CDS | PN | Triticum urartu |
| 957 | AGO6-8-9 gbJQ805149.1_GI433351406-CDS | PN | Triticum aestivum |
| 958 | AGO6-8-9 gi474363461-CDS | PN | Triticum urartu |
| 959 | AGO6-8-9 gi474054172-CDS | PN | Triticum urartu |
| 960 | AGO5 gi: 433351409-CDS | PN | Triticum aestivum |
| 961 | AGO5 gi: 474077143-CDS | PN | Triticum urartu |
| 962 | DCL4 gi: 478246245-CDS | PN | Triticum aestivum |
| 963 | DCL4 gi: 473971146-CDS | PN | Triticum urartu |
| 964 | RDR1 gi: 474216269-CDS | PN | Triticum urartu |
| 965 | RDR1 gi: 33342177-CDS | PN | Triticum aestivum |
| 966 | AGO6-8-9 gi474363462-Promoter_Genomic | PN | Triticum urartu |
| 967 | AGO6-8-9 gi474054173-Promoter_Genomic | PN | Triticum urartu |
| 968 | MET1 gi474175088-Promoter_Genomic | PN | Triticum urartu |
| 969 | NRPD1a gi14017551Promoter_Genomic | PN | Triticum aestivum |
| 970 | NRPD1a gi474413220-Promoter_Genomic | PN | Triticum urartu |
| 971 | NRPD1b gi474413146-Promoter_Genomic | PN | Triticum urartu |
| 972 | NRPD2 gi474308450-Promoter_Genomic | PN | Triticum urartu |
| 973 | RDR2 gi474049152-Promoter_Genomic | PN | Triticum urartu |
| 974 | SGS3 GPAAP80862.1-Promoter_Genomic | PN | Triticum aestivum |
| 975 | AGO5 gi: 474077143-Promoter_Genomic | PN | Triticum urartu |
| 976 | AGO5 gi: 433351409-Promoter_Genomic | PN | Triticum aestivum |
| 977 | RDR1 gi: 33342177-Promoter_Genomic | PN | Triticum aestivum |
| 978 | RDR1 gi: 474216269-Promoter_Genomic | PN | Triticum urartu |
| 979 | DCL4 gi: 473971146-Promoter_Genomic | PN | Triticum urartu |
| 980 | DCL4 gi: 478246245-Promoter_Genomic | PN | Triticum aestivum |
| 981 | AGO4gi519669068-amino acid | PP | Triticum aestivum |
| 982 | AGO689gi474054173-amino acid | PP | Triticum urartu |
| 983 | AGO689gi474363462-amino acid | PP | Triticum urartu |
| 984 | AGO689gi433351406-amino acid | PP | Triticum aestivum |
| 985 | CMT3gi16755863-amino acid | PP | Triticum aestivum |
| 986 | CMT3gi473982127-amino acid | PP | Triticum aestivum |
| 987 | MET1 gi: 47834699-amino acid | PP | Triticum aestivum |
| 988 | MET1 gi: 474175089-amino acid | PP | Triticum urartu |
| 989 | NRPD1a gi14017563-amino acid | PP | Triticum aestivum |
| 990 | NRPD1a gi474413220-amino acid | PP | Triticum urartu |
| 991 | NRPD1b gi474413220-amino acid | PP | Triticum urartu |
| 992 | NRPD2 gi14017562-amino acid | PP | Triticum aestivum |
| 993 | NRPD2 gi474308451-amino acid | PP | Triticum urartu |
| 994 | RDR2 gi474049153-amino acid | PP | Triticum urartu |
| 995 | RDR2 gi4138610-amino acid | PP | Triticum aestivum |
| 996 | RDR2 gi73486683-amino acid | PP | Triticum aestivum |
| 997 | SGS3 gi32401386-amino acid | PP | Triticum aestivum |
| 998 | SUVH2H9 gi48927668-amino acid | PP | Triticum aestivum |
| 999 | SUVH2H9 gi474402933-amino acid | PP | Triticum urartu |
| 1000 | RDR1 gi33342178(partial) | PP | Triticum aestivum |
| 1001 | RDR1 gi474216270-amino acid | PP | Triticum urartu |
| 1002 | DCL4 gi: 473971148-amino acid | PP | Triticum urartu |
| 1003 | DCL4 gi: 478246246-amino acid | PP | Triticum aestivum |
| 1004 | AGO5 gi: 474077144-amino acid | PP | Triticum urartu |
| 1005 | AGO5 gi: 433351409-amino acid | PP | Triticum aestivum |
| 1006 | pFGC5941 GenBank: AY310901.1 | PN | Artificial sequence - |
| | | | vector |
| 1007 | pRS300 Addgene plasmid 22846 | PN | Artificial sequence - |
| | Article: Highly specific gene silencing by artificial | | vector |
| | microRNAs in Arabidopsis. Schwab et al (Plant Cell. | | |
| | 2006 May. 18(5): 1121-33. PubMed) | | |
| 1008 | pHELLSGATE GenBank: AJ311874.1 | PN | Artificial sequence - |
| | | | vector |
| 1009 | pMDC32 GenBank: FJ172534.1 | PN | Artificial sequence - |
| | | | vector |

[0062] The term “exogenous” means, introduced from or produced outside the organism or system, for example, a promoter sequence that is sourced from an organism that is of different genetic origin than the organism it is introduced into is an exogenous sequence.

[0063] As used herein, “polynucleotide” includes reference to a deoxyribopolynucleotide, ribopolynucleotide or analogs thereof that have the essential nature of a natural ribonucleotide in that they hybridize, under stringent hybridization conditions, to substantially the same nucleotide sequence as naturally occurring nucleotides and/or allow translation into the same amino acid(s) as the naturally occurring nucleotide(s). A polynucleotide may be full-length or a subsequence of a native or heterologous structural or regulatory gene. Unless otherwise indicated, the term includes reference to the specified sequence as well as the complementary sequence thereof.

[0064] The terms “polypeptide,” “peptide” and “protein” are used interchangeably herein to refer to a polymer of amino acid residues. The terms apply to amino acid polymers in which one or more amino acid residue is an artificial chemical analogue of a corresponding naturally occurring amino acid, as well as to naturally occurring amino acid polymers. The term “polypeptide” refers to one or more amino acid sequences. The term is also inclusive of fragments, variants, homologs, alleles or precursors (e.g., preproproteins or proproteins) thereof.

[0065] As used herein “promoter” includes reference to a region of DNA upstream from the start of transcription and involved in recognition and binding of RNA polymerase and other proteins to initiate transcription. A “plant promoter” is a promoter capable of initiating transcription in plant cells. Exemplary plant promoters include, but are not limited to, those that are obtained from plants, plant viruses and bacteria which comprise genes expressed in plant cells such Agrobacterium or Rhizobium. Examples are promoters that preferentially initiate transcription in certain tissues, such as leaves, roots, seeds, fibres, xylem vessels, tracheids or sclerenchyma. Such promoters are referred to as “tissue preferred.” A “cell type” specific promoter primarily drives expression in certain cell types in one or more organs, for example, vascular cells in roots or leaves. An “inducible” or “regulatable” promoter is a promoter, which is under environmental control. Examples of environmental conditions that may affect transcription by inducible promoters include anaerobic conditions or the presence of light. Another type of promoter is a developmentally regulated promoter, for example, a promoter that drives expression during pollen development. Tissue preferred, cell type specific, developmentally regulated and inducible promoters constitute the class of “non-constitutive” promoters. A “constitutive” promoter is a promoter which is active in essentially all tissues of a plant, under most environmental conditions and states of development or cell differentiation.

[0066] “Parthenogenically-derived embryo” refers to an embryo developed without fusion of the male (sperm cell) and female gametes (egg cell) taking place and is also referred to a parthenogenically-derived clonal embryo.

[0067] As used herein “recombinant” includes reference to a cell or vector, that has been modified by the introduction of a heterologous nucleic acid or that the cell is derived from a cell so modified. Thus, for example, recombinant cells express genes that are not found in identical form within the native (non-recombinant) form of the cell or express native genes that are otherwise abnormally expressed, under expressed or not expressed at all as a result of deliberate human intervention or may have reduced or eliminated expression of a native gene. The term “recombinant” as used herein does not encompass the alteration of the cell or vector by naturally occurring events (e.g., spontaneous mutation, natural transformation/transduction/transposition) such as those occurring without deliberate human intervention.

[0068] As used herein, a “recombinant expression cassette” is a nucleic acid construct, generated recombinantly or synthetically, with a series of specified nucleic acid elements, which permit transcription of a particular nucleic acid in a target cell. The recombinant expression cassette may be incorporated into a plasmid, chromosome, mitochondrial DNA, plastid DNA, virus or nucleic acid fragment. Typically, the recombinant expression cassette portion of an expression vector includes, among other sequences, a nucleic acid to be transcribed and a heterologous promoter.

[0069] “Sexually-generated embryos” refer to embryos that contain both male and female DNA. Sexually-generated embryos are also referred to as non-clonal embryos.

[0070] The phrase “unreduced gamete” refers to a reproductive cell formed by a plant, having the same (“unreduced”) ploidy and/or genotype as somatic (sporophyte) cells of the plant, and capable of contributing genetic material for embryo formation. The gamete may be formed by and/or present in an ovule of the plant and may be described as a female gamete, whether or not the gamete is capable of uniting with a male gamete. A diploid plant produces unreduced gametes that are diploid, a triploid plant produces unreduced gametes that are triploid, as so on. An unreduced female gamete may unite with a male gamete to form a zygote that develops into an embryo, or, in some cases, may develop into an embryo without uniting with a male gamete. An unreduced female gamete may be described as having the same genotype as somatic cells of the plant, which means that at least substantially every allele of a somatic cell is also present in the gamete. In some examples, the chromosomal constitution of the gamete (or of a progeny plant or next generation) may be described as a somatic chromosomal constitution, which means that a copy of each and every somatic chromosome of the parent plant is present in the gamete (or child plant or next generation), with the linkage of alleles on each individual chromosome preserved when comparing somatic cells of the parent plant to the gamete (or child plant or next generation). A somatic chromosomal constitution may be generated in a gamete when no segregation or recombination occurs between homologous chromosomes during gamete formation.

[0071] As used herein, “transgenic plant” includes reference to a plant, which comprises within its genome a heterologous polynucleotide. Generally, the heterologous polynucleotide is stably integrated within the genome such that the polynucleotide is passed on to successive generations. The heterologous polynucleotide may be integrated into the genome alone or as part of a recombinant expression cassette. “Transgenic” is used herein to include any cell, cell line, callus, tissue, plant part or plant, the genotype of which has been altered by the presence of heterologous nucleic acid including those transgenics initially so altered as well as those created by sexual crosses or asexual propagation from the initial transgenic. The term “transgenic” as used herein does not encompass the alteration of the genome (chromosomal or extra-chromosomal) by conventional plant breeding methods or by naturally occurring events such as random cross-fertilization, non-recombinant viral infection, non-recombinant bacterial transformation, non-recombinant transposition or spontaneous mutation. A “heterologous nucleotide sequence” is a sequence that is not naturally occurring with the promoter sequence of the disclosure. While this nucleotide sequence is heterologous to the promoter sequence, it may be homologous (native) or heterologous (foreign) to the plant host.

[0072] As used herein, “vector” includes reference to a nucleic acid used in transfection of a host cell and into which may be inserted a polynucleotide. Vectors are often replicons. Expression vectors permit transcription of a nucleic acid inserted therein.

[0073] The following terms are used to describe the sequence relationships between two or more nucleic acids or polynucleotides or polypeptides: (a) “reference sequence,” (b) “comparison window,” (c) “sequence identity,” (d) “percentage of sequence identity” and (e) “substantial identity.”

[0074] As used herein, “reference sequence” is a defined sequence used as a basis for sequence comparison. A reference sequence may be a subset or the entirety of a specified sequence; for example, as a segment of a full-length cDNA or gene sequence or the complete cDNA or gene sequence.

[0075] As used herein, “comparison window” means includes reference to a contiguous and specified segment of a polynucleotide sequence, wherein the polynucleotide sequence may be compared to a reference sequence and wherein the portion of the polynucleotide sequence in the comparison window may comprise additions or deletions (i.e., gaps) compared to the reference sequence (which does not comprise additions or deletions) for optimal alignment of the two sequences. Generally, the comparison window is at least 20 contiguous nucleotides in length, and optionally may be 30, 40, 50, 100 or longer. Those of skill in the art understand that to avoid a high similarity to a reference sequence due to inclusion of gaps in the polynucleotide sequence a gap penalty is typically introduced and is subtracted from the number of matches.

[0076] Methods of alignment of nucleotide and amino acid sequences for comparison are well known in the art. The local homology algorithm (BESTFIT) of Smith and Waterman, (1981) Adv. Appl. Math 2:482, may conduct optimal alignment of sequences for comparison; by the homology alignment algorithm (GAP) of Needleman and Wunsch, (1970) J. Mol. Biol. 48:443-53; by the search for similarity method (Tfasta and Fasta) of Pearson and Lipman, (1988) Proc. Natl. Acad. Sci. USA 85:2444; by computerized implementations of these algorithms, including, but not limited to: CLUSTAL in the PC/Gene program by Intelligenetics, Mountain View, Calif., GAP, BESTFIT, BLAST, FASTA and TFASTA in the Wisconsin Genetics Software Package, Version 8 (available from Genetics Computer Group (GCG® programs (Accelrys, Inc., San Diego, Calif.)). The CLUSTAL program is well described by Higgins and Sharp, (1988) Gene 73:237-44; Higgins and Sharp, (1989) CABIOS 5:151-3; Corpet, et al., (1988) Nucleic Acids Res. 16:10881-90; Huang, et al., (1992) Computer Applications in the Biosciences 8:155-65 and Pearson, et al., (1994) Meth. Mol. Biol. 24:307-31. The preferred program to use for optimal global alignment of multiple sequences is PileUp (Feng and Doolittle, (1987) J. Mol. Evol., 25:351-60 which is similar to the method described by Higgins and Sharp, (1989) CABIOS 5:151-53 and hereby incorporated by reference). The BLAST family of programs which may be used for database similarity searches includes: BLASTN for nucleotide query sequences against nucleotide database sequences; BLASTX for nucleotide query sequences against protein database sequences; BLASTP for protein query sequences against protein database sequences; TBLASTN for protein query sequences against nucleotide database sequences and TBLASTX for nucleotide query sequences against nucleotide database sequences. See, Current Protocols in Molecular Biology, Chapter 19, Ausubel et al., eds., Greene Publishing and Wiley-Interscience, New York (1995).

[0077] GAP uses the algorithm of Needleman and Wunsch, supra, to find the alignment of two complete sequences that maximizes the number of matches and minimizes the number of gaps. GAP considers all possible alignments and gap positions and creates the alignment with the largest number of matched bases and the fewest gaps. It allows for the provision of a gap creation penalty and a gap extension penalty in units of matched bases. GAP must make a profit of gap creation penalty number of matches for each gap it inserts. If a gap extension penalty greater than zero is chosen, GAP must, in addition, make a profit for each gap inserted of the length of the gap times the gap extension penalty. Default gap creation penalty values and gap extension penalty values in Version 10 of the Wisconsin Genetics Software Package are 8 and 2, respectively. The gap creation and gap extension penalties may be expressed as an integer selected from the group of integers consisting of from 0 to 100. Thus, for example, the gap creation and gap extension penalties may be 0, 1, 2, 3, 4, 5, 6, 7, 8, 9, 10, 15, 20, 30, 40, 50 or greater.

[0078] GAP presents one member of the family of best alignments. There may be many members of this family, but no other member has a better quality. GAP displays four figures of merit for alignments: Quality, Ratio, Identity and Similarity. The Quality is the metric maximized in order to align the sequences. Ratio is the quality divided by the number of bases in the shorter segment. Percent Identity is the percent of the symbols that actually match. Percent Similarity is the percent of the symbols that are similar. Symbols that are across from gaps are ignored. A similarity is scored when the scoring matrix value for a pair of symbols is greater than or equal to 0.50, the similarity threshold. The scoring matrix used in Version 10 of the Wisconsin Genetics Software Package is BLOSUM62 (see, Henikoff and Henikoff, (1989) Proc. Natl. Acad. Sci. USA 89:10915).

[0079] Unless otherwise stated, sequence identity/similarity values provided herein refer to the value obtained using the BLAST 2.0 suite of programs using default parameters (Altschul, et al., (1997) Nucleic Acids Res. 25:3389-402).

[0080] As those of ordinary skill in the art will understand, BLAST searches assume that proteins may be modeled as random sequences. However, many real proteins comprise regions of nonrandom sequences, which may be homopolymeric tracts, short-period repeats, or regions enriched in one or more amino acids. Such low-complexity regions may be aligned between unrelated proteins even though other regions of the protein are entirely dissimilar. A number of low-complexity filter programs may be employed to reduce such low-complexity alignments. For example, the SEG (Wooten and Federhen, (1993) Comput. Chem. 17:149-63) and XNU (Claverie and States, (1993) Comput. Chem. 17:191-201) low-complexity filters may be employed alone or in combination.

[0081] As used herein, “sequence identity” or “identity” in the context of two nucleic acid or polypeptide sequences includes reference to the residues in the two sequences, which are the same when aligned for maximum correspondence over a specified comparison window. When percentage of sequence identity is used in reference to proteins it is recognized that residue positions which are not identical often differ by conservative amino acid substitutions, where amino acid residues are substituted for other amino acid residues with similar chemical properties (e.g., charge or hydrophobicity) and therefore do not change the functional properties of the molecule. Where sequences differ in conservative substitutions, the percent sequence identity may be adjusted upwards to correct for the conservative nature of the substitution. Sequences, which differ by such conservative substitutions, are said to have “sequence similarity” or “similarity.” Means for making this adjustment are well known to those of skill in the art. Typically this involves scoring a conservative substitution as a partial rather than a full mismatch, thereby increasing the percentage sequence identity. Thus, for example, where an identical amino acid is given a score of 1 and a non-conservative substitution is given a score of zero, a conservative substitution is given a score between zero and 1. The scoring of conservative substitutions is calculated, e.g., according to the algorithm of Meyers and Miller, (1988) Computer Applic. Biol. Sci. 4:11-17, e.g., as implemented in the program PC/GENE (Intelligenetics, Mountain View, Calif., USA).

[0082] As used herein, “percentage of sequence identity” means the value determined by comparing two optimally aligned sequences over a comparison window, wherein the portion of the polynucleotide sequence in the comparison window may comprise additions or deletions (i.e., gaps) as compared to the reference sequence (which does not comprise additions or deletions) for optimal alignment of the two sequences. The percentage is calculated by determining the number of positions at which the identical nucleic acid base or amino acid residue occurs in both sequences to yield the number of matched positions, dividing the number of matched positions by the total number of positions in the window of comparison and multiplying the result by 100 to yield the percentage of sequence identity.

[0083] The term “substantial identity” of polynucleotide sequences means that a polynucleotide comprises a sequence that has between 50-100% sequence identity, preferably at least 50% sequence identity, preferably at least 60% sequence identity, preferably at least 70%, more preferably at least 80%, more preferably at least 90% and most preferably at least 95%, compared to a reference sequence using one of the alignment programs described using standard parameters. One of skill will recognize that these values may be appropriately adjusted to determine corresponding identity of proteins encoded by two nucleotide sequences by taking into account codon degeneracy, amino acid similarity, reading frame positioning and the like. Substantial identity of amino acid sequences for these purposes normally means sequence identity of between 55-100%, preferably at least 55%, preferably at least 60%, more preferably at least 70%, 80%, 90% and most preferably at least 95%.

[0084] The terms “substantial identity” in the context of a peptide indicates that a peptide comprises a sequence with between 55-100% sequence identity to a reference sequence preferably at least 55% sequence identity, preferably 60% preferably 70%, more preferably 80%, most preferably at least 90% or 95% sequence identity to the reference sequence over a specified comparison window. Preferably, optimal alignment is conducted using the homology alignment algorithm of Needleman and Wunsch, supra. An indication that two peptide sequences are substantially identical is that one peptide is immunologically reactive with antibodies raised against the second peptide. Thus, a peptide is substantially identical to a second peptide, for example, where the two peptides differ only by a conservative substitution. In addition, a peptide may be substantially identical to a second peptide when they differ by a non-conservative change if the epitope that the antibody recognizes is substantially identical. Peptides, which are “substantially similar” share sequences as, noted above except that residue positions, which are not identical, may differ by conservative amino acid changes.

[0085] Unreduced female gametes may be formed by diplospory or apospory, among others. The process of diplospory generates an unreduced gamete from a typical gamete precursor, a megaspore mother cell (MMC), which fails to undergo meiosis. The process of apospory generates an unreduced gamete by direct differentiation of a somatic cell into a gamete precursor, an MMC-like cell. The MMC-like cell generally is formed in a distinct site from the MMC (if present). Apospory may occur via a supernumerary gamete precursor while the usual gamete precursor undergoes meiosis (or apomeiosis).

[0086] Unreduced female gametes may be generated at any suitable frequency relative to total female gametes (unreduced and meiotically reduced). For example, the frequency of unreduced female gametes generated by an individual plant may be at least about 1%, 5%, 10%, or 25%, among others.

[0087] The term “apomixis” (plural apomixes) refers to clonal reproduction through seeds. Apomixis is the process by which a maternal plant produces one or more clonal seeds each containing an embryo that is a clone of the maternal plant. In other words, the embryo is genetically identical to the maternal plant and contains no genetic material from a paternal plant (e.g., a diploid maternal plant produces a diploid embryo clone). The embryo clone contains the unreduced genome (the somatic genome) of the maternal plant. Each of the clonal seeds interchangeably may be termed an asexual seed or an apomictic seed. The clonal seed may contain endosperm that is produced without plant pollination (i.e., the endosperm contains only the maternal genome and no paternal genes/genome). Alternatively, if the maternal plant has been pollinated, the endosperm of the clonal seed may result from fertilization and may have a maternal contribution and a paternal contribution (from pollen). Each clonal seed, if viable, may germinate to produce a progeny plant that is a clone of the maternal plant. A maternal plant that reproduces by apomixis forms viable clonal seeds at a detectable frequency, with any suitable percentage of its seeds being clonal, such as at least about 0.1%, 0.2%, 0.3%, 0.4%, 0.5%, 0.6%, 0.7%, 0.8%, 0.9%, 1%, 5%, 10%, 20%, 50%, or 100%, among others. The number and frequency of clonal seeds and non-clonal seeds may be influenced by the genotype of the maternal plant and its environment (i.e., whether or not the maternal plant is pollinated).

[0088] Apomixis may occur in a maternal plant when an RNA-dependent DNA methylation (RdDM) pathway is defective. Accordingly, apomixis may be induced by rendering the pathway defective. The pathway may be involved in silencing repetitive sequences by methylation of the sequences. RdDM may be required to prevent apomixis. The structure, expression, and/or activity of at least one member of the RdDM pathway may be altered to render RdDM defective and promote apomixis. The member(s) may be one or more of AGO4, AGO6, AGO9, CMT3, DCL3, DRM2, IDS2, MET1, NPRD1a, NPRD1b, NRPE1, NRPE2, RDR2, RDR6, SGS3, SUVH2, and SUVH9, among others, or a functional/structural homolog of any of the members from a different species. The homolog may exhibit homology through identity or similarity at the gene, RNA, and/or polypeptide level.

[0089] An amount of identity or similarity between two polypeptides may be determined by the blastp algorithm (e.g., program BLASTP 2.2.18+), as described in the following two references, which are incorporated herein by reference: Stephen F. Altschul, et al. (1997), “Gapped BLAST and PSI-BLAST: a new generation of protein database search programs,” Constructs Res. 25:3389-3402; and Stephen F. Altschul et al. (2005) “Protein database searches using compositionally adjusted substitution matrices,” FEBS J. 272:5101-5109. Examples of substantial similarity or identity include at least about 40%, 50%, 60%, 70%, or 80% sequence similarity or identity, a similarity score of at least about 200 or 250, and/or an E-Value of less than about 1e-40, 1e-60, or 1e-80, among others, using the blastp algorithm, with optimal alignment and, if needed, introduction of gaps.

[0090] A DNA sequence is “operatively linked” to an expression control sequence when the expression control sequence controls and regulates the transcription and translation of that DNA sequence. For example, the DNA sequence may be a targeting region and the expression control sequence may be a promoter. The term “operatively linked” includes having an appropriate start signal (e.g., ATG) in front of the DNA sequence to be expressed and maintaining the correct reading frame to permit expression of the DNA sequence under the control of the expression control sequence and production of the desired product encoded by the DNA sequence.

[0091] The phrase “RNA interference” refers to a process of inhibiting gene expression in a targeted fashion using RNA mediators, which may be termed interfering RNAs. Interfering RNAs may include double-stranded RNAs, short interfering RNAs, micro RNAs, and/or the like. In some embodiments, the interfering RNA, as expressed or introduced, may be a double-stranded RNA, such as an RNA with a hairpin structure, which may be processed in the cell to form a small RNA (e.g., a short interfering RNA or a micro RNA). Small RNAs generally include RNAs of less than about 30 nucleotides, such as RNAs of 20, 21, 22, 23, 24, or 25 nucleotides, among others. RNA interference may inhibit gene expression before, during, and/or after transcription of a gene (i.e., by a transcriptional and/or a post-transcriptional mechanism), such as by gene modification (e.g., DNA/histone methylation), mRNA degradation, and/or inhibition of mRNA translation, among others.

[0092] The phrase “defective for RNA-dependent DNA methylation (RdDM) activity” refers to a plant defective for RNA-dependent DNA methylation such that RNA-dependent DNA methylation activity is modulated, for example, decreased, inhibited or silenced. Being defective for RdDM activity means that at least one gene in the RNA-dependent DNA methylation pathway has been altered to the extent that the altered gene or protein results in defective RNA-dependent DNA methylation. In some instances, more than one gene or protein in the RNA-dependent DNA methylation pathway may be altered, wherein the combination of the more than one altered genes or protein results in defective RNA-dependent DNA methylation. The gene or protein in the RdDM pathway may be altered in level of expression or RNA-dependent DNA methylation (RdDM) activity so that RNA-dependent DNA methylation activity is decreased or inhibited or silenced. An altered gene that results in defective RNA-dependent DNA methylation may include an alteration (substitution or deletion), insertion or modification to any gene that encodes a product involved in and/or required for RNA-dependent DNA methylation, wherein the alteration or modification result in defective RNA-dependent DNA methylation. Defects in RdDM activity may include global or specific up- or down-regulation of small RNA molecules affecting target genes. Likewise, defects in RdDM activity may include global or specific up- or down-regulation of DNA methylation affecting target genes or chromosomal regions.

[0093] The term “plant” refers to a member of the Plantae kingdom of eukaryotic organisms, which may be described as a tree, bush, grass, shrub, herb, vine, moss, fern, algae, or a combination thereof, among others. A plant may (or may not) lack the capability for locomotive movement and generally possesses cell walls formed of cellulose. A plant may be capable of carrying out photosynthesis and may (or may not) be a vascular plant. In some embodiments, the plant may be an annual or a perennial. The plant may be a flowering plant (an angiosperm), such as a monocotyledon or a dicotyledon. In some embodiments, the plant may produce a grain, tuber, fruit, vegetable, nut, seed, fiber, oil, or a combination thereof, among others. Furthermore, the plant may be a crop plant. Exemplary crop plants that may be suitable for generation of transgenic plants according to the present disclosure include tobacco, potato, corn (maize), tomato, rice, wheat, alfalfa, soybean, and the like.

[0094] The phrase “transformed plant” refers to a plant comprising a nucleic acid construct, interchangeably termed a transgenic plant. The construct may be integrated into the plant's genome (i.e., nuclear or plastid genome), in some or at least substantially all of the cells of the plant. For example, the construct may be present in the plant's germline. Accordingly, the construct may be heritable, that is, inherited by at least one or more members, or at least substantially all members, of a succeeding generation of the plant.

[0095] The term “nucleic acid” refers to a compound comprising a chain of nucleotides. A nucleic acid may be single-stranded or double stranded. A nucleic acid may have a natural or artificial (i.e., engineered) structure, or a combination thereof. A nucleic acid may refer to ribonucleic acids, deoxyribonucleic acids, or a hybrid.

[0096] The term “gene” refers to a nucleic acid or segment thereof that provides an expressible unit for expression of a polypeptide and/or a functional RNA (e.g., an interfering RNA). A gene thus may include a targeting region (also termed a targeting sequence) to define the sequence of the interfering RNA that is expressed and at least one transcriptional promoter (also termed a promoter sequence) operatively linked to the targeting region, to control (i.e., promote, drive, and/or regulate) transcription of the targeting region. A gene optionally may include one or more other control regions and/or untranslated regions, such as at least one 5′ leader sequence, intron, transcriptional terminator (also termed a terminator sequence), or any combination thereof, among others.

[0097] The term “genetics” may refer to a subset or portion of the genome of a subject, which may be one or two nucleotides, a SNP, or a defined sequence, and determining the genetics of a subject may comprise, but is not limited to, identifying, locating, sequencing, probing, hybridizing to, quantifying or labeling one or more nucleic acid bases of the genome of the subject, which for example a subject may be a plant, seed or embryo or parts thereof.

[0098] The term “construct” refers to a nucleic acid created, at least in part, outside of plants using techniques of genetic engineering. A gene included in a construct may be termed a transgene.

[0099] The term “expression” refers to a process by which a product, namely, an RNA and/or a polypeptide, is synthesized based on information encoded in a nucleic acid and/or gene, generally in the form of DNA (or RNA). Accordingly, the nucleic acid/gene may be expressed to form an RNA and/or polypeptide, which means that the RNA and/or polypeptide is expressed from the nucleic acid/gene.

[0100] Ranges may be expressed herein as from “about” one particular value, and/or to “about” another particular value. When such a range is expressed, also specifically contemplated and considered disclosed is the range—from the one particular value and/or to the other particular value unless the context specifically indicates otherwise. Similarly, when values are expressed as approximations, by use of the antecedent “about,” it will be understood that the particular value forms another, specifically contemplated embodiment that should be considered disclosed unless the context specifically indicates otherwise. It will be further understood that the endpoints of each of the ranges are significant both in relation to the other endpoint, and independently of the other endpoint unless the context specifically indicates otherwise. Finally, it should be understood that all of the individual values and sub-ranges of values contained within an explicitly disclosed range are also specifically contemplated and should be considered disclosed unless the context specifically indicates otherwise. The foregoing applies regardless of whether in particular cases some or all of these embodiments are explicitly disclosed.

[0101] Unless defined otherwise, all technical and scientific terms used herein have the same meanings as commonly understood by one of skill in the art to which the disclosed method and compositions belong. Although any methods and materials similar or equivalent to those described herein may be used in the practice or testing of the present method and compositions, the particularly useful methods, devices, and materials are as described. Publications cited herein and the material for which they are cited are hereby specifically incorporated by reference. Nothing herein is to be construed as an admission that the present invention is not entitled to antedate such disclosure by virtue of prior invention. No admission is made that any reference constitutes prior art. The discussion of references states what their authors assert, and applicants reserve the right to challenge the accuracy and pertinency of the cited documents. It will be clearly understood that, although a number of publications are referred to herein, such reference does not constitute an admission that any of these documents forms part of the common general knowledge in the art.

[0102] Those skilled in the art will recognize, or be able to ascertain using no more than routine experimentation, many equivalents to the specific embodiments of the method and compositions described herein. Such equivalents are intended to be encompassed by the following claims.

### B. Methods

[0103] Methods of Obtaining Seeds Comprising Clonal Embryos

[0104] Disclosed are methods of obtaining seeds comprising clonal embryos comprising collecting one or more seeds produced by a maternal plant, wherein the maternal plant is unable to be pollinated, wherein the one or more seeds comprise a parthenogenically-derived embryo that is a clone of the maternal plant.

[0105] Disclosed are methods of obtaining seeds comprising clonal embryos comprising collecting one or more seeds produced by a maternal plant, wherein the maternal plant is unable to be pollinated, wherein the one or more seeds comprise a parthenogenically-derived embryo that is a clone of the maternal plant, wherein the maternal plant is defective in at least one RNA dependent DNA methylation pathway gene. For example, the RNA dependent DNA methylation pathway gene may be, but is not limited to, any of the polynucleotides included in Table 1 and sequences in the accompanying sequence listing, AGO4 (ARGONAUTE 4), AGO6 (ARGONAUTE 6), AGO8 (ARGONAUTE 8), AGO9 (ARGONAUTE 9), CMT3 (CHROMOMETHYLASE 3), DCL3 (DICER-LIKE 3), DRM2 (DOMAINS REARRANGED METHYLASE 2), EXS1 (EXTRA SPOROGENOUS CELLS1), IDN2 (INVOLVED IN DE NOVO 2), MET1 (METHYL TRANSFERASE 1), NPRD1a (NUCLEAR POLYMERASE D 1a), NRPD1b (NUCLEAR POLYMERASE D 1b), NRPD2 (NUCLEAR POLYMERASE D 2), NRPE1 (NUCLEAR RNA POLYMERASE E 1), NRPE2 (NUCLEAR RNA POLYMERASE E 2), RDR2 (RNA-DEPENDENT RNA POLYMERASE 2), RDR6 (RNA-DEPENDENT RNA POLYMERASE 6), SGS3 (SUPPRESSOR OF GENE SILENCING 3), SUVH2 (SUPPRESSOR OF VARIEGATION 3-9 HOMOLOG 2), and SUVH9 (SUPPRESSOR OF VARIEGATION 3-9 HOMOLOG 9). Defective RNA-dependent DNA methylation may result in plants that are unable to form viable pollen.

[0106] In some instances, the AGO4 allele may be ago4-6 or ago4-1; the AGO6 allele may be ago6-2; the AGO9 allele may be 9-2, 9-3 or 9-4; the AGO8 allele may be ago 8-1; the RDR2 allele may be rdr2-1; the RDR6 allele may be rdr6-15 or rdr6-11; the SGS3 allele may be sgs3-11; the DRM2 allele may be drm2-2; and the MET1 allele may be met1-7.

[0107] Also disclosed are methods of obtaining seeds comprising clonal embryos comprising a) collecting one or more seeds produced by a maternal plant, wherein the maternal plant is defective in at least one RNA dependent DNA methylation pathway gene; and b) sorting the seeds to separate the seeds comprising clonal embryos from the seeds comprising non-clonal embryos; wherein the maternal plant is pollinated prior to collecting the seeds, and wherein the one or more seeds produced by the maternal plant comprise an embryo that is a clone of the maternal plant.

[0108] Sorting seeds may be based on phenotype or genotype. Sorting by phenotype may comprise sorting the seeds based on size, shape, color, or a combination thereof. Sorting may be performed manually or automatically. Automatic sorting may comprise a machine comprising an optical detector. In some instances, the sorting may be done visually.

[0109] The disclosed methods of obtaining seeds comprising clonal embryos may comprise a maternal plant that is unable to self-pollinate. A maternal plant's ability to self-pollinate may be disrupted physically, chemically, or genetically. Examples of chemical disruption comprise exposure to a gametocide that abolishes pollen formation. Gametocides may include, but are not limited to, at least one of maleic hydrazide (1,2-dihydropyridazine, 3-6-dione) (MH), 2,4-dichlorophenoxyacetic acid (2,4-D), a-naphthalene acetic acid (NAA), and tri-iodobenzoic acid (TIBA). Examples of physical disruption comprise emasculating the maternal plant. Emasculating occurs prior to collecting one or more seeds.

[0110] Also disclosed are methods of obtaining clonal seeds, the method comprising: (A) obtaining one or more maternal plants, each optionally being defective for RNA-dependent DNA methylation; (B) allowing pollination of the maternal plants; (C) collecting a mixture of seeds produced by the maternal plants and including seeds comprising non-clonal embryos that were sexually-generated and seeds comprising clonal embryos that are each a clone of a maternal plant; and (D) sorting the mixture to separate seeds comprising clonal embryos from seeds comprising non-clonal embryos by distinguishing clonal embryos from sexually-generated embryos.

[0111] Disclosed are methods of obtaining clonal seeds, the method comprising: (A) obtaining one or more maternal plants, each optionally being defective for RNA-dependent DNA methylation; (B) allowing pollination of the maternal plants; (C) collecting a mixture of seeds produced by the maternal plants and including seeds comprising non-clonal embryos that were sexually-generated and seeds comprising clonal embryos that are each a clone of a maternal plant; and (D) sorting the mixture to separate seeds comprising clonal embryos from seeds comprising non-clonal embryos by distinguishing clonal embryos from sexually-generated embryos, wherein the step of sorting includes a step of optically distinguishing clonal embryos from sexually-generated embryos.

[0112] Clonal embryos may be distinguished from sexually-generated embryos at least in part by color. In some instances, clonal embryos may be distinguished from sexually-generated embryos at least in part by size, shape, size and shape, or genetic testing.

[0113] Disclosed are methods of obtaining clonal seeds, the method comprising: (A) obtaining one or more maternal plants, each optionally being defective for RNA-dependent DNA methylation; (B) allowing pollination of the maternal plants; (C) collecting a mixture of seeds produced by the maternal plants and including non-clonal seeds containing sexually-generated embryos and clonal seeds containing clonal embryos that are each a clone of a maternal plant; and (D) sorting the mixture to separate clonal seeds from non-clonal seeds by distinguishing clonal embryos from sexually-generated embryos, wherein the step of sorting includes a step of optically distinguishing clonal embryos from sexually-generated embryos, wherein the step of sorting may be performed manually. In some instances, the step of sorting may be performed automatically. In some instances, the step of sorting may be performed with a machine including an optical detector.

[0114] Disclosed are methods of obtaining clonal seeds, the method comprising: (A) obtaining one or more maternal plants, each optionally being defective for RNA-dependent DNA methylation; (B) allowing pollination of the maternal plants; (C) collecting a mixture of seeds produced by the maternal plants and including non-clonal seeds containing sexually-generated embryos and clonal seeds containing clonal embryos that are each a clone of a maternal plant; and (D) sorting the mixture to separate clonal seeds from non-clonal seeds by distinguishing clonal embryos from sexually-generated embryos, wherein each maternal plant has at least one mutation that renders the maternal plant defective for RNA-dependent DNA methylation. A mutation that renders the maternal plant defective for RNA-dependent DNA methylation may modify at least one endogenous gene that encodes a product involved in and/or required for RNA-dependent DNA methylation. The mutation may include a mutation that occurred spontaneously or that was produced with a nonspecific chemical mutagen, a transposable element, or a targeting construct (e.g., CRE/LOX).

[0115] In any of the disclosed methods, each maternal plant may include at least one construct that renders the maternal plant defective for RNA-dependent DNA methylation. The construct may be any of the constructs disclosed herein. For example, the construct may comprise a siRNA that silences expression of a gene in the RNA-dependent DNA methylation pathway. In some instances, the at least one construct expresses at least one RNA that renders the maternal plant defective for RNA-dependent DNA methylation. RNA may include an RNA having a pair of regions configured to base-pair intramolecularly.

[0116] The step of obtaining one or more maternal plants may include a step of transforming an ancestor of the one or more maternal plants with at least one construct including an embryo marker and/or configured to affect a characteristic of an embryo marker provided by each maternal plant. A further step of transforming an ancestor of the one or more maternal plants with at least one construct to render RNA-dependent DNA methylation defective may be employed. A same ancestor of the one or more maternal plants may be transformed to introduce the embryo marker and render RNA-dependent DNA methylation defective. For example, the ancestor is transformed with a single construct including the embryo marker and configured to affect RNA-dependent DNA methylation.

[0117] Each maternal plant may include an embryo marker introduced by breeding in the disclosed methods of obtaining clonal seeds. The embryo marker may be an allelic variant, such as a mutant, of an endogenous gene.

[0118] Disclosed are methods of obtaining clonal seeds, wherein an embryo marker may be provided by pollen.

[0119] Disclosed are methods of obtaining clonal seeds, wherein none of the maternal plants contributes pollen for the step of allowing pollination.

[0120] Disclosed are methods of obtaining clonal seeds, wherein each of the maternal plants may be male sterile.

[0121] In some instances, each of the maternal plants may be exposed to a gametocide that abolishes pollen formation before the step of allowing pollination, and wherein the gametocide includes at least one of maleic hydrazide (1,2-dihydropyridazine, 3-6-dione) (MH), 2,4-dichlorophenoxyacetic acid (2,4-D), a-naphthalene acetic acid (NAA), and tri-iodobenzoic acid (TIBA).

[0122] In some instances the methods of obtaining clonal seeds further comprises a step of emasculating each of the maternal plants before the step of allowing pollination.

[0123] Disclosed are methods of obtaining clonal seeds, wherein each maternal plant has an abnormal level, activity, and/or structure of at least one of the following genes/gene products: any of the polynucleotides or polypeptides included in Table 1 and the sequences in the accompanying sequence listing, AGO4 (ARGONAUTE 4), AGOG (ARGONAUTE 6), AGO9 (ARGONAUTE 9), CMT3 (CHROMOMETHYLASE 3), DCL3 (DICER-LIKE 3), DRM2 (DOMAINS REARRANGED METHYLASE 2), IDN2 (INVOLVED IN DE NOVO 2), MET1 (METHYL TRANSFERASE 1), NPRD1a (NUCLEAR POLYMERASE D 1a), NPRD1b (NUCLEAR POLYMERASE D 1b), NPRD2 (NUCLEAR POLYMERASE D 2), NRPE1 (NUCLEAR RNA POLYMERASE E 1), NRPE2 (NUCLEAR RNA POLYMERASE E 2), RDR2 (RNA-DEPENDENT RNA POLYMERASE 2), RDR6 (RNA-DEPENDENT RNA POLYMERASE 6), SGS3 (SUPPRESSOR OF GENE SILENCING 3), SUVH2 (SUPPRESSOR OF VARIEGATION 3-9 HOMOLOG 2), and SUVH9 (SUPPRESSOR OF VARIEGATION 3-9 HOMOLOG 9).

[0124] Also disclosed are methods of obtaining clonal seeds, the method comprising: (A) obtaining one or more maternal plants each defective for RNA-dependent DNA methylation and each unable to form, or prevented from forming, viable pollen; and (B) collecting seeds produced by the one or more maternal plants, each seed containing an embryo that is a clone of the maternal plant. In some instances, each maternal plant is unable to form viable pollen.

[0125] Disclosed are methods of obtaining clonal seeds, the method comprising: (A) obtaining one or more maternal plants each defective for RNA-dependent DNA methylation and each unable to form, or prevented from forming, viable pollen; and (B) collecting seeds produced by the one or more maternal plants, each seed containing an embryo that is a clone of the maternal plant, wherein each maternal plant is unable to form viable pollen, wherein each maternal plant contains at least one construct that renders the maternal plant unable to form viable pollen.

[0126] Disclosed are methods of obtaining clonal seeds, the method comprising: (A) obtaining one or more maternal plants each defective for RNA-dependent DNA methylation and each unable to form, or prevented from forming, viable pollen; and (B) collecting seeds produced by the one or more maternal plants, each seed containing an embryo that is a clone of the maternal plant, wherein each maternal plant is unable to form viable pollen, wherein each maternal plant has one or more mutations that render the maternal plant unable to form viable pollen.

[0127] Disclosed are methods of obtaining clonal seeds, the method comprising: (A) obtaining one or more maternal plants each defective for RNA-dependent DNA methylation and each unable to form, or prevented from forming, viable pollen; and (B) collecting seeds produced by the one or more maternal plants, each seed containing an embryo that is a clone of the maternal plant, wherein the step of obtaining includes a step of emasculating each maternal plant by removing one or more male reproductive organs, namely, stamens, from the maternal plant.

[0128] Disclosed are methods of obtaining clonal seeds, the method comprising: (A) obtaining one or more maternal plants each defective for RNA-dependent DNA methylation and each unable to form, or prevented from forming, viable pollen; and (B) collecting seeds produced by the one or more maternal plants, each seed containing an embryo that is a clone of the maternal plant, wherein the step of obtaining includes a step of exposing each maternal plant to a substance (a gametocide) that abolishes formation of viable pollen.

### Methods of Plant Cloning

[0129] Disclosed are methods of plant cloning, the method comprising: (A) obtaining one or more maternal plants, each optionally being defective for RNA-dependent DNA methylation; (B) allowing pollination of the maternal plants; (C) growing progeny plants from seeds produced by the one or more maternal plants, the progeny plants including sexually-generated plants and clonal plants, each clonal plant being a clone of a maternal plant; and (D) distinguishing clonal plants from sexually-generated plants.

[0130] Disclosed are methods of plant cloning, the method comprising: (A) obtaining one or more maternal plants, each optionally being defective for RNA-dependent DNA methylation; (B) allowing pollination of the maternal plants; (C) growing progeny plants from seeds produced by the one or more maternal plants, the progeny plants including sexually-generated plants and clonal plants, each clonal plant being a clone of a maternal plant; and (D) distinguishing clonal plants from sexually-generated plants, wherein each maternal plant includes at least one construct that renders the maternal plant defective for RNA-dependent DNA methylation.

[0131] Disclosed are methods of plant cloning, the method comprising: (A) obtaining one or more maternal plants, each optionally being defective for RNA-dependent DNA methylation; (B) allowing pollination of the maternal plants; (C) growing progeny plants from seeds produced by the one or more maternal plants, the progeny plants including sexually-generated plants and clonal plants, each clonal plant being a clone of a maternal plant; and (D) distinguishing clonal plants from sexually-generated plants, wherein each maternal plant includes at least one construct that renders the maternal plant defective for RNA-dependent DNA methylation, wherein the at least one construct expresses at least one RNA that renders the maternal plant defective for RNA-dependent DNA methylation. For example, the at least one RNA may include an RNA having a pair of regions configured to base-pair intramolecularly.

[0132] Disclosed are methods of plant cloning, the method comprising: (A) obtaining one or more maternal plants, each optionally being defective for RNA-dependent DNA methylation; (B) allowing pollination of the maternal plants; (C) growing progeny plants from seeds produced by the one or more maternal plants, the progeny plants including sexually-generated plants and clonal plants, each clonal plant being a clone of a maternal plant; and (D) distinguishing clonal plants from sexually-generated plants, wherein the step of obtaining one or more maternal plants includes a step of transforming an ancestor of the one or more maternal plants with at least one construct including an embryo marker and/or configured to affect a characteristic of an embryo marker provided by each maternal plant.

[0133] Disclosed are methods of plant cloning, the method comprising: (A) obtaining one or more maternal plants, each optionally being defective for RNA-dependent DNA methylation; (B) allowing pollination of the maternal plants; (C) growing progeny plants from seeds produced by the one or more maternal plants, the progeny plants including sexually-generated plants and clonal plants, each clonal plant being a clone of a maternal plant; and (D) distinguishing clonal plants from sexually-generated plants, wherein the step of obtaining one or more maternal plants includes a step of transforming an ancestor of the one or more maternal plants with at least one construct including an embryo marker and/or configured to affect a characteristic of an embryo marker provided by each maternal plant, further comprising a step of transforming an ancestor of the one or more maternal plants with at least one construct to render RNA-dependent DNA methylation defective. In some instances, a same ancestor of the one or more maternal plants may be transformed to introduce the embryo marker and render RNA-dependent DNA methylation defective. In some instances, the ancestor may be transformed with a single construct including the embryo marker and configured to affect RNA-dependent DNA methylation.

[0134] Disclosed are methods of plant cloning, the method comprising: (A) obtaining one or more maternal plants, each optionally being defective for RNA-dependent DNA methylation; (B) allowing pollination of the maternal plants; (C) growing progeny plants from seeds produced by the one or more maternal plants, the progeny plants including sexually-generated plants and clonal plants, each clonal plant being a clone of a maternal plant; and (D) distinguishing clonal plants from sexually-generated plants, wherein each maternal plant includes an embryo marker introduced by breeding. The embryo marker may be an allelic variant, such as a mutant, of an endogenous gene. An embryo marker may be provided by pollen.

[0135] Disclosed are methods of plant cloning, wherein none of the maternal plants contributes pollen for the step of allowing pollination.

[0136] Disclosed are methods of plant cloning, the method comprising: (A) obtaining one or more maternal plants, each optionally being defective for RNA-dependent DNA methylation; (B) allowing pollination of the maternal plants; (C) growing progeny plants from seeds produced by the one or more maternal plants, the progeny plants including sexually-generated plants and clonal plants, each clonal plant being a clone of a maternal plant; and (D) distinguishing clonal plants from sexually-generated plants, wherein each of the maternal plants is male sterile.

[0137] In some instances, each of the maternal plants may be exposed to a gametocide that abolishes pollen formation before the step of allowing pollination, and wherein the gametocide includes at least one of maleic hydrazide (1,2-dihydropyridazine, 3-6-dione) (MH), 2,4-dichlorophenoxyacetic acid (2,4-D), a-naphthalene acetic acid (NAA), and tri-iodobenzoic acid (TIBA).

[0138] The disclosed methods of plant cloning may further comprise a step of emasculating each of the maternal plants before the step of allowing pollination.

[0139] Disclosed are methods of plant cloning, the method comprising: (A) obtaining one or more maternal plants, each optionally being defective for RNA-dependent DNA methylation; (B) allowing pollination of the maternal plants; (C) growing progeny plants from seeds produced by the one or more maternal plants, the progeny plants including sexually-generated plants and clonal plants, each clonal plant being a clone of a maternal plant; and (D) distinguishing clonal plants from sexually-generated plants, wherein each maternal plant has an abnormal level, activity, and/or structure of at least one of the following genes/gene products: any of the polynucleotides or polypeptides included in Table 1 and the sequences in the accompanying sequence listing, AGO4 (ARGONAUTE 4), AGOG (ARGONAUTE 6), AGO9 (ARGONAUTE 9), CMT3 (CHROMOMETHYLASE 3), DCL3 (DICER-LIKE 3), DRM2 (DOMAINS REARRANGED METHYLASE 2), IDN2 (INVOLVED IN DE NOVO 2), MET1 (METHYL TRANSFERASE 1), NPRD1a (NUCLEAR POLYMERASE D 1a), NPRD1b (NUCLEAR POLYMERASE D 1b), NPRD2 (NUCLEAR POLYMERASE D 2), NRPE1 (NUCLEAR RNA POLYMERASE E 1), NRPE2 (NUCLEAR RNA POLYMERASE E 2), RDR2 (RNA-DEPENDENT RNA POLYMERASE 2), RDR6 (RNA-DEPENDENT RNA POLYMERASE 6), SGS3 (SUPPRESSOR OF GENE SILENCING 3), SUVH2 (SUPPRESSOR OF VARIEGATION 3-9 HOMOLOG 2), and SUVH9 (SUPPRESSOR OF VARIEGATION 3-9 HOMOLOG 9).

[0140] Disclosed are methods of plant cloning, the method comprising: (A) obtaining one or more maternal plants, each optionally being defective for RNA-dependent DNA methylation; (B) allowing pollination of the maternal plants; (C) growing progeny plants from seeds produced by the one or more maternal plants, the progeny plants including sexually-generated plants and clonal plants, each clonal plant being a clone of a maternal plant; and (D) distinguishing clonal plants from sexually-generated plants, wherein the step of growing progeny plants includes a step of growing seedlings, and wherein the step of distinguishing is performed while the progeny plants are seedlings. In some instances, the step of distinguishing may be performed by optically distinguishing clonal plants from sexually-generated plants.

[0141] Disclosed are methods of plant cloning, the method comprising: (A) obtaining one or more maternal plants, each optionally being defective for RNA-dependent DNA methylation; (B) allowing pollination of the maternal plants; (C) growing progeny plants from seeds produced by the one or more maternal plants, the progeny plants including sexually-generated plants and clonal plants, each clonal plant being a clone of a maternal plant; and (D) distinguishing clonal plants from sexually-generated plants, wherein clonal plants are visually distinguishable from sexually-generated plants. In some instances, the step of distinguishing may include a step of performing at least one test on the progeny plants. For example, the at least one test may include a genetic test such as, but not limited to, genetic profiling.

[0142] Disclosed are methods of plant cloning, the method comprising: (A) obtaining one or more maternal plants, each optionally being defective for RNA-dependent DNA methylation; (B) allowing pollination of the maternal plants; (C) growing progeny plants from seeds produced by the one or more maternal plants, the progeny plants including sexually-generated plants and clonal plants, each clonal plant being a clone of a maternal plant; and (D) distinguishing clonal plants from sexually-generated plants, further comprising a step of sorting clonal plants from sexually-generated plants.

[0143] Methods of Screening

[0144] Disclosed are methods of screening for maternal plants that produce seeds comprising parthenogenically-derived clonal embryos comprising a) obtaining a maternal plant unable to pass on paternally-derived chromosomes to embryos, wherein an activity of a gene of interest in a RNA dependent DNA methylation pathway is silenced in the plant; b) harvesting the seeds; and c) determining whether the seeds comprise clonal embryos, wherein the presence of seeds comprising clonal embryos indicates the maternal plant may produce parthenogenically-derived clonal embryos.

[0145] Disclosed are methods of screening for maternal plants that produce seeds comprising parthenogenically-derived clonal embryos comprising a) obtaining a maternal plant unable to pass on paternally-derived chromosomes to embryos, wherein an activity of a gene of interest in a RNA dependent DNA methylation pathway is silenced in the plant; b) harvesting the seeds; and c) determining whether the seeds comprise clonal embryos, wherein the presence of seeds comprising clonal embryos indicates the maternal plant may produce parthenogenically-derived clonal embryos, wherein the activity of the gene of interest is silenced using RNA interference.

[0146] Disclosed are methods of screening for maternal plants that produce seeds comprising parthenogenically-derived clonal embryos comprising a) obtaining a maternal plant unable to pass on paternally-derived chromosomes to embryos, wherein an activity of a gene of interest in a RNA dependent DNA methylation pathway is silenced in the plant; b) harvesting the seeds; and c) determining whether the seeds comprise clonal embryos, wherein the presence of seeds comprising clonal embryos indicates the maternal plant may produce parthenogenically-derived clonal embryos, wherein the gene of interest is any of the polynucleotides included in Table 1 and the sequences in the accompanying sequence listing, AGO4, AGO6, AGO8, AGO9, CMT3, DCL3, DRM2, EXS1, IDN2, MET1, NPRD1a, NPRD1b, NPRD2, NRPE1, NRPE2, RDR2, RDR6, SGS3, SUVH2, and SUVH9.

[0147] Methods of Increasing Yield of Clonal Seeds

[0148] Disclosed are methods of increasing the yield of seeds comprising parthenogenically-derived clonal embryos comprising a) obtaining a maternal plant unable to pass on paternally-derived chromosomes to embryos, wherein an activity of a gene of interest in a RNA dependent DNA methylation pathway is silenced in the plant; b) pollinating the maternal plant; c) collecting seeds produced by the maternal plant; d) sorting the seeds comprising parthenogenically-derived clonal embryos from seeds comprising non-clonal embryos.

[0149] Sorting seeds comprising parthenogenically-derived clonal embryos from seeds comprising non-clonal embryos may be based on phenotype or genotype. Sorting based on phenotype comprises determining the size, shape, color, or a combination thereof, of the seeds. Sorting may be performed manually or automatically. Automatic sorting may comprise a machine comprising an optical detector. In some instances, sorting may be done visually

[0150] Disclosed are methods of increasing the yield of seeds comprising parthenogenically-derived clonal embryos comprising a) obtaining a maternal plant unable to pass on paternally-derived chromosomes to embryos, wherein an activity of a gene of interest in a RNA dependent DNA methylation pathway is silenced in the plant; b) pollinating the maternal plant; c) collecting seeds produced by the maternal plant; d) sorting the seeds comprising parthenogenically-derived clonal embryos from seeds comprising non-clonal embryos, wherein the RNA dependent DNA methylation pathway gene is any of the polynucleotides included in Table 1 and the sequences in the accompanying sequence listing, AGO4, AGOG, AGO8, AGO9, CMT3, DCL3, DRM2, EXS1, IDN2, MET1, NPRD1a, NPRD1b, NPRD2, NRPE1, NRPE2, RDR2, RDR6, SGS3, SUVH2, and SUVH9.

### C. Constructs

[0151] Disclosed are constructs comprising a nucleic acid sequence. The nucleic acid sequence may render the maternal plant defective for RNA-dependent DNA methylation. The nucleic acid sequence may silence activity of a RNA-dependent DNA methylation pathway gene. The nucleic acid sequence may be exogenous to plant sequences.

[0152] Disclosed are construct comprising a nucleic acid sequence that renders the maternal plant defective for RNA-dependent DNA methylation, and wherein the maternal plant produces seeds comprising parthenogenically-derived clonal embryos.

[0153] Disclosed are constructs comprising a nucleic acid sequence that renders the maternal plant defective for RNA-dependent DNA methylation, wherein the RNA dependent DNA methylation pathway gene is any of the polynucleotides included in Table 1 and sequences in the accompanying sequence listing, AGO4), AGO6, AGO8, AGO9, CMT3, DCL3, DRM2, EXS1, IDN2, MET1, NPRD1a, NPRD1b, NPRD2, NRPE1, NRPE2, RDR2, RDR6, SGS3, SUVH2, and SUVH9.

[0154] The constructs may comprise a vector backbone of any known vector used to deliver nucleic acids to plants. For example the constructs may be plasmids or nanoparticles. Methods for producing transgenic plants are well known to those skilled in the art. Transgenic plants can be produced by a variety of different transformation methods including, but not limited to, microinjection; electroporation; microprojectile bombardment, also known as particle acceleration or biolistic bombardment; viral mediated transformation or Agrobacterium-mediated transformation (see for example U.S. Pat. Nos. 5,405,765; 5,472,869; 5,538,877; 5,538,880; 5,550,318; 5,641,664; 5,736,369; Watson et al. Recombinant DNA, Scientific American Books 1992). An example of a commonly used plasmid is pBIN19 (Lee and Gelvin, 2008; Plant Physiology 146:235-332). pBIN19 carries two antibiotic resistance genes, one on the plasmid with a bacterial promoter to allow for selection of bacteria that have the plasmid. A second one is included within the T-DNA region driven by a plant promoter to allow for selection of transformed plant cells. Other examples of commonly used plasmids include pBI101 (Genebank Accession AAC53706) and pBI121 Genebank Accession AF485783), pMDC100 (TAIR Accession 1009003749), and pFGC5941 (Genebank Accession AY310901).

[0155] Plant transformation may be accomplished by several methods. DNA may be introduced in single cells and thereafter regenerated into complete plants by tissue culture. Other transformation methods may only be applied to protoplasts (cells from which the walls have been removed). Particle bombardment and the natural vector Agrobacterium tumefaciens may be used as they rely on whole plant tissues such as roots and leaves, which are easier to handle and require less of the lengthy steps that are required for plant regeneration. In some species, Agrobacterium transformation may also be used by infiltrating or dipping intact flower buds. Several techniques for direct DNA delivery may be used, such as but not limited to, uptake of DNA into isolated protoplasts mediated by chemical procedures, electroporation, and injection and the use of high-velocity particles to introduce DNA into intact tissues. Direct DNA uptake is applicable to both stable and transient gene expression studies and relies on a range of vectors, including those employed for gene cloning. Although the frequency of stable transformation may be low, direct DNA uptake is applicable to those plants not amenable to Agrobacterium transformation, particularly monocotyledons. Bacteria and plant tissues are cultured together to allow transfer of foreign DNA into plant cells then transformed plants are regenerated on selection media. Any number of different organs and tissues can serve as targets from Agrobacterium mediated transformation as described specifically for members of the Brassicaceae. These include thin cell layers (Charest, P. J., et al, 1988, Theor. Appl. Genet. 75:438-444), hypocotyls (DeBlock, M., et al, 1989, Plant Physiol. 91:694-701), leaf discs (Feldman, K. A., and Marks, M. D., 1986, Plant Sci. 47:63-69), stems (Fry J., et al, 1987, Plant Cell Repts. 6:321-325), cotyledons (Moloney M. M., et al, 1989, Plant Cell Repts. 8:238-242) and embryoids (Neuhaus, G., et al, 1987, Theor. Appl. Genet. 75:30-36), or even whole plants using in vacuum infiltration and floral dip or floral spraying transformation procedures available in Arabidopsis and Medicago at present but likely applicable to other plants in the hear future. It is understood, however, that it may be desirable in some crops to choose a different tissue or method of transformation.

[0156] Other methods that have been employed for introducing recombinant molecules into plant cells involve mechanical means such as direct DNA uptake, liposomes, electroporation (Guerche, P. et al, 1987, Plant Science 52:111-116) and micro-injection (Neuhaus, G., et al, 1987, Theor. Appl. Genet. 75:30-36). The possibility of using microprojectiles and a gun or other device to force small metal particles coated with DNA into cells has also received considerable attention (Klein, T. M. et al., 1987, Nature 327:70-73).

[0157] It is often desirable to have the DNA sequence in homozygous state which may require more than one transformation event to create a parental line, requiring transformation with a first and second recombinant DNA molecule both of which encode the same gene product. It is further contemplated in some of the embodiments of the process of the invention that a plant cell be transformed with a recombinant DNA molecule containing at least two DNA sequences or be transformed with more than one recombinant DNA molecule. The DNA sequences or recombinant DNA molecules in such embodiments may be physically linked, by being in the same vector, or physically separate on different vectors. A cell may be simultaneously transformed with more than one vector provided that each vector has a unique selection marker gene. Alternatively, a cell may be transformed with more than one vector sequentially allowing an intermediate regeneration step after transformation with the first vector. Further, it may be possible to perform a sexual cross between individual plants or plant lines containing different DNA sequences or recombinant DNA molecules preferably the DNA sequences or the recombinant molecules are linked or located on the same chromosome, and then selecting from the progeny of the cross, plants containing both DNA sequences or recombinant DNA molecules.

[0158] Expression of recombinant DNA molecules containing the DNA sequences and promoters described herein in transformed plant cells may be monitored using Northern blot techniques and/or Southern blot techniques or PCR-based methods known to those of skill in the art.

[0159] A large number of plants have been shown capable of regeneration from transformed individual cells to obtain transgenic whole plants. For example, regeneration has been shown for dicots as follows: apple, Malus pumila (James et al., Plant Cell Reports (1989) 7:658); blackberry, Rubus, Blackberry/raspberry hybrid, Rubus, red raspberry, Rubus (Graham et al., Plant Cell, Tissue and Organ Culture (1990) 20:35); carrot, Daucus carota (Thomas et al., Plant Cell Reports (1989) 8:354; Wurtele and Bulka, Plant Science (1989) 61:253); cauliflower, Brassica oleracea (Srivastava et al., Plant Cell Reports (1988) 7:504); celery, Apium graveolens (Catlin et al., Plant Cell Reports (1988) 7:100); cucumber, Cucumis sativus (Trulson et al., Theor. Appl. Genet. (1986) 73:11); eggplant, Solanum melonoena (Guri and Sink, J. Plant Physiol. (1988) 133:52) lettuce, Lactuca sativa (Michelmore et al., Plant Cell Reports (1987) 6:439); potato, Solanum tuberosum (Sheerman and Bevan, Plant Cell Reports (1988) 7:13); rape, Brassica napus (Radke et al., Theor. Appl. Genet. (1988) 75:685; Moloney et al., Plant Cell Reports (1989) 8:238); soybean (wild), Glycine canescens (Rech et al., Plant Cell Reports (1989) 8:33); strawberry, Fragaria x ananassa (Nehra et al., Plant Cell Reports (1990) 9:10; tomato, Lycopersicon esculentum (McCormick et al., Plant Cell Reports (1986) 5:81); walnut, Juglans regia (McGranahan et al., Plant Cell Reports (1990) 8:512); melon, Cucumis melo (Fang et al., 86th Annual Meeting of the American Society for Horticultural Science Hort. Science (1989) 24:89); grape, Vitis vinifera (Colby et al., Symposium on Plant Gene Transfer, UCLA Symposia on Molecular and Cellular Biology J Cell Biochem Suppl (1989) 13D:255; mango, Mangifera indica (Mathews, et al., symposium on Plant Gene Transfer, UCLA Symposia on Molecular and Cellular Biology J Cell Biochem Suppl (1989) 13D:264); and for the following monocots: rice, Oryza sativa (Shimamoto et al., Nature (1989) 338:274); rye, Secale cereale (de la Pena et al., Nature (1987) 325:274); maize, (Rhodes et al., Science (1988) 240:204).

[0160] Examples of vectors are pFGC5941 (Accession AY310901), pRS300 (Accession Addgene plasmid 22846; Schwab et al Plant Cell. 2006 May 18(5):1121-33) pHELLSGATE (Accession AJ311874), and pMDC32 (Accession FJI72534.1) listed in Table 1 as SEQ ID NOS: 106-109.

### D. Maternal Plants

[0161] Disclosed are maternal plants comprising any of the constructs described herein.

[0162] Disclosed are maternal plants comprising a construct, wherein the construct comprises a nucleic acid sequence that renders the maternal plant defective for RNA-dependent DNA methylation, and wherein the maternal plant produces seeds comprising parthenogenically-derived clonal embryos

[0163] Disclosed are maternal plants comprising a construct, wherein the construct comprises a nucleic acid sequence that renders the maternal plant defective for RNA-dependent DNA methylation, wherein the RNA dependent DNA methylation pathway gene is AGO4), AGO6, AGO8, AGO9, CMT3, DCL3, DRM2, EXS1, IDN2, MET1, NPRD1a, NPRD1b, NPRD2, NRPE1, NRPE2, RDR2, RDR6, SGS3, SUVH2, and SUVH9.

[0164] Disclosed are maternal plants comprising a construct, wherein the construct comprises an exogenous nucleic acid sequence, wherein the construct renders the maternal plant defective for RNA-dependent DNA methylation. The exogenous nucleic acid sequence may silence activity of a RNA-dependent DNA methylation pathway gene.

[0165] Disclosed are maternal plants comprising a construct, wherein the construct comprises an exogenous nucleic acid sequence, wherein the construct renders the maternal plant defective for RNA-dependent DNA methylation, wherein the maternal plant further comprises a clonal seed.

[0166] Also disclosed are maternal plants comprising a defective RNA-dependent DNA methylation pathway gene. RNA dependent DNA methylation pathway genes that may be defective may be, but are not limited to, AGO4, AGO6, AGO8, AGO9, CMT3, DCL3, DRM2, EXS1, IDN2, MET1, NPRD1a, NPRD1b, NPRD2, NRPE1, NRPE2, RDR2, RDR6, SGS3, SUVH2, and SUVH9.

[0167] Disclosed are maternal plants for production of seeds comprising clonal embryos, the maternal plant being defective for RNA-dependent DNA methylation and, when pollinated, producing seeds comprising sexually-generated embryos and seeds comprising clonal embryos that are each a clone of the maternal plant, the clonal embryos being optically distinguishable from the sexually-generated embryos.

[0168] Disclosed are maternal plants for production of clonal seeds, the maternal plant being defective for RNA-dependent DNA methylation and, when pollinated, producing seeds that form sexually-generated progeny plants and clonal progeny plants, with each clonal progeny plant being a clone of the maternal plant, the sexually-generated progeny plants being optically distinguishable from the sexually-generated progeny plants.

[0169] Disclosed are maternal plants for production of clonal seeds, the maternal plant being defective for RNA-dependent DNA methylation and unable to form viable pollen.

[0170] Disclosed are maternal plants for production of clonal seeds, the maternal plant being defective for RNA-dependent DNA methylation and treated to prevent formation of viable pollen.

### E. Seeds

[0171] Disclosed are seeds comprising a parthenogenically-derived clonal embryo comprising a defective RNA-dependent DNA methylation pathway gene.

[0172] Disclosed are seeds comprising a parthenogenically-derived clonal embryo comprising a defective RNA-dependent DNA methylation pathway gene, wherein the seed, when grown, produces seeds comprising clonal embryos. Disclosed are seeds comprising a parthenogenically-derived clonal embryo comprising a defective RNA-dependent DNA methylation pathway gene.

[0173] Disclosed are seeds comprising a parthenogenically-derived clonal embryo comprising a defective RNA-dependent DNA methylation pathway gene, wherein the RNA dependent DNA methylation pathway gene is any of the polynucleotides included in Table 1 and sequences in the accompanying sequence listing, AGO4), AGO6, AGO8, AGO9, CMT3, DCL3, DRM2, EXS1, IDN2, MET1, NPRD1a, NPRD1b, NPRD2, NRPE1, NRPE2, RDR2, RDR6, SGS3, SUVH2, and SUVH9

[0174] Provided herein are methods of increasing the number of seeds comprising parthenogenically-derived clonal embryos in a plant that is defective RdDM activity. In one aspect, the plant having defective RdDM activity is subjected to an abiotic stress. Abiotic stresses include environmental conditions that include but are not limited to low or high temperatures such as chilling, cold, freezing, heat shock, heat stress; light, including but not limited to low or high light; water deficit or drought, flooding or anoxia; chemicals and soil conditions, such as high or low levels or salt or salinity, acid, minerals, such as mineral deficiency or mineral toxicity or combinations thereof. In one aspect the plant defective in RdDM activity is grown under conditions or subjected to at least one abiotic stress. The seeds comprising parthenogenically-derived clonal embryos produced in are increased compared to the number of seeds formed in a control plant. In some examples, the formation of seeds parthenogenically-derived clonal embryos is increased by 1%, 2%, 3%, 4%, 5%, 6%, 7%, 8%, 9%, 10%, 11%, 12%, 13%, 14%, 15%, 16%, 17%, 18%, 19%, 20%, 25%, 30%, 35%, 40%, 45%, 50%, 55%, 60%, 65%, 70%, 75%, 80%, 85%, 90%, 95%, 99%, or 100% as compared to seeds produced by a control plant, for example, the control plant is disrupted in RdDM activity and not subjected to grown under conditions of or subjected to the abiotic stress.

[0175] In addition, the plant defective in RdDM activity may be male-sterile. Methods for making the plant male-sterile are known to one skilled in the art and described elsewhere herein.

[0176] In another aspect, the plant defective for activity in the RdDM pathway is not pollinated or exposed to pollination.

[0177] Alternatively or in addition to subjecting the plant defective in RdDM activity to an abiotic stress, the plant may be pollinated after anthesis to increase the number of seeds comprising parthenogenically-derived clonal embryos. The plant may be pollinated 1 or more days after anthesis, including but not limited to 1, 2, 3, 4, 5, 6, 7, 8, 9, 10, 11, 12, 13, 14, 15, 16, 17, 18, 19, 20, 21, 22, 23, 24, 25, 26, 27, 28, 29, 30 days after anthesis. The plant may be pollinated mechanically, manually, or naturally via insects or wind. In some examples, the formation of seeds parthenogenically-derived clonal embryos is increased by 1%, 2%, 3%, 4%, 5%, 6%, 7%, 8%, 9%, 10%, 11%, 12%, 13%, 14%, 15%, 16%, 17%, 18%, 19%, 20%, 25%, 30%, 35%, 40%, 45%, 50%, 55%, 60%, 65%, 70%, 75%, 80%, 85%, 90%, 95%, 99%, or 100% as compared to seeds produced by a control plant, for example, the control plant is defective for RdDM activity and pollinated prior to anthesis.

[0178] Alternatively or in addition to subjecting the plant defective in RdDM activity to an abiotic stress, the plant may be pollinated with “prickle” pollen to increase the formation of seeds comprising parthenogenically-derived clonal embryos. As used herein, the term “prickle pollen” refers to pollen from another species. In some examples, the formation of seeds comprising parthenogenically-derived clonal embryos is increased by 1%, 2%, 3%, 4%, 5%, 6%, 7%, 8%, 9%, 10%, 11%, 12%, 13%, 14%, 15%, 16%, 17%, 18%, 19%, 20%, 25%, 30%, 35%, 40%, 45%, 50%, 55%, 60%, 65%, 70%, 75%, 80%, 85%, 90%, 95%, 99%, or 100% as compared to seeds produced by a control plant, for example, the control plant is defective for RdDM activity and pollinated with pollen from the same species.

[0179] Therefore, provided herein are methods to increase the number of seeds comprising parthenogenically-derived clonal embryos by pollinating the plant defective in RdDM activity with pollen from a plant of a different order, family, genus, species, or subspecies. In some examples, the pollen is from but not limited to Zea mays L. subspecies, Teosinte, Zea diploperennus, Zea luxurians, Zea nicaraguensis, Zea perennis, subspecies Zea mays subsp mays, Zea mays subsp huehuetenangensis, Zea mays subsp mexicana, or Zea mays subsp parviglumis. In some examples, the plant defective for RdDM activity is from but not limited to Zea mays L. subspecies, Teosinte, Zea diploperennus, Zea luxurians, Zea nicaraguensis, Zea perennis, subspecies Zea mays subsp mays, Zea mays subsp huehuetenangensis, Zea mays subsp mexicana, or Zea mays subsp parviglumis. In one example, a maize, a Zea mays L. subspecies mays plant defective for RdDM activity, the Zea mays L. subspecies mays plant may be pollinated with pollen including but not limited to pollen from Teosinte, Zea diploperennus, Zea luxurians, Zea nicaraguensis, Zea perennis, subspecies Zea mays subsp mays, Zea mays subsp huehuetenangensis, Zea mays subsp mexicana, or Zea mays subsp parviglumis.

[0180] In some examples, the plant is from but not limited to soybean (Glycine max), Glycine albicans, Glycine aphyonota, Glycine arenaria, Glycine argyrea, Glycine canescens, Glycine clandestine, Glycine curvata, Glycine cyrtoloba, Glycine falcata, Glycine gracei, Glycine hirticaulis, G. hirticaulis subsp. Leptosa, Glycine lactovirens, Glycine latifolia, Glycine latrobeana, Glycine microphylla, Glycine montis-douglas, Glycine peratosa, Glycine pescadrensis, Glycine pindanica, Glycine pullenii, Glycine rubiginosa, Glycine stenophita, Glycine syndetika, Glycine tabacina, Glycine tomentella, Hayata, or Glycine soja. In some examples, the pollen is from but not limited to soybean (Glycine max), Glycine albicans, Glycine aphyonota, Glycine arenaria, Glycine argyrea, Glycine canescens, Glycine clandestine, Glycine curvata, Glycine cyrtoloba, Glycine falcata, Glycine gracei, Glycine hirticaulis, G. hirticaulis subsp. Leptosa, Glycine lactovirens, Glycine latifolia, Glycine latrobeana, Glycine microphylla, Glycine montis-douglas, Glycine peratosa, Glycine pescadrensis, Glycine pindanica, Glycine pullenii, Glycine rubiginosa, Glycine stenophita, Glycine syndetika, Glycine tabacina, Glycine tomentella, Hayata, or Glycine soja. In another example, a soybean (Glycine max) plant defective for RdDM activity may be pollinated with pollen from including but not limited to Glycine albicans, Glycine aphyonota, Glycine arenaria, Glycine argyrea, Glycine canescens, Glycine clandestine, Glycine curvata, Glycine cyrtoloba, Glycine falcata, Glycine gracei, Glycine hirticaulis, G. hirticaulis subsp. Leptosa, Glycine lactovirens, Glycine latifolia, Glycine latrobeana, Glycine microphylla, Glycine montis-douglas, Glycine peratosa, Glycine pescadrensis, Glycine pindanica, Glycine pullenii, Glycine rubiginosa, Glycine stenophita, Glycine syndetika, Glycine tabacina, Glycine tomentella, Hayata, or Glycine soja.

[0181] In one example, the pollen is from but not limited to a Sorghum bicolor plant, also known as cultivated sorghum, sorghum durra, jowari or milo, Sorghum almum, Sorghum amplum, Sorghum angustum, Sorghum arundinaceum, Sorghum bicolor subsp. Drummondii (Sudan grass) Sorghum brachypodum, Sorghum bulbosum, Sorghum burmahicum, Sorghum ecarinatum, Sorghum exstans, Sorghum grande, Johnson grass (Sorghum halepense), Sorghum interjectum, Sorghum intrans, Sorghum laxiflorum, Sorghum leiocladum, Sorghum macrospermum, Sorghum matarankense, Sorghum nitidum, Sorghum plumosum, Sorghum propinquum, Sorghum purpureosericeum, Sorghum stipoideum, Sorghum timorense, Sorghum trichocladum, Sorghum versicolor, Sorghum verticiliflorum, or Sorghum vulgare var. technicum. In one example, the plant defective for RdDM activity is from but not limited to a Sorghum bicolor plant, also known as cultivated sorghum, sorghum durra, jowari or milo, Sorghum almum, Sorghum amplum, Sorghum angustum, Sorghum arundinaceum, Sorghum bicolor subsp. Drummondii (Sudan grass) Sorghum brachypodum, Sorghum bulbosum, Sorghum burmahicum, Sorghum ecarinatum, Sorghum exstans, Sorghum grande, Johnson grass (Sorghum halepense), Sorghum interjectum, Sorghum intrans, Sorghum laxiflorum, Sorghum leiocladum, Sorghum macrospermum, Sorghum matarankense, Sorghum nitidum, Sorghum plumosum, Sorghum propinquum, Sorghum purpureosericeum, Sorghum stipoideum, Sorghum timorense, Sorghum trichocladum, Sorghum versicolor, Sorghum verticiliflorum, or Sorghum vulgare var. technicum. In one example, a Sorghum bicolor plant, also known as cultivated sorghum, sorghum durra, jowari or milo, defective for RdDM activity may be pollinated with pollen from including but not limited to Sorghum almum, Sorghum amplum, Sorghum angustum, Sorghum arundinaceum, Sorghum bicolor subsp. Drummondii (Sudan grass) Sorghum brachypodum, Sorghum bulbosum, Sorghum burmahicum, Sorghum ecarinatum, Sorghum exstans, Sorghum grande, Johnson grass (Sorghum halepense), Sorghum interjectum, Sorghum intrans, Sorghum laxiflorum, Sorghum leiocladum, Sorghum macrospermum, Sorghum matarankense, Sorghum nitidum, Sorghum plumosum, Sorghum propinquum, Sorghum purpureosericeum, Sorghum stipoideum, Sorghum timorense, Sorghum trichocladum, Sorghum versicolor, Sorghum verticiliflorum, or Sorghum vulgare var. technicum.

[0182] In one example, the pollen is from but not limited to Common wheat or Bread wheat (“T. aestivum”), Spelt (“T. spelta”) also known as “Triticum aestivum” subsp. “spelta”; Durum (“T. durum”), Emmer (“T. dicoccon”), Einkorn (“T. monococcum”), Durum, Hard Red Spring, Hard Red Winter, Soft Red Winter, Hard White, Soft White, or Red wheat. In one example, the plant defective for RdDM activity is from but not limited to Common wheat or Bread wheat (“T. aestivum”); Spelt (“T. spelta”) also known as “Triticum aestivum” subsp. “spelta”; Durum (“T. durum”), Emmer (“T. dicoccon”), Einkorn (“T. monococcum”), Durum, Hard Red Spring, Hard Red Winter, Soft Red Winter, Hard White, Soft White, or Red wheat. In another example, Common wheat or Bread wheat (“T. aestivum”) plant defective for RdDM activity may be pollinated with pollen from including but not limited to Spelt (“T. spelta”) also known as “Triticum aestivum” subsp. “spelta”, Durum (“T. durum”), Emmer (“T. dicoccon”), Einkorn (“T. monococcum”), Durum, Hard Red Spring, Hard Red Winter, Soft Red Winter, Hard White, Soft White, or Red wheat.

[0183] In one example, the prickle pollen is from but not limited to Arabidopsis thaliana, Arabidopsis arenicola, Arabidopsis arenosa, A. arenosa subsp. Arenosa, A. arenosa subsp. Borbasii, Arabidopsis cebennensis, Arabidopsis croatica, Arabidopsis halleri, A. halleri sub sp. Halleri, A. halleri subsp. Ovirensis, A. halleri subsp. Gemmifera, Arabidopsis lyrata, A. lyrata subsp. Lyrata, lyrata subsp. Petraea, A. lyrata subsp. Kamchatica, Arabidopsis neglecta, Arabidopsis pedemontana, or Arabidopsis suecica, or Boechera holboellii. In one example, the plant defective for RdDM activity is from but not limited to Arabidopsis thaliana, Arabidopsis arenicola, Arabidopsis arenosa, A. arenosa subsp. Arenosa, A. arenosa subsp. Borbasii, Arabidopsis cebennensis, Arabidopsis croatica, Arabidopsis halleri, A. halleri subsp. Halleri, A. halleri subsp. Ovirensis, A. halleri subsp. Gemmifera, Arabidopsis lyrata, A. lyrata subsp. Lyrata, lyrata subsp. Petraea, A. lyrata subsp. Kamchatica, Arabidopsis neglecta, Arabidopsis pedemontana, or Arabidopsis suecica, or Boechera holboellii. In another example, an Arabidopsis thaliana plant defective for RdDM activity may be pollinated with pollen from including but not limited to, Arabidopsis arenicola, Arabidopsis arenosa, A. arenosa subsp. Arenosa, A. arenosa subsp. Borbasii, Arabidopsis cebennensis, Arabidopsis croatica, Arabidopsis halleri, A. halleri subsp. Halleri, A. halleri subsp. Ovirensis, A. halleri subsp. Gemmifera, Arabidopsis lyrata, A. lyrata subsp. Lyrata, lyrata subsp. Petraea, A. lyrata subsp. Kamchatica, Arabidopsis neglecta, Arabidopsis pedemontana, or Arabidopsis suecica, or Boechera holboellii.

[0184] In one example, the prickle pollen is from but not limited to Oryza sativa, Oryza glaberrima, Oryza sativa, Oryza barthii, Oryza glaberrima, Oryza meridionalis, Oryza nivara, Oryza rufipogon, Oryza punctata, Oryza latifolia, Oryza alta, Oryza grandiglumis, Oryza eichingeri, Oryza officinalis, Oryza rhisomatis, Oryza minuta, Oryza australiensis, Oryza granulata, Oryza meyeriana, or Oryza brachyantha. In one example, the plant defective for RdDM activity is from but not limited to Oryza sativa, Oryza glaberrima, Oryza sativa, Oryza barthii, Oryza glaberrima, Oryza meridionalis, Oryza nivara, Oryza rufipogon, Oryza punctata, Oryza latifolia, Oryza alta, Oryza grandiglumis, Oryza eichingeri, Oryza officinalis, Oryza rhisomatis, Oryza minuta, Oryza australiensis, Oryza granulata, Oryza meyeriana, or Oryza brachyantha. In another example, an Oryza sativa plant defective for RdDM activity may be pollinated with pollen from including but not limited to, Oryza glaberrima, Oryza sativa, Oryza barthii, Oryza glaberrima, Oryza meridionalis, Oryza nivara, Oryza rufipogon, Oryza punctata, Oryza latifolia, Oryza alta, Oryza grandiglumis, Oryza eichingeri, Oryza officinalis, Oryza rhisomatis, Oryza minuta, Oryza australiensis, Oryza granulata, Oryza meyeriana, or Oryza brachyantha.

[0185] In one example, the prickle pollen is from but not limited to Brassica balearica, Brassica carinata, Brassica elongate, Brassica fruticulosa, Brassica hilarionis, Brassica juncea, Brassica napus, Brassica narinosa, Brassica nigra, Brassica oleracea, Brassica perviridis, Brassica rapa, Brassica rupestris, Brassica septiceps, or Brassica tournefortii. In one example, the plant defective for RdDM activity is from but not limited to Brassica balearica, Brassica carinata, Brassica elongate, Brassica fruticulosa, Brassica hilarionis, Brassica juncea, Brassica napus, Brassica narinosa, Brassica nigra, Brassica oleracea, Brassica perviridis, Brassica rapa, Brassica rupestris, Brassica septiceps, or Brassica tournefortii. In another example, an Brassica napus plant defective for RdDM activity may be pollinated with pollen from including but not limited to, Brassica balearica, Brassica carinata, Brassica elongate, Brassica fruticulosa, Brassica hilarionis, Brassica juncea, Brassica napus, Brassica narinosa, Brassica nigra, Brassica oleracea, Brassica perviridis, Brassica rapa, Brassica rupestris, Brassica septiceps, or Brassica tournefortii.

[0186] The plant defective for RdDM activity may be pollinated with prickle pollen 1 or more days after anthesis, including but not limited to 1, 2, 3, 4, 5, 6, 7, 8, 9, 10, 11, 12, 13, 14, 15, 16, 17, 18, 19, 20, 21, 22, 23, 24, 25, 26, 27, 28, 29, 30 days after anthesis. The plant may be pollinated mechanically, manually, or naturally via insects or wind. In some examples, the formation of seeds parthenogenically-derived clonal embryos is increased by 1%, 2%, 3%, 4%, 5%, 6%, 7%, 8%, 9%, 10%, 11%, 12%, 13%, 14%, 15%, 16%, 17%, 18%, 19%, 20%, 25%, 30%, 35%, 40%, 45%, 50%, 55%, 60%, 65%, 70%, 75%, 80%, 85%, 90%, 95%, 99%, or 100% as compared to seeds produced by a control plant, for example, the control plant is defective for RdDM activity and pollinated with pollen from the same species. In one aspect, the seeds are screened, for example, to select or sort for those seeds comprising parthenogenically-derived, clonal embryos. The seeds may be identified, selected and/or sorted using any suitable technique. In some examples, the sorting is manual, semi-automated, or automated. In some examples, the seeds are identified, selected and/or sorted based on genotype or phenotype. In some aspects, the seeds comprising parthenogenically-derived clonal embryos are identified, selected and/or sorted based on the absence of a paternal-inherited trait or marker. In some embodiments, paternally provided visual markers may be utilized to score or sort for the absence of the paternally inherited marker. Alternatively or in addition, the seeds may be genotyped using sequencing, restriction-fragment-length polymorphisms (RFLPs), amplified fragment-length polymorphisms (AFLPs), simple sequence repeats (SSRs), single feature polymorphisms (SFPs), single nucleotide polymorphisms (SNPs) and insertion/deletion polymorphisms (Indels) and/or phenotypic markers. Alternatively or in addition, the number of seeds that comprise arthenogenic, clonal embryos may be determined and ascertained for viability.

[0187] Provided herein are methods and compositions for enriching for asexual embryos and endosperm in a seed. In one aspect, the seed is from a plant defective for RdDM activity and has an element that disrupts sexual zygote function or development, thereby enriching asexual embryos. In one aspect, altered levels of expression of the element in the sexual zygote precursor cells or sexual zygote results in disruption of the sexual zygote formation or development, including but not limited to the ablation of the sexual zygote

[0188] In other embodiments, the element may encode a protein capable of causing cell ablation. As used herein, the term “cell ablation” refers to targeted damage of a specific cell. In some embodiments, cell ablation results in the death of the cell or damage to the cell such that the cell no longer divides or differentiates. Proteins capable of causing cell ablation include cytotoxins such as barnase (Yoshida, (2001) Methods Enzymol 341:28-41), Dam Methylase (see, Barras, (1989) Trends in Genetics 5:139-143), ADP ribosylase (see, Fan, (2000) Curr. Opin. Struct. Biol., 10:680-686), nucleases, or any other protein or nucleic acid capable of cell ablation. Exemplary elements include but are not limited to cytotoxic polypeptides such as Barnase (a portmanteau of “BActerial” “RiboNucleASE”), Dam Methylase, ADP ribosylase, RNases, nucleases, methylases, membrane pore forming proteins, apoptosis inducing proteins, and ADP-Ribosyltransferase toxins including but not limited to, PT toxins, C2 toxins, C. difficile transferase, iota toxin, C. spiroforme toxin, DT toxin, LT1, LT2, Tox A and CT toxin and active variants and fragments thereof that retain cytotoxic activity in the cells in which they are expressed. The element may be any DNA, RNA, protein or mutation that when expressed or repressed may disrupt sexual zygote formation or development, Approaches for repressing expression of the element include RNAi's, that target genes that are required for sexual zygote development may be employed. Approaches and techniques for to silence or suppress genes and expression cassettes are provided elsewhere herein.

[0189] In this manner, genetically modified plants, plant cells, plant tissue, seed, root and the like may be obtained. Additional methods and compositions to ablate sexual zygotes, include, for example, an zygote-lethal mutation that is crossed into the plant.

[0190] The element may be expressed using one or more cell-type-specific promoters disclosed herein. Any promoter of interest may be operably linked to the sequence encoding the element, so long as the promoter directs expression in a cell of the sexual zygote or sexual zygote precursor cell. Such promoters include, for example, a egg cell or zygote-preferred promoter, including but not limited to DD45, RKD1, or RKD2 (see, for example, patent application publication #US 2013/0180009 A1, published Jul. 11, 2013) Such egg cell or zygote-preferred promoters will not be active in the central cell or the endosperm and thereby these tissues are preserved when the egg cell or zygote-preferred promoter is operably linked to the sequence encoding the element.

[0191] In one aspect, the expression or repression of the element may be regulated chemically, for example, through chemical induction, chemical repression or chemical de-repression. The chemical may be provide by any suitable means, including but not limited to foliar application, root drench application, pre-emergence application, or post-emergence application. In another aspect, the element is regulated by a chemical, molecular or gene switch. Exemplary switches include but are not limited to a sulfonylurea-regulated gene switch. The switch may include a repressor that is operably linked to a promoter active in the sexual zygote wherein the promoter is a constitutive promoter, a tissue-preferred promoter, a developmental stage-preferred promoter, an inducible promoter, or a repressible promoter. In other examples, the expression of the element is regulated by a transactivator system, such as Ga14-UAS (upstream activation sequence).

### Inteins

[0192] Compositions and methods relating to the use of split-intein toxins to ablate embryos or sexual zygotes in plants defective for RdDM activity are provided. Proteins encoded by the heterologous polynucleotides of interest disclosed herein, e.g. barnase, may be assembled by intein-mediated trans-splicing. See, for example, Gils, (2008) Plant Biotech. Journal 6:226-235 and Kempe, (2009) Plant Biotech. Journal 7:283-297, herein incorporated by reference in their entirety. For example, expressed DAM methylase or barnase fragments may be assembled by intein-mediated trans-splicing. The intein-fused DAM methylase or barnase fragments, or polynucleotides encoding the fragments, may be located in different parental plants and may be under control of different developmentally regulated or cell type-preferred promoters. In one example, a female gamete, embryo or zygote-specific promoter is operably linked to a nucleic acid encoding a split-intein toxin where a male gamete-specific promoter is operably linked to a nucleic acid encoding the other half of the split-intein toxin (cognate split intein toxin). The split-intein is brought together upon male- and female-gamete fusion to form an active cytotoxic product as the result of intein-mediated trans-splicing. In other examples, different promoters with different yet partially overlapping expression patterns may be used to confine the split-intein toxin activity to the required tissue, for example, embryo or sexual zygote. Any promoter that expresses the split intein toxin in egg cell, zygote or embryo tissues and other cells may be used so long as the split-intein toxin is not expressed in the central cell or sperm cell. Exemplary promoters include egg-cell specific promoters, DD45, RKD1 and RKD2. In another aspect, the cognate split intein toxin may be expressed in other cells or tissues so long as it is not expressed in the egg cell. Exemplary promoters include sperm-cell specific promoters, MGH3, MSP, EBC, LBC and MPG (Borg et al. Plant Cell 2011; 23:534-5490).

[0193] Further provided are methods of selectively ablating an embryo or fertilized zygote using intein-split toxins by pollinating a first plant comprising a construct having a female gamete-specific promoter operably linked to a nucleic acid encoding a split-intein toxin with pollen that includes a male gamete-specific promoter operably linked to a nucleic acid encoding a split-intein toxin. Upon fertilization the split-intein toxins are trans-spliced into an active toxin in the embryo or fertilized zygote and subsequently ablated. In another aspect, the embryo or fertilized zygote is selectively ablated by crossing two plants that contain split-itein toxins that are trans-spliced into an active toxin in the fertilized zygote or embryo. In one aspect, one plant has a construct with a female gamete-specific promoter operably linked to a nucleic acid encoding a split-intein toxin and the other plant has a male gamete-specific promoter operably linked to a nucleic acid encoding the cognate split-intein toxin. In some examples, the plants with the female-gamete specific promoter-split intein ablation construct is male-sterile. In one aspect, the non-fertilized zygotes or embryos are viable. In some aspects, the non-fertilized zygotes or embryos are independently repressed. The intein-split toxins may be independently activated.

[0194] Disclosed are fertilization independent embryos and fertilization independent seed.

[0195] Provided herein are methods and compositions for enriching for asexual embryos and endosperm in a seed comprising parthenogenically-derived clonal embryos in an asexual female gametophyte of a plant that has defective RdDM activity. Alternatively or in addition, the plant is defective in an activity that regulates endosperm development. In one aspect, the plant's endosperm development is disrupted so that autonomous endosperm development is induced in the plant. Autonomous endosperm development may be induced by disrupting the activity of a protein or expression of a gene involved in endosperm formation. In particular embodiments, this is achieved through genetic introduction of mutations known in the literature to lead to autonomous endosperm formation in Arabidopsis (Ohad N, Margossian L, Hsu Y-c, Williams C, Repetti P, Fischer R L (1996). Mutations that cause endosperm development in the absence of fertilization belong to the FERTILIZATION-INDEPENDENT SEED (FIS) complex, showing similarities to the Polycomb repressive complex 2 (PrC2) from mammals that mediate histone methylation. The FIS complex comprises at least four subunits in Arabidopsis: the SET domain protein MEDEA (MEA; also known as FERTILIZATION-INDEPENDENT SEED 1 (FIS1)), the zinc-finger transcription factor FERTILIZATION-INDEPENDENT SEED 2 (FIS2), the WD40-repeat protein FERTILIZATION-INDEPENDENT ENDOSPERM (FIE), and the WD40-repeat protein MULTICOPY SUPPRESSOR OF IRA 1 (MSI1) (Ohad et al. 1996; Chaudhury et al. 1997; Grossniklaus et al. 1998; Kiyosue et al. 1999; Kohler et al. 2003). A mutation that allows endosperm development without fertilization. Proceedings of the National Academy of Sciences 93:5319-5324; Chaudhury A M, Ming L, Miller C, Craig S, Dennis E S, Peacock W J (1997) Fertilization-independent seed development in Arabidopsis thaliana. Proceedings of the National Academy of Sciences 94:4223-4228; Luo M, Bilodeau P, Koltunow A, Dennis E S, Peacock W J, Chaudhury A M (1999) Genes controlling fertilization-independent seed development in Arabidopsis thaliana. Proceedings of the National Academy of Sciences 96:296-301; Ohad N, Yadegari R, Margossian L, Hannon M, Michaeli D, Harada J J, Goldberg R B, Fischer R L (1999) Mutations in FIE, a WD polycomb group gene, allow endosperm development without fertilization. Plant Cell 11:407-416; Kiyosue T, Ohad N, Yadegari R, Hannon M, Dinneny J, Wells D, Katz A, Margossian L, Harada J J, Goldberg R B, Fischer R L (1999) Control of fertilization-independent endosperm development by the MEDEA polycomb gene in Arabidopsis. Proc Natl Acad Sci USA 96:4186-4191). SWINGER (SWN), is a SET-domain that partners with FIS2 that when interrupted also causes autonomous endosperm formation (Dongfang et al, PNAS 2006). Other genes that when interrupted cause autonomous endosperm development include the cell cycle regulator CYCLIN DEPENDENT KINASE A; 1, a yeast cdc2a/CDC28 homolog that allows a genetic dissection of seed development (Iwakawa et al. 2006; Nowack et al. 2006). cdka; 1 mutant pollen contains only a single haploid gamete that exclusively fertilizes the egg cell, leaving an unfertilized central cell that undergoes autonomous nuclear divisions. Mutations in MULTIPLE SUPPRESSOR OF IRA1 (MSI1) also cause the autonomous formation of endosperm (Ingouff et al., 2006); mutations in CUL4-DDB1 complex interact with MSI1 and also cause the same phenotype (Dumbliauskas E, et al. 2011. EMBO J); mutations in SIRENE (srn) affect male-female gametophyte interactions during pollen tube reception and develop autonomous endosperm (Rotman, N, et al. 2008. Mol Plant).

[0196] Exemplary genes or proteins that effect endosperm development include but are not limited to those in the Polycomb repressive complex 2 (PrC2) complex, CYCLIN DEPENDENT KINASE A, cdka, or MULTIPLE SUPPRESSOR OF IRA1 (MSI1) CUL4-DDB1, Fertilization Independent Embryo (FIE), Fertilization Independent Seed-1 (FIS1), Fertilization Independent Seed-1 (FIS2), or Fertilization Independent Seed-3 (FIS3). In some embodiments, when combined with RdDM pathway disruption, ovules with endosperm development, developing seeds, seeds comprising viable clonal embryos, total seed number, and/or viable seed number will increase. In some examples, the sexual female gametophyte of a plant defective for RdDM activity is fertilized with pollen from a plant disrupted in an activity that regulates endosperm development, Exemplary genes or proteins include but are not limited to those in the Polycomb repressive complex 2 (PrC2) complex, CYCLIN DEPENDENT KINASE A, cdka, or MULTIPLE SUPPRESSOR OF IRA1 (MSI1) CUL4-DDB1, Fertilization Independent Embryo (FIE), Fertilization Independent Seed-1 (FIS1), Fertilization Independent Seed-1 (FIS2), or Fertilization Independent Seed-3 (FIS3). Seeds obtained from this cross may be germinated and grown giving rise to adults plants that when allowed to self-pollinate produce modulated RdDM plants that are homozygous for genes or proteins disrupted in an activity that regulates endosperm development.

### F. Plant Transformation Methods

[0197] Numerous methods for introducing foreign genes into plants are known and may be used to insert a polynucleotide into a plant host, including biological and physical plant transformation protocols. See, e.g., Miki et al., “Procedure for Introducing Foreign DNA into Plants,” in Methods in Plant Molecular Biology and Biotechnology, Glick and Thompson, eds., CRC Press, Inc., Boca Raton, pp. 67-88 (1993). The methods chosen vary with the host plant and include chemical transfection methods such as calcium phosphate, microorganism-mediated gene transfer such as Agrobacterium (Horsch, et al., (1985) Science 227:1229-31), electroporation, micro-injection and biolistic bombardment.

[0198] Expression cassettes and vectors and in vitro culture methods for plant cell or tissue transformation and regeneration of plants are known and available. See, e.g., Gruber, et al., “Vectors for Plant Transformation,” in Methods in Plant Molecular Biology and Biotechnology, supra, pp. 89-119.

[0199] The isolated polynucleotides or polypeptides may be introduced into the plant by one or more techniques typically used for direct delivery into cells. Such protocols may vary depending on the type of organism, cell, plant or plant cell, i.e., monocot or dicot, targeted for gene modification. Suitable methods of transforming plant cells include microinjection (Crossway, et al., (1986) Biotechniques 4:320-334 and U.S. Pat. No. 6,300,543), electroporation (Riggs, et al., (1986) Proc. Natl. Acad. Sci. USA 83:5602-5606, direct gene transfer (Paszkowski et al., (1984) EMBO J. 3:2717-2722) and ballistic particle acceleration (see, for example, Sanford, et al., U.S. Pat. No. 4,945,050; WO 1991/10725 and McCabe, et al., (1988) Biotechnology 6:923-926). Also see, Tomes, et al., “Direct DNA Transfer into Intact Plant Cells Via Microprojectile Bombardment”. pp. 197-213 in Plant Cell, Tissue and Organ Culture, Fundamental Methods. eds. Gamborg and Phillips. Springer-Verlag Berlin Heidelberg New York, 1995; U.S. Pat. No. 5,736,369 (meristem); Weissinger, et al., (1988) Ann. Rev. Genet. 22:421-477; Sanford, et al., (1987) Particulate Science and Technology 5:27-37 (onion); Christou, et al., (1988) Plant Physiol. 87:671-674 (soybean); Datta, et al., (1990) Biotechnology 8:736-740 (rice); Klein, et al., (1988) Proc. Natl. Acad. Sci. USA 85:4305-4309 (maize); Klein, et al., (1988) Biotechnology 6:559-563 (maize); WO 1991/10725 (maize); Klein, et al., (1988) Plant Physiol. 91:440-444 (maize); Fromm, et al., (1990) Biotechnology 8:833-839 and Gordon-Kamm, et al., (1990) Plant Cell 2:603-618 (maize); Hooydaas-Van Slogteren and Hooykaas, (1984) Nature (London) 311:763-764; Bytebierm, et al., (1987) Proc. Natl. Acad. Sci. USA 84:5345-5349 (Liliaceae); De Wet, et al., (1985) In The Experimental Manipulation of Ovule Tissues, ed. G. P. Chapman, et al., pp. 197-209. Longman, NY (pollen); Kaeppler, et al., (1990) Plant Cell Reports 9:415-418 and Kaeppler, et al., (1992) Theor. Appl. Genet. 84:560-566 (whisker-mediated transformation); U.S. Pat. No. 5,693,512 (sonication); D'Halluin, et al., (1992) Plant Cell 4:1495-1505 (electroporation); Li, et al., (1993) Plant Cell Reports 12:250-255 and Christou and Ford, (1995) Annals of Botany 75:407-413 (rice); Osjoda, et al., (1996) Nature Biotech. 14:745-750; Agrobacterium mediated maize transformation (U.S. Pat. No. 5,981,840); silicon carbide whisker methods (Frame, et al., (1994) Plant J. 6:941-948); laser methods (Guo, et al., (1995) Physiologia Plantarum 93:19-24); sonication methods (Bao, et al., (1997) Ultrasound in Medicine & Biology 23:953-959; Finer and Finer, (2000) Lett Appl Microbiol. 30:406-10; Amoah, et al., (2001) J Exp Bot 52:1135-42); polyethylene glycol methods (Krens, et al., (1982) Nature 296:72-77); protoplasts of monocot and dicot cells may be transformed using electroporation (Fromm, et al., (1985) Proc. Natl. Acad. Sci. USA 82:5824-5828) and microinjection (Crossway, et al., (1986)Mol. Gen. Genet. 202:179-185), all of which are herein incorporated by reference.

### Agrobacterium-Mediated Transformation

[0200] A. tumefaciens and A. rhizogenes are plant pathogenic soil bacteria, which genetically transform plant cells. The Ti and Ri plasmids of A. tumefaciens and A. rhizogenes, respectively, carry genes responsible for genetic transformation of plants. See, e.g., Kado, (1991) Crit. Rev. Plant Sci. 10:1. Descriptions of the Agrobacterium vector systems and methods for Agrobacterium-mediated gene transfer are provided in Gruber, et al., supra; Miki, et al., supra and Moloney, et al., (1989) Plant Cell Reports 8:238.

[0201] Once constructed, plasmids may be placed into A. rhizogenes or A. tumefaciens and these vectors used to transform cells of plant species, which are ordinarily susceptible to Fusarium or Alternaria infection. Several other transgenic plants are also contemplated by the present disclosure including but not limited to soybean, corn, sorghum, alfalfa, rice, clover, cabbage, banana, coffee, celery, tobacco, cowpea, cotton, melon and pepper. The selection of either A. tumefaciens or A. rhizogenes will depend on the plant being transformed thereby. In general A. tumefaciens is the preferred organism for transformation. Most dicotyledonous plants, some gymnosperms and a few monocotyledonous plants (e.g., certain members of the Liliales and Arales) are susceptible to infection with A. tumefaciens. A. rhizogenes also has a wide host range, embracing most dicots and some gymnosperms, which includes members of the Leguminosae, Compositae, and Chenopodiaceae. Monocot plants may now be transformed with some success. EP Patent Application Number 604 662 A1 discloses a method for transforming monocots using Agrobacterium. EP Patent Application Number 672 752 A1 discloses a method for transforming monocots with Agrobacterium using the scutellum of immature embryos. Ishida, et al., discuss a method for transforming maize by exposing immature embryos to A. tumefaciens (Nature Biotechnology 14:745-50 (1996)).

[0202] Once transformed, these cells may be used to regenerate transgenic plants. For example, whole plants may be infected with these vectors by wounding the plant and then introducing the vector into the wound site. Any part of the plant may be wounded, including leaves, stems and roots. Alternatively, plant tissue, in the form of an explant, such as cotyledonary tissue or leaf disks, may be inoculated with these vectors, and cultured under conditions, which promote plant regeneration. Roots or shoots transformed by inoculation of plant tissue with A. rhizogenes or A. tumefaciens, containing the gene coding for the fumonisin degradation enzyme, may be used as a source of plant tissue to regenerate fumonisin-resistant transgenic plants, either via somatic embryogenesis or organogenesis. Examples of such methods for regenerating plant tissue are disclosed in Shahin, (1985) Theor. Appl. Genet. 69:235-40; U.S. Pat. No. 4,658,082; Simpson, et al., supra and US Patent Application Serial Numbers 913,913 and 913,914, both filed Oct. 1, 1986, as referenced in U.S. Pat. No. 5,262,306, issued Nov. 16, 1993, the entire disclosures therein incorporated herein by reference.

### Direct Gene Transfer

[0203] Several methods of plant transformation, collectively referred to as direct gene transfer, have been developed as an alternative to Agrobacterium-mediated transformation.

[0204] A generally applicable method of plant transformation is microprojectile-mediated transformation, where DNA is carried on the surface of microprojectiles measuring about 1 to 4 μm. The expression vector is introduced into plant tissues with a biolistic device that accelerates the microprojectiles to speeds of 300 to 600 m/s which is sufficient to penetrate the plant cell walls and membranes (Sanford, et al., (1987) Part. Sci. Technol. 5:27; Sanford, (1988) Trends Biotech 6:299; Sanford, (1990) Physiol. Plant 79:206 and Klein, et al., (1992) Biotechnology 10:268).

[0205] Another method for physical delivery of DNA to plants is sonication of target cells as described in Zang, et al., (1991) BioTechnology 9:996. Alternatively, liposome or spheroplast fusions have been used to introduce expression vectors into plants. See, e.g., Deshayes, et al., (1985) EMBO J. 4:2731 and Christou, et al., (1987) Proc. Natl. Acad. Sci. USA 84:3962. Direct uptake of DNA into protoplasts using CaCl₂) precipitation, polyvinyl alcohol, or poly-L-ornithine has also been reported. See, e.g., Hain, et al., (1985) Mol. Gen. Genet. 199:161 and Draper, et al., (1982) Plant Cell Physiol. 23:451.

### G. Reducing the Activity and/or Level of a Polypeptide

[0206] Methods are provided to reduce or eliminate the activity of a polypeptide, for example, a polypeptide that has RdDM activity, or a polypeptide that induces endosperm development, by transforming a plant cell with an expression cassette that expresses a polynucleotide that inhibits the expression of the polypeptide. The polynucleotide may inhibit the expression of the polypeptide directly, by preventing transcription or translation of the messenger RNA, or indirectly, by encoding a polypeptide that inhibits the transcription or translation of a gene encoding polypeptide. Methods for inhibiting or eliminating the expression of a gene in a plant are well known in the art and any such method may be used in the present disclosure to inhibit the expression of polypeptide.

[0207] In accordance with the present disclosure, the expression of polypeptide is inhibited if the protein level of the polypeptide is less than 70% of the protein level of the same polypeptide in a plant that has not been genetically modified or mutagenized to inhibit the expression of that polypeptide. In particular embodiments of the disclosure, the protein level of the polypeptide in a modified plant according to the disclosure is less than 60%, less than 50%, less than 40%, less than 30%, less than 20%, less than 10%, less than 5% or less than 2% of the protein level of the same polypeptide in a plant that is not a mutant or that has not been genetically modified to inhibit the expression of that polypeptide. The expression level of the polypeptide may be measured directly, for example, by assaying for the level of polypeptide expressed in the plant cell or plant, or indirectly, for example, by measuring the RNA-dependent DNA methylation activity of the polypeptide in the plant cell or plant or by measuring the phenotypic changes in the plant, for example, endosperm development. Methods for performing such assays are described elsewhere herein.

[0208] In other embodiments of the disclosure, the activity of the polypeptides is reduced or eliminated by transforming a plant cell with an expression cassette comprising a polynucleotide encoding a polypeptide that inhibits the activity of a polypeptide. In some examples, RdDM activity or endosperm development activity is reduced or eliminated. The RdDM activity of a polypeptide is inhibited according to the present disclosure if the activity of the polypeptide is less than 70% of the activity of the same polypeptide in a plant that has not been modified to inhibit the activity of that polypeptide. In particular embodiments of the disclosure, the activity of the polypeptide in a modified plant according to the disclosure is less than 60%, less than 50%, less than 40%, less than 30%, less than 20%, less than 10% or less than 5% of the activity of the same polypeptide in a plant that that has not been modified to inhibit the expression of that polypeptide. The activity of a polypeptide is “eliminated” according to the disclosure when it is not detectable by the assay methods described elsewhere herein. Methods of determining the alteration of RdDM activity of a polypeptide are described elsewhere herein.

[0209] In other embodiments, the activity of a polypeptide may be reduced or eliminated by disrupting the gene encoding the polypeptide. The disclosure encompasses mutagenized plants that carry mutations in genes, where the mutations reduce expression of the gene or inhibit the RdDM activity of the encoded polypeptide. Thus, many methods may be used to reduce or eliminate the activity of a polypeptide. In addition, more than one method may be used to reduce the activity of a single polypeptide.

[0210] 1. Polynucleotide-Based Methods:

[0211] In some embodiments of the present disclosure, a plant is transformed with an expression cassette that is capable of expressing a polynucleotide that inhibits the expression of a polypeptide of the disclosure. The term “expression” as used herein refers to the biosynthesis of a gene product, including the transcription and/or translation of said gene product. For example, for the purposes of the present disclosure, an expression cassette capable of expressing a polynucleotide that inhibits the expression of at least one polypeptide is an expression cassette capable of producing an RNA molecule that inhibits the transcription and/or translation of at least one polypeptide of the disclosure. The “expression” or “production” of a protein or polypeptide from a DNA molecule refers to the transcription and translation of the coding sequence to produce the protein or polypeptide, while the “expression” or “production” of a protein or polypeptide from an RNA molecule refers to the translation of the RNA coding sequence to produce the protein or polypeptide.

[0212] Examples of polynucleotides that inhibit the expression of a polypeptide are given below.

[0213] i. Sense Suppression/Cosuppression

[0214] In some embodiments of the disclosure, inhibition of the expression of a polypeptide may be obtained by sense suppression or cosuppression. For cosuppression, an expression cassette is designed to express an RNA molecule corresponding to all or part of a messenger RNA encoding a polypeptide in the “sense” orientation. Over expression of the RNA molecule may result in reduced expression of the native gene. Accordingly, multiple plant lines transformed with the cosuppression expression cassette are screened to identify those that show the desired degree of inhibition of polypeptide expression.

The polynucleotide used for cosuppression may correspond to all or part of the sequence encoding the polypeptide, all or part of the 5′ and/or 3′ untranslated region of a polypeptide transcript or all or part of both the coding sequence and the untranslated regions of a transcript encoding a polypeptide. In some embodiments where the polynucleotide comprises all or part of the coding region for the polypeptide, the expression cassette is designed to eliminate the start codon of the polynucleotide so that no protein product will be translated.

[0215] Cosuppression may be used to inhibit the expression of plant genes to produce plants having undetectable protein levels for the proteins encoded by these genes. See, for example, Broin, et al., (2002) Plant Cell 14:1417-1432. Cosuppression may also be used to inhibit the expression of multiple proteins in the same plant. See, for example, U.S. Pat. No. 5,942,657. Methods for using cosuppression to inhibit the expression of endogenous genes in plants are described in Flavell, et al., (1994) Proc. Natl. Acad. Sci. USA 91:3490-3496; Jorgensen, et al., (1996) Plant Mol. Biol. 31:957-973; Johansen and Carrington, (2001) Plant Physiol. 126:930-938; Broin, et al., (2002) Plant Cell 14:1417-1432; Stoutjesdijk, et al., (2002) Plant Physiol. 129:1723-1731; Yu, et al., (2003) Phytochemistry 63:753-763 and U.S. Pat. Nos. 5,034,323, 5,283,184 and 5,942,657, each of which is herein incorporated by reference. The efficiency of cosuppression may be increased by including a poly-dT region in the expression cassette at a position 3′ to the sense sequence and 5′ of the polyadenylation signal. See, US Patent Application Publication Number 2002/0048814, herein incorporated by reference. Typically, such a nucleotide sequence has substantial sequence identity to the sequence of the transcript of the endogenous gene, optimally greater than about 65% sequence identity, more optimally greater than about 85% sequence identity, most optimally greater than about 95% sequence identity. See U.S. Pat. Nos. 5,283,184 and 5,034,323, herein incorporated by reference.

[0216] ii. Antisense Suppression

[0217] In some embodiments of the disclosure, inhibition of the expression of the polypeptide may be obtained by antisense suppression. For antisense suppression, the expression cassette is designed to express an RNA molecule complementary to all or part of a messenger RNA encoding the polypeptide. Over expression of the antisense RNA molecule may result in reduced expression of the target gene. Accordingly, multiple plant lines transformed with the antisense suppression expression cassette are screened to identify those that show the desired degree of inhibition of polypeptide expression.

[0218] The polynucleotide for use in antisense suppression may correspond to all or part of the complement of the sequence encoding the polypeptide, all or part of the complement of the 5′ and/or 3′ untranslated region of the target transcript or all or part of the complement of both the coding sequence and the untranslated regions of a transcript encoding the polypeptide. In addition, the antisense polynucleotide may be fully complementary (i.e., 100% identical to the complement of the target sequence) or partially complementary (i.e., less than 100% identical to the complement of the target sequence) to the target sequence. Antisense suppression may be used to inhibit the expression of multiple proteins in the same plant. See, for example, U.S. Pat. No. 5,942,657. Furthermore, portions of the antisense nucleotides may be used to disrupt the expression of the target gene. Generally, sequences of at least 50 nucleotides, 100 nucleotides, 200 nucleotides, 300, 400, 450, 500, 550 or greater may be used. Methods for using antisense suppression to inhibit the expression of endogenous genes in plants are described, for example, in Liu, et al., (2002) Plant Physiol. 129:1732-1743 and U.S. Pat. Nos. 5,759,829 and 5,942,657, each of which is herein incorporated by reference. Efficiency of antisense suppression may be increased by including a poly-dT region in the expression cassette at a position 3′ to the antisense sequence and 5′ of the polyadenylation signal. See, US Patent Application Publication Number 2002/0048814, herein incorporated by reference.

[0219] iii. Double-Stranded RNA Interference

[0220] In some embodiments of the disclosure, inhibition of the expression of a polypeptide may be obtained by double-stranded RNA (dsRNA) interference. For dsRNA interference, a sense RNA molecule like that described above for cosuppression and an antisense RNA molecule that is fully or partially complementary to the sense RNA molecule are expressed in the same cell, resulting in inhibition of the expression of the corresponding endogenous messenger RNA.

[0221] Expression of the sense and antisense molecules may be accomplished by designing the expression cassette to comprise both a sense sequence and an antisense sequence. Alternatively, separate expression cassettes may be used for the sense and antisense sequences. Multiple plant lines transformed with the dsRNA interference expression cassette or expression cassettes are then screened to identify plant lines that show the desired degree of inhibition of polypeptide expression. Methods for using dsRNA interference to inhibit the expression of endogenous plant genes are described in Waterhouse, et al., (1998) Proc. Natl. Acad. Sci. USA 95:13959-13964, Liu, et al., (2002) Plant Physiol. 129:1732-1743 and WO 1999/49029, WO 1999/53050, WO 1999/61631 and WO 2000/49035, each of which is herein incorporated by reference.

[0222] iv. Hairpin RNA Interference and Intron-Containing Hairpin RNA Interference

[0223] In some embodiments of the disclosure, inhibition of the expression of a polypeptide may be obtained by hairpin RNA (hpRNA) interference or intron-containing hairpin RNA (ihpRNA) interference. These methods are highly efficient at inhibiting the expression of endogenous genes. See, Waterhouse and Helliwell, (2003) Nat. Rev. Genet. 4:29-38 and the references cited therein.

[0224] For hpRNA interference, the expression cassette is designed to express an RNA molecule that hybridizes with itself to form a hairpin structure that comprises a single-stranded loop region and a base-paired stem. The base-paired stem region comprises a sense sequence corresponding to all or part of the endogenous messenger RNA encoding the gene whose expression is to be inhibited, and an antisense sequence that is fully or partially complementary to the sense sequence. Alternatively, the base-paired stem region may correspond to a portion of a promoter sequence controlling expression of the gene whose expression is to be inhibited. Thus, the base-paired stem region of the molecule generally determines the specificity of the RNA interference. hpRNA molecules are highly efficient at inhibiting the expression of endogenous genes and the RNA interference they induce is inherited by subsequent generations of plants. See, for example, Chuang and Meyerowitz, (2000) Proc. Natl. Acad. Sci. USA 97:4985-4990; Stoutjesdijk, et al., (2002) Plant Physiol. 129:1723-1731 and Waterhouse and Helliwell, (2003) Nat. Rev. Genet. 4:29-38. Methods for using hpRNA interference to inhibit or silence the expression of genes are described, for example, in Chuang and Meyerowitz, (2000) Proc. Natl. Acad. Sci. USA 97:4985-4990; Stoutjesdijk, et al., (2002) Plant Physiol. 129:1723-1731; Waterhouse and Helliwell, (2003) Nat. Rev. Genet. 4:29-38; Pandolfini et al., BMC Biotechnology 3:7 and US Patent Application Publication Number 2003/0175965, each of which is herein incorporated by reference. A transient assay for the efficiency of hpRNA constructs to silence gene expression in vivo has been described by Panstruga, et al., (2003) Mol. Biol. Rep. 30:135-140, herein incorporated by reference.

[0225] For ihpRNA, the interfering molecules have the same general structure as for hpRNA, but the RNA molecule additionally comprises an intron that is capable of being spliced in the cell in which the ihpRNA is expressed. The use of an intron minimizes the size of the loop in the hairpin RNA molecule following splicing, and this increases the efficiency of interference. See, for example, Smith, et al., (2000) Nature 407:319-320. In fact, Smith, et al., show 100% suppression of endogenous gene expression using ihpRNA-mediated interference. Methods for using ihpRNA interference to inhibit the expression of endogenous plant genes are described, for example, in Smith, et al., (2000) Nature 407:319-320; Wesley, et al., (2001) Plant J. 27:581-590; Wang and Waterhouse, (2001) Curr. Opin. Plant Biol. 5:146-150; Waterhouse and Helliwell, (2003) Nat. Rev. Genet. 4:29-38; Helliwell and Waterhouse, (2003) Methods 30:289-295 and US Patent Application Publication Number 2003/0180945, each of which is herein incorporated by reference.

[0226] The expression cassette for hpRNA interference may also be designed such that the sense sequence and the antisense sequence do not correspond to an endogenous RNA. In this embodiment, the sense and antisense sequence flank a loop sequence that comprises a nucleotide sequence corresponding to all or part of the endogenous messenger RNA of the target gene. Thus, it is the loop region that determines the specificity of the RNA interference. See, for example, WO 2002/00904; Mette, et al., (2000) EMBO J 19:5194-5201; Matzke, et al., (2001) Curr. Opin. Genet. Devel. 11:221-227; Scheid, et al., (2002) Proc. Natl. Acad. Sci., USA 99:13659-13662; Aufsaftz, et al., (2002) Proc. Nat'l. Acad. Sci. 99(4):16499-16506; Sijen, et al., Curr. Biol. (2001) 11:436-440), herein incorporated by reference.

[0227] v. Amplicon Mediated Interference

[0228] Amplicon expression cassettes comprise a plant virus-derived sequence that contains all or part of the target gene but generally not all of the genes of the native virus. The viral sequences present in the transcription product of the expression cassette allow the transcription product to direct its own replication. The transcripts produced by the amplicon may be either sense or antisense relative to the target sequence (i.e., the messenger RNA for the polypeptide). Methods of using amplicons to inhibit the expression of endogenous plant genes are described, for example, in Angell and Baulcombe, (1997) EMBO J. 16:3675-3684, Angell and Baulcombe, (1999) Plant J. 20:357-362 and U.S. Pat. No. 6,646,805, each of which is herein incorporated by reference.

[0229] vi. Ribozymes

[0230] In some embodiments, the polynucleotide expressed by the expression cassette of the disclosure is catalytic RNA or has ribozyme activity specific for the messenger RNA of the polypeptide. Thus, the polynucleotide causes the degradation of the endogenous messenger RNA, resulting in reduced expression of the polypeptide. This method is described, for example, in U.S. Pat. No. 4,987,071, herein incorporated by reference.

[0231] vii. Small Interfering RNA or Micro RNA

[0232] In some embodiments of the disclosure, inhibition of the expression of a polypeptide may be obtained by RNA interference by expression of a gene encoding a micro RNA (miRNA). miRNAs are regulatory agents consisting of about 22 ribonucleotides. miRNA are highly efficient at inhibiting the expression of endogenous genes. See, for example Javier, et al., (2003) Nature 425:257-263, herein incorporated by reference.

[0233] For miRNA interference, the expression cassette is designed to express an RNA molecule that is modeled on an endogenous miRNA gene. For example, the miRNA gene encodes an RNA that forms a hairpin structure containing a 22-nucleotide sequence that is complementary to another endogenous gene (target sequence). For suppressing the expression of a gene in the RNA-dependent DNA methylation pathway, the 22-nucleotide sequence is selected from a transcript sequence from a gene in the RdDM pathway and contains 22 nucleotides of said gene in the RNA-dependent DNA methylation pathway sequence in sense orientation and 21 nucleotides of a corresponding antisense sequence that is complementary to the sense sequence. In some cases, the expression of a gene in the R in endosperm development activity is suppressed. A fertility gene, whether endogenous or exogenous, may be an miRNA target. miRNA molecules are highly efficient at inhibiting the expression of endogenous genes, and the RNA interference they induce is inherited by subsequent generations of plants.

[0234] 2. Polypeptide-Based Inhibition of Gene Expression

[0235] In one embodiment, the polynucleotide encodes a zinc finger protein that binds to a gene encoding a polypeptide, resulting in reduced expression of the gene. In particular embodiments, the zinc finger protein binds to a regulatory region of a gene in the RdDM pathway. In other embodiments, the zinc finger protein binds to a messenger RNA encoding a polypeptide and prevents its translation. Methods of selecting sites for targeting by zinc finger proteins have been described, for example, in U.S. Pat. No. 6,453,242, and methods for using zinc finger proteins to inhibit the expression of genes in plants are described, for example, in US Patent Application Publication Number 2003/0037355, each of which is herein incorporated by reference.

[0236] 3. Polypeptide-Based Inhibition of Protein Activity

[0237] In some embodiments of the disclosure, the polynucleotide encodes an antibody that binds to at least one polypeptide and reduces the RdDM activity of the polypeptide. In another embodiment, the binding of the antibody results in increased turnover of the antibody-RdDM complex by cellular quality control mechanisms. The expression of antibodies in plant cells and the inhibition of molecular pathways by expression and binding of antibodies to proteins in plant cells are well known in the art. See, for example, Conrad and Sonnewald, (2003) Nature Biotech. 21:35-36, incorporated herein by reference.

[0238] 4. Gene Disruption

[0239] In some embodiments of the present disclosure, the activity of a polypeptide is reduced or eliminated by disrupting the gene encoding the polypeptide. The gene encoding the polypeptide may be disrupted by any method known in the art. For example, in one embodiment, the gene is disrupted by transposon tagging. In another embodiment, the gene is disrupted by mutagenizing plants using random or targeted mutagenesis and selecting for plants that have reduced RdDM activity.

[0240] i. Transposon Tagging

[0241] In one embodiment of the disclosure, transposon tagging is used to reduce or eliminate the activity of one or more polypeptide. Transposon tagging comprises inserting a transposon within an endogenous gene in the RdDM pathway to reduce or eliminate expression of the polypeptide. “RdDM gene” is intended to mean the gene in the RdDM pathway that encodes a polypeptide according to the disclosure.

[0242] In this embodiment, the expression of one or more polypeptide is reduced or eliminated by inserting a transposon within a regulatory region or coding region of the gene encoding the polypeptide. A transposon that is within an exon, intron, 5′ or 3′ untranslated sequence, a promoter or any other regulatory sequence of a RdDM gene may be used to reduce or eliminate the expression and/or activity of the encoded polypeptide.

[0243] Methods for the transposon tagging of specific genes in plants are well known in the art. See, for example, Maes, et al., (1999) Trends Plant Sci. 4:90-96; Dharmapuri and Sonti, (1999) FEMS Microbiol. Lett. 179:53-59; Meissner, et al., (2000) Plant 22:265-274; Phogat, et al., (2000) J. Biosci. 25:57-63; Walbot, (2000) Curr. Opin. Plant Biol. 2:103-107; Gai, et al., (2000) Nucleic Acids Res. 28:94-96; Fitzmaurice, et al., (1999) Genetics 153:1919-1928). In addition, the TUSC process for selecting Mu insertions in selected genes has been described in Bensen, et al., (1995) Plant Cell 7:75-84; Mena, et al., (1996) Science 274:1537-1540 and U.S. Pat. No. 5,962,764, each of which is herein incorporated by reference.

[0244] ii. Mutant Plants with Reduced Activity

[0245] Additional methods for decreasing or eliminating the expression of endogenous genes in plants are also known in the art and may be similarly applied to the instant disclosure. These methods include other forms of mutagenesis, such as ethyl methanesulfonate-induced mutagenesis, deletion mutagenesis and fast neutron deletion mutagenesis used in a reverse genetics sense (with PCR) to identify plant lines in which the endogenous gene has been deleted. For examples of these methods see, Ohshima, et al., (1998) Virology 243:472-481; Okubara, et al., (1994) Genetics 137:867-874 and Quesada, et al., (2000) Genetics 154:421-436, each of which is herein incorporated by reference. In addition, a fast and automatable method for screening for chemically induced mutations, TILLING (Targeting Induced Local Lesions In Genomes), using denaturing HPLC or selective endonuclease digestion of selected PCR products is also applicable to the instant disclosure. See, McCallum, et al., (2000) Nat. Biotechnol. 18:455-457, herein incorporated by reference.

[0246] Mutations may impact gene expression or that interfere with RdDM activity of an encoded protein. Insertional mutations in gene exons usually result in null-mutants. Mutations in conserved residues are particularly effective in inhibiting the activity of the encoded protein. Conserved residues of plant polypeptides suitable for mutagenesis with the goal to eliminate activity have been described. Such mutants may be isolated according to well-known procedures and mutations in different RdDM loci may be stacked by genetic crossing. See, for example, Gruis, et al., (2002) Plant Cell 14:2863-2882.

[0247] In another embodiment of this disclosure, dominant mutants may be used to trigger RNA silencing due to gene inversion and recombination of a duplicated gene locus. See, for example, Kusaba, et al., (2003) Plant Cell 15:1455-1467.

[0248] The disclosure encompasses additional methods for reducing or eliminating the activity of one or more polypeptide. Examples of other methods for altering or mutating a genomic nucleotide sequence in a plant are known in the art and include, but are not limited to, the use of RNA:DNA vectors, RNA:DNA mutational vectors, RNA:DNA repair vectors, mixed-duplex oligonucleotides, self-complementary RNA:DNA oligonucleotides and recombinogenic oligonucleobases. Such vectors and methods of use are known in the art. See, for example, U.S. Pat. Nos. 5,565,350; 5,731,181; 5,756,325; 5,760,012; 5,795,972 and 5,871,984, each of which are herein incorporated by reference. See also, WO 1998/49350, WO 1999/07865, WO 1999/25821 and Beetham, et al., (1999) Proc. Natl. Acad. Sci. USA 96:8774-8778, each of which is herein incorporated by reference.

### H. Genome Editing and Induced Mutagenesis

[0249] In general, methods to modify or alter the host endogenous genomic DNA are available. This includes altering the host native DNA sequence or a pre-existing transgenic sequence including regulatory elements, coding and non-coding sequences. These methods are also useful in targeting nucleic acids to pre-engineered target recognition sequences in the genome. As an example, the genetically modified cell or plant described herein, is generated using “custom” meganucleases produced to modify plant genomes (see, e.g., WO 2009/114321; Gao, et al., (2010) Plant Journal 1:176-187). Another site-directed engineering is through the use of zinc finger domain recognition coupled with the restriction properties of restriction enzyme. See, e.g., Urnov, et al., (2010) Nat Rev Genet. 11(9):636-46; Shukla, et al., (2009) Nature 459(7245):437-41.

[0250] Also provided herein are methods for making the plant where elements or mutations are introduced into the plant genome by use of CRISPR technology. CRISPR loci (Clustered Regularly Interspaced Short Palindromic Repeats) (also known as SPIDRs-SPacer Interspersed Direct Repeats) constitute a family of recently described DNA loci. CRISPR loci consist of short and highly conserved DNA repeats (typically 24 to 40 bp, repeated from 1 to 140 times—also referred to as CRISPR-repeats) which are partially palindromic. The repeated sequences (usually specific to a species) are interspaced by variable sequences of constant length (typically 20 to 58 by depending on the CRISPR locus (WO2007/025097 published Mar. 1, 2007).

[0251] CRISPR loci were first recognized in E. coli (Ishino et al. (1987) J. Bacterial. 169:5429-5433; Nakata et al. (1989) J. Bacterial. 171:3553-3556). Similar interspersed short sequence repeats have been identified in Haloferax mediterranei, Streptococcus pyogenes, Anabaena, and Mycobacterium tuberculosis (Groenen et al. (1993) Mol. Microbiol. 10:1057-1065; Hoe et al. (1999) Emerg. Infect. Dis. 5:254-263; Masepohl et al. (1996) Biochim. Biophys. Acta 1307:26-30; Mojica et al. (1995) Mol. Microbiol. 17:85-93). The CRISPR loci differ from other SSRs by the structure of the repeats, which have been termed short regularly spaced repeats (SRSRs) (Janssen et al. (2002) OMICS J. Integ. Biol. 6:23-33; Mojica et al. (2000) Mol. Microbiol. 36:244-246). The repeats are short elements that occur in clusters, that are always regularly spaced by variable sequences of constant length (Mojica et al. (2000) Mol. Microbiol. 36:244-246).

[0252] Cas gene relates to a gene that is generally coupled, associated or close to or in the vicinity of flanking CRISPR loci. The terms “Cas gene”, “CRISPR-associated (Cas) gene” are used interchangeably herein. A comprehensive review of the Cas protein family is presented in Haft et al. (2005) Computational Biology, PLoS Comput Biol 1(6): e60. doi:10.1371/journal.pcbi.0010060. As described therein, 41 CRISPR-associated (Cas) gene families are described, in addition to the four previously known gene families. It shows that CRISPR systems belong to different classes, with different repeat patterns, sets of genes, and species ranges. The number of Cas genes at a given CRISPR locus may vary between species.

[0253] Cas endonuclease relates to a Cas protein encoded by a Cas gene, wherein said Cas protein is capable of introducing a double strand break into a DNA target sequence. The Cas endonuclease is guided by a guide polynucleotide to recognize and optionally introduce a double strand break at a specific target site into the genome of a cell (U.S. Provisional Application No. 62/023,239, filed Jul. 11, 2014). The guide polynucleotide/Cas endonuclease system includes a complex of a Cas endonuclease and a guide polynucleotide that is capable of introducing a double strand break into a DNA target sequence. The Cas endonuclease unwinds the DNA duplex in close proximity of the genomic target site and cleaves both DNA strands upon recognition of a target sequence by a guide RNA if a correct protospacer-adjacent motif (PAM) is approximately oriented at the 3′ end of the target sequence.

[0254] The Cas endonuclease gene may be Cas9 endonuclease, or a functional fragment thereof, such as but not limited to, Cas9 genes listed in SEQ ID NOs: 462, 474, 489, 494, 499, 505, and 518 of WO2007/025097 published Mar. 1, 2007. The Cas endonuclease gene may be a plant, maize or soybean optimized Cas9 endonuclease, such as but not limited to a plant codon optimized Streptococcus pyogenes Cas9 gene that may recognize any genomic sequence of the form N(12-30)NGG. The Cas endonuclease may be introduced directly into a cell by any method known in the art, for example, but not limited to transient introduction methods, transfection and/or topical application.

[0255] As used herein, the term “guide RNA” relates to a synthetic fusion of two RNA molecules, a crRNA (CRISPR RNA) comprising a variable targeting domain, and a tracrRNA. In one embodiment, the guide RNA comprises a variable targeting domain of 12 to 30 nucleotide sequences and a RNA fragment that may interact with a Cas endonuclease.

[0256] As used herein, the term “guide polynucleotide”, relates to a polynucleotide sequence that may form a complex with a Cas endonuclease and enables the Cas endonuclease to recognize and optionally cleave a DNA target site (U.S. Provisional Application No. 62/023,239, filed Jul. 11, 2014). The guide polynucleotide may be a single molecule or a double molecule. The guide polynucleotide sequence may be a RNA sequence, a DNA sequence, or a combination thereof (a RNA-DNA combination sequence). Optionally, the guide polynucleotide may comprise at least one nucleotide, phosphodiester bond or linkage modification such as, but not limited, to Locked Nucleic Acid (LNA), 5-methyl dC, 2,6-Diaminopurine, 2′-Fluoro A, 2′-Fluoro U, 2′-O-Methyl RNA, phosphorothioate bond, linkage to a cholesterol molecule, linkage to a polyethylene glycol molecule, linkage to a spacer 18 (hexaethylene glycol chain) molecule, or 5′ to 3′ covalent linkage resulting in circularization. A guide polynucleotride that solely comprises ribonucleic acids is also referred to as a “guide RNA”.

[0257] The guide polynucleotide may be a double molecule (also referred to as duplex guide polynucleotide) comprising a first nucleotide sequence domain (referred to as Variable Targeting domain or VT domain) that is complementary to a nucleotide sequence in a target DNA and a second nucleotide sequence domain (referred to as Cas endonuclease recognition domain or CER domain) that interacts with a Cas endonuclease polypeptide. The CER domain of the double molecule guide polynucleotide comprises two separate molecules that are hybridized along a region of complementarity. The two separate molecules may be RNA, DNA, and/or RNA-DNA-combination sequences. In some embodiments, the first molecule of the duplex guide polynucleotide comprising a VT domain linked to a CER domain is referred to as “crDNA” (when composed of a contiguous stretch of DNA nucleotides) or “crRNA” (when composed of a contiguous stretch of RNA nucleotides), or “crDNA-RNA” (when composed of a combination of DNA and RNA nucleotides). The crNucleotide may comprise a fragment of the cRNA naturally occurring in Bacteria and Archaea. In one embodiment, the size of the fragment of the cRNA naturally occurring in Bacteria and Archaea that is present in a crNucleotide disclosed herein may range from, but is not limited to, 2, 3, 4, 5, 6, 7, 8, 9, 10, 11, 12, 13, 14, 15, 16, 17, 18, 19, 20 or more nucleotides. In some embodiments the second molecule of the duplex guide polynucleotide comprising a CER domain is referred to as “tracrRNA” (when composed of a contiguous stretch of RNA nucleotides) or “tracrDNA” (when composed of a contiguous stretch of DNA nucleotides) or “tracrDNA-RNA” (when composed of a combination of DNA and RNA nucleotides In one embodiment, the RNA that guides the RNA/Cas9 endonuclease complex, is a duplexed RNA comprising a duplex crRNA-tracrRNA.

[0258] The guide polynucleotide may also be a single molecule comprising a first nucleotide sequence domain (referred to as Variable Targeting domain or VT domain) that is complementary to a nucleotide sequence in a target DNA and a second nucleotide domain (referred to as Cas endonuclease recognition domain or CER domain) that interacts with a Cas endonuclease polypeptide. By “domain” it is meant a contiguous stretch of nucleotides that may be RNA, DNA, and/or RNA-DNA-combination sequence. The VT domain and/or the CER domain of a single guide polynucleotide may comprise a RNA sequence, a DNA sequence, or a RNA-DNA-combination sequence. In some embodiments the single guide polynucleotide comprises a crNucleotide (comprising a VT domain linked to a CER domain) linked to a tracrNucleotide (comprising a CER domain), wherein the linkage is a nucleotide sequence comprising a RNA sequence, a DNA sequence, or a RNA-DNA combination sequence. The single guide polynucleotide being comprised of sequences from the crNucleotide and tracrNucleotide may be referred to as “single guide RNA” (when composed of a contiguous stretch of RNA nucleotides) or “single guide DNA” (when composed of a contiguous stretch of DNA nucleotides) or “single guide RNA-DNA” (when composed of a combination of RNA and DNA nucleotides). In one embodiment of the disclosure, the single guide RNA comprises a cRNA or cRNA fragment and a tracrRNA or tracrRNA fragment of the type II CRISPR/Cas system that may form a complex with a type II Cas endonuclease, wherein said guide RNA/Cas endonuclease complex may direct the Cas endonuclease to a plant genomic target site, enabling the Cas endonuclease to introduce a double strand break into the genomic target site. One aspect of using a single guide polynucleotide versus a duplex guide polynucleotide is that only one expression cassette needs to be made to express the single guide polynucleotide.

[0259] The term “variable targeting domain” or “VT domain” is used interchangeably herein and includes a nucleotide sequence that is complementary to one strand (nucleotide sequence) of a double strand DNA target site. The % complementation between the first nucleotide sequence domain (VT domain) and the target sequence may be at least 50%, 51%, 52%, 53%, 54%, 55%, 56%, 57%, 58%, 59%, 60%, 61%, 62%, 63%, 63%, 65%, 66%, 67%, 68%, 69%, 70%, 71%, 72%, 73%, 74%, 75%, 76%, 77%, 78%, 79%, 80%, 81%, 82%, 83%, 84%, 85%, 86%, 87%, 88%, 89%, 90%, 91%, 92%, 93%, 94%, 95%, 96%, 97%, 98%, 99% or 100%. The variable target domain may be at least 12, 13, 14, 15, 16, 17, 18, 19, 20, 21, 22, 23, 24, 25, 26, 27, 28, 29 or 30 nucleotides in length. In some embodiments, the variable targeting domain comprises a contiguous stretch of 12 to 30 nucleotides. The variable targeting domain may be composed of a DNA sequence, a RNA sequence, a modified DNA sequence, a modified RNA sequence, or any combination thereof.

[0260] The term “Cas endonuclease recognition domain” or “CER domain” of a guide polynucleotide is used interchangeably herein and includes a nucleotide sequence (such as a second nucleotide sequence domain of a guide polynucleotide), that interacts with a Cas endonuclease polypeptide. The CER domain may be composed of a DNA sequence, a RNA sequence, a modified DNA sequence, a modified RNA sequence (see for example modifications described herein), or any combination thereof.

[0261] The nucleotide sequence linking the crNucleotide and the tracrNucleotide of a single guide polynucleotide may comprise a RNA sequence, a DNA sequence, or a RNA-DNA combination sequence. In one embodiment, the nucleotide sequence linking the crNucleotide and the tracrNucleotide of a single guide polynucleotide may be at least 3, 4, 5, 6, 7, 8, 9, 10, 11, 12, 13, 14, 15, 16, 17, 18, 19, 20, 21, 22, 23, 24, 25, 26, 27, 28, 29, 30, 31, 32, 33, 34, 35, 36, 37, 38, 39, 40, 41, 42, 43, 44, 45, 46, 47, 48, 49, 50, 51, 52, 53, 54, 55, 56, 57, 58, 59, 60, 61, 62, 63, 64, 65, 66, 67, 68, 69, 70, 71, 72, 73, 74, 75, 76, 77, 78, 78, 79, 80, 81, 82, 83, 84, 85, 86, 87, 88, 89, 90, 91, 92, 93, 94, 95, 96, 97, 98, 99 or 100 nucleotides in length. In another embodiment, the nucleotide sequence linking the crNucleotide and the tracrNucleotide of a single guide polynucleotide may comprise a tetraloop sequence, such as, but not limiting to a GAAA tetraloop sequence.

[0262] Nucleotide sequence modification of the guide polynucleotide, VT domain and/or CER domain may be selected from, but not limited to, the group consisting of a 5′ cap, a 3′ polyadenylated tail, a riboswitch sequence, a stability control sequence, a sequence that forms a dsRNA duplex, a modification or sequence that targets the guide poly nucleotide to a subcellular location, a modification or sequence that provides for tracking, a modification or sequence that provides a binding site for proteins, a Locked Nucleic Acid (LNA), a 5-methyl dC nucleotide, a 2,6-Diaminopurine nucleotide, a 2′-Fluoro A nucleotide, a 2′-Fluoro U nucleotide; a 2′-O-Methyl RNA nucleotide, a phosphorothioate bond, linkage to a cholesterol molecule, linkage to a polyethylene glycol molecule, linkage to a spacer 18 molecule, a 5′ to 3′ covalent linkage, or any combination thereof. These modifications may result in at least one additional beneficial feature, wherein the additional beneficial feature is selected from the group of a modified or regulated stability, a subcellular targeting, tracking, a fluorescent label, a binding site for a protein or protein complex, modified binding affinity to complementary target sequence, modified resistance to cellular degradation, and increased cellular permeability.

[0263] “TILLING” or “Targeting Induced Local Lesions IN Genomics” refers to a mutagenesis technology useful to generate and/or identify and to eventually isolate mutagenized variants of a particular nucleic acid with modulated expression and/or activity (McCallum, et al., (2000), Plant Physiology 123:439-442; McCallum, et al., (2000) Nature Biotechnology 18:455-457 and Colbert, et al., (2001) Plant Physiology 126:480-484). Methods for TILLING are well known in the art (U.S. Pat. No. 8,071,840).

[0264] Other mutagenic methods may also be employed to introduce mutations in the RdDM and/or autonomous endosperm formation genes. Methods for introducing genetic mutations into plant genes and selecting plants with desired traits are well known. For instance, seeds or other plant material may be treated with a mutagenic chemical substance, according to standard techniques. Such chemical substances include, but are not limited to, the following: diethyl sulfate, ethylene imine, and N-nitroso-N-ethylurea. Alternatively, ionizing radiation from sources such as X-rays or gamma rays may be used.

### I. Regulatory Elements

[0265] Exemplary constitutive promoters include the 35S cauliflower mosaic virus (CaMV) promoter (Odell, et al., (1985) Nature 313:810-812), the maize ubiquitin promoter (Christensen, et al., (1989) Plant Mol. Biol. 12:619-632 and Christensen, et al., (1992) Plant Mol. Biol. 18:675-689); the core promoter of the Rsyn7 promoter and other constitutive promoters disclosed in WO 1999/43838 and U.S. Pat. No. 6,072,050; rice actin (McElroy, et al., (1990) Plant Cell 2:163-171); pEMU (Last, et al., (1991) Theor. Appl. Genet. 81:581-588); MAS (Velten, et al., (1984) EMBO J. 3:2723-2730); ALS promoter (U.S. Pat. No. 5,659,026); rice actin promoter (U.S. Pat. No. 5,641,876; WO 2000/70067), maize histone promoter (Brignon, et al., (1993) Plant Mol Bio 22(6):1007-1015; Rasco-Gaunt, et al., (2003) Plant Cell Rep. 21(6):569-576) and the like. Other constitutive promoters include, for example, those described in U.S. Pat. Nos. 5,608,144 and 6,177,611 and PCT Publication Number WO 2003/102198.

[0266] Tissue-specific, tissue-preferred or stage-specific regulatory elements further include, for example, the AGL8/FRUITFULL regulatory element, which is activated upon floral induction (Hempel, et al., (1997) Development 124:3845-3853); root-specific regulatory elements such as the regulatory elements from the RCP1 gene and the LRP1 gene (Tsugeki and Fedoroff, (1999) Proc. Natl. Acad., USA 96:12941-12946; Smith and Fedoroff, (1995) Plant Cell 7:735-745); flower-specific regulatory elements such as the regulatory elements from the LEAFY gene and the APETALA1 gene (Blazquez, et al., (1997) Development 124:3835-3844; Hempel, et al., supra, 1997); seed-specific regulatory elements such as the regulatory element from the oleosin gene (Plant, et al., (1994) Plant Mol. Biol. 25:193-205) and dehiscence zone specific regulatory element. Additional tissue-specific or stage-specific regulatory elements include the Zn13 promoter, which is a pollen-specific promoter (Hamilton, et al., (1992) Plant Mol. Biol. 18:211-218); the UNUSUAL FLORAL ORGANS (UFO) promoter, which is active in apical shoot meristem; the promoter active in shoot meristems (Atanassova, et al., (1992) Plant J. 2:291), the cdc2 promoter and cyc07 promoter (see, for example, Ito, et al., (1994) Plant Mol. Biol. 24:863-878; Martinez, et al., (1992) Proc. Natl. Acad. Sci., USA 89:7360); the meristematic-preferred meri-5 and H3 promoters (Medford, et al., (1991) Plant Cell 3:359; Terada, et al., (1993) Plant J. 3:241); meristematic and phloem-preferred promoters of Myb-related genes in barley (Wissenbach, et al., (1993) Plant J. 4:411); Arabidopsis cyc3aAt and cyc1At (Shaul, et al., (1996) Proc. Natl. Acad. Sci. 93:4868-4872); C. roseus cyclins CYS and CYM (Ito, et al., (1997) Plant J. 11:983-992); and Nicotiana CyclinB1 (Trehin, et al., (1997) Plant Mol. Biol. 35:667-672); the promoter of the APETALA3 gene, which is active in floral meristems (Jack, et al., (1994) Cell 76:703; Hempel, et al., supra, 1997); a promoter of an agamous-like (AGL) family member, for example, AGL8, which is active in shoot meristem upon the transition to flowering (Hempel, et al., supra, 1997); floral abscission zone promoters; L1-specific promoters; the ripening-enhanced tomato polygalacturonase promoter (Nicholass, et al., (1995) Plant Mol. Biol. 28:423-435), the E8 promoter (Deikman, et al., (1992) Plant Physiol. 100:2013-2017) and the fruit-specific 2A1 promoter, U2 and U5 snRNA promoters from maize, the Z4 promoter from a gene encoding the Z4 22 kD zein protein, the Z10 promoter from a gene encoding a 10 kD zein protein, a Z27 promoter from a gene encoding a 27 kD zein protein, the A20 promoter from the gene encoding a 19 kD zein protein, and the like. Additional tissue-specific promoters may be isolated using well known methods (see, e.g., U.S. Pat. No. 5,589,379). Shoot-preferred promoters include shoot meristem-preferred promoters such as promoters disclosed in Weigel, et al., (1992) Cell 69:843-859 (Accession Number M91208); Accession Number AJ131822; Accession Number Z71981; Accession Number AF049870 and shoot-preferred promoters disclosed in McAvoy, et al., (2003) Acta Hort. (ISHS) 625:379-385. Inflorescence-preferred promoters include the promoter of chalcone synthase (Van der Meer, et al., (1992) Plant J. 2(4):525-535), anther-specific LAT52 (Twell, et al., (1989) Mol. Gen. Genet. 217:240-245), pollen-specific Bp4 (Albani, et al., (1990) Plant Mol Biol. 15:605, maize pollen-specific gene Zm13 (Hamilton, et al., (1992) Plant Mol. Biol. 18:211-218; Guerrero, et al., (1993) Mol. Gen. Genet. 224:161-168), microspore-specific promoters such as the apg gene promoter (Twell, et al., (1993) Sex. Plant Reprod. 6:217-224) and tapetum-specific promoters such as the TA29 gene promoter (Marian, et al., (1990) Nature 347:737; U.S. Pat. No. 6,372,967) and other stamen-specific promoters such as the MS45 gene promoter, 5126 gene promoter, BS7 gene promoter, PG47 gene promoter (U.S. Pat. Nos. 5,412,085; 5,545,546; Plant J 3(2):261-271 (1993)), SGB6 gene promoter (U.S. Pat. No. 5,470,359), G9 gene promoter (US Patent Number 5,8937,850; U.S. Pat. No. 5,589,610), SB200 gene promoter (WO 2002/26789), or the like (see, Example 1). Tissue-preferred promoters of interest further include a sunflower pollen-expressed gene SF3 (Baltz, et al., (1992) The Plant Journal 2:713-721), B. napus pollen specific genes (Arnoldo, et al., (1992) J. Cell. Biochem, Abstract Number Y101204). Tissue-preferred promoters further include those reported by Yamamoto, et al., (1997) Plant J. 12(2):255-265 (psaDb); Kawamata, et al., (1997) Plant Cell Physiol. 38(7):792-803 (PsPAL1); Hansen, et al., (1997) Mol. Gen Genet. 254(3):337-343 (ORF13); Russell, et al., (1997) Transgenic Res. 6(2):157-168 (waxy or ZmGBS; 27 kDa zein, ZmZ27; osAGP; osGT1); Rinehart, et al., (1996) Plant Physiol. 112(3):1331-1341 (Fb12A from cotton); Van Camp, et al., (1996) Plant Physiol. 112(2):525-535 (Nicotiana SodA1 and SodA2); Canevascini, et al., (1996) Plant Physiol. 112(2):513-524 (Nicotiana ltp1); Yamamoto, et al., (1994) Plant Cell Physiol. 35(5):773-778 (Pinus cab-6 promoter); Lam, (1994) Results Probl. Cell Differ. 20:181-196; Orozco, et al., (1993) Plant Mol Biol. 23(6):1129-1138 (spinach rubisco activase (Rca)); Matsuoka, et al., (1993) Proc Natl. Acad. Sci. USA 90(20):9586-9590 (PPDK promoter) and Guevara-Garcia, et al., (1993) Plant J. 4(3):495-505 (Agrobacterium pmas promoter). A tissue-specific promoter that is active in cells of male or female reproductive organs may be particularly useful in certain aspects of the present disclosure.

[0267] “Seed-preferred” promoters include both “seed-developing” promoters (those promoters active during seed development such as promoters of seed storage proteins) as well as “seed-germinating” promoters (those promoters active during seed germination). See, Thompson, et al., (1989) BioEssays 10:108. Such seed-preferred promoters include, but are not limited to, Cim1 (cytokinin-induced message), cZ19B1 (maize 19 kDa zein), milps (myo-inositol-1-phosphate synthase); see, WO 2000/11177 and U.S. Pat. No. 6,225,529. Gamma-zein is an endosperm-specific promoter. Globulin-1 (Glob-1) is a representative embryo-specific promoter. For dicots, seed-specific promoters include, but are not limited to, bean β-phaseolin, napin, β-conglycinin, soybean lectin, cruciferin, and the like. For monocots, seed-specific promoters include, but are not limited to, maize 15 kDa zein, 22 kDa zein, 27 kDa zein, gamma-zein, waxy, shrunken 1, shrunken 2, globulin 1, etc. See also, WO 2000/12733 and U.S. Pat. No. 6,528,704, where seed-preferred promoters from end1 and end2 genes are disclosed. Additional embryo specific promoters are disclosed in Sato, et al., (1996) Proc. Natl. Acad. Sci. 93:8117-8122 (rice homeobox, OSH1) and Postma-Haarsma, et al., (1999) Plant Mol. Biol. 39:257-71 (rice KNOX genes). Additional endosperm specific promoters are disclosed in Albani, et al., (1984) EMBO 3:1405-15; Albani, et al., (1999) Theor. Appl. Gen. 98:1253-62; Albani, et al., (1993) Plant J. 4:343-55; Mena, et al., (1998) The Plant Journal 116:53-62 (barley DOF); Opsahl-Ferstad, et al., (1997) Plant J 12:235-46 (maize Esr) and Wu, et al., (1998) Plant Cell Physiology 39:885-889 (rice GluA-3, GluB-1, NRP33, RAG-1).

[0268] An inducible regulatory element is one that is capable of directly or indirectly activating transcription of one or more DNA sequences or genes in response to an inducer. The inducer may be a chemical agent such as a protein, metabolite, growth regulator, herbicide or phenolic compound or a physiological stress, such as that imposed directly by heat, cold, salt, or toxic elements or indirectly through the action of a pathogen or disease agent such as a virus or other biological or physical agent or environmental condition. A plant cell containing an inducible regulatory element may be exposed to an inducer by externally applying the inducer to the cell or plant such as by spraying, watering, heating or similar methods. An inducing agent useful for inducing expression from an inducible promoter is selected based on the particular inducible regulatory element. In response to exposure to an inducing agent, transcription from the inducible regulatory element generally is initiated de novo or is increased above a basal or constitutive level of expression. Typically the protein factor that binds specifically to an inducible regulatory element to activate transcription is present in an inactive form which is then directly or indirectly converted to the active form by the inducer. Any inducible promoter may be used in the instant disclosure (See, Ward, et al., (1993) Plant Mol. Biol. 22:361-366).

[0269] Examples of inducible regulatory elements include a metallothionein regulatory element, a copper-inducible regulatory element or a tetracycline-inducible regulatory element, the transcription from which may be effected in response to divalent metal ions, copper or tetracycline, respectively (Furst, et al., (1988) Cell 55:705-717; Mett, et al., (1993) Proc. Natl. Acad. Sci., USA 90:4567-4571; Gatz, et al., (1992) Plant J. 2:397-404; Roder, et al., (1994) Mol. Gen. Genet. 243:32-38). Inducible regulatory elements also include an ecdysone regulatory element or a glucocorticoid regulatory element, the transcription from which may be effected in response to ecdysone or other steroid (Christopherson, et al., (1992) Proc. Natl. Acad. Sci., USA 89:6314-6318; Schena, et al., (1991) Proc. Natl. Acad. Sci. USA 88:10421-10425; U.S. Pat. No. 6,504,082); a cold responsive regulatory element or a heat shock regulatory element, the transcription of which may be effected in response to exposure to cold or heat, respectively (Takahashi, et al., (1992) Plant Physiol. 99:383-390); the promoter of the alcohol dehydrogenase gene (Gerlach, et al., (1982) PNAS USA 79:2981-2985; Walker, et al., (1987) PNAS 84(19):6624-6628), inducible by anaerobic conditions; and the light-inducible promoter derived from the pea rbcS gene or pea psaDb gene (Yamamoto, et al., (1997) Plant J. 12(2):255-265); a light-inducible regulatory element (Feinbaum, et al., (1991) Mol. Gen. Genet. 226:449; Lam and Chua, (1990) Science 248:471; Matsuoka, et al., (1993) Proc. Natl. Acad. Sci. USA 90(20):9586-9590; Orozco, et al., (1993) Plant Mol. Bio. 23(6):1129-1138), a plant hormone inducible regulatory element (Yamaguchi-Shinozaki, et al., (1990) Plant Mol. Biol. 15:905; Kares, et al., (1990) Plant Mol. Biol. 15:225), and the like. An inducible regulatory element also may be the promoter of the maize In2-1 or In2-2 gene, which responds to benzenesulfonamide herbicide safeners (Hershey, et al., (1991) Mol. Gen. Gene. 227:229-237; Gatz, et al., (1994) Mol. Gen. Genet. 243:32-38) and the Tet repressor of transposon Tn10 (Gatz, et al., (1991) Mol. Gen. Genet. 227:229-237). Stress inducible promoters include salt/water stress-inducible promoters such as PSCS (Zang, et al., (1997) Plant Sciences 129:81-89); cold-inducible promoters, such as, corl5a (Hajela, et al., (1990) Plant Physiol. 93:1246-1252), cold 5b (Wlihelm, et al., (1993) Plant Mol Biol 23:1073-1077), wsc120 (Ouellet, et al., (1998) FEBS Lett. 423:324-328), ci7 (Kirch, et al., (1997) Plant Mol Biol. 33:897-909), ci21A (Schneider, et al., (1997) Plant Physiol. 113:335-45); drought-inducible promoters, such as, Trg-31 (Chaudhary, et al., (1996) Plant Mol. Biol. 30:1247-57), rd29 (Kasuga, et al., (1999) Nature Biotechnology 18:287-291); osmotic inducible promoters, such as Rab 17 (Vilardell, et al., (1991) Plant Mol. Biol. 17:985-93) and osmotin (Raghothama, et al., (1993) Plant Mol Biol 23:1117-28) and heat inducible promoters, such as heat shock proteins (Barros, et al., (1992) Plant Mol. 19:665-75; Marrs, et al., (1993) Dev. Genet. 14:27-41), smHSP (Waters, et al., (1996) 1 Experimental Botany 47:325-338) and the heat-shock inducible element from the parsley ubiquitin promoter (WO 03/102198). Other stress-inducible promoters include rip2 (U.S. Pat. No. 5,332,808 and US Patent Application Publication Number 2003/0217393) and rd29a (Yamaguchi-Shinozaki, et al., (1993) Mol. Gen. Genetics 236:331-340). Certain promoters are inducible by wounding, including the Agrobacterium pmas promoter (Guevara-Garcia, et al., (1993) Plant J. 4(3):495-505) and the Agrobacterium ORF13 promoter (Hansen, et al., (1997) Mol. Gen. Genet. 254(3):337-343).

[0270] Plants suitable for purposes of the present disclosure may be monocots or dicots and include, but are not limited to, maize, wheat, barley, rye, sweet potato, bean, pea, chicory, lettuce, cabbage, cauliflower, broccoli, turnip, radish, spinach, asparagus, onion, garlic, pepper, celery, squash, pumpkin, hemp, zucchini, apple, pear, quince, melon, plum, cherry, peach, nectarine, apricot, strawberry, grape, raspberry, blackberry, pineapple, avocado, papaya, mango, banana, soybean, tomato, sorghum, sugarcane, sugar beet, sunflower, rapeseed, clover, tobacco, carrot, cotton, alfalfa, rice, potato, eggplant, cucumber, Arabidopsis thaliana and woody plants such as coniferous and deciduous trees. Thus, a transgenic plant or genetically modified plant cell of the disclosure may be an angiosperm or gymnosperm.

[0271] Cereal plants, which produce an edible grain, include, for example, corn, rice, wheat, barley, oat, rye, orchardgrass, guinea grass and sorghum. Leguminous plants include members of the pea family (Fabaceae) and produce a characteristic fruit known as a legume. Examples of leguminous plants include, for example, soybean, pea, chickpea, moth bean, broad bean, kidney bean, lima bean, lentil, cowpea, dry bean and peanut, as well as alfalfa, birdsfoot trefoil, clover and sainfoin. Oilseed plants, which have seeds that are useful as a source of oil, include soybean, sunflower, rapeseed (canola) and cottonseed. Angiosperms also include hardwood trees, which are perennial woody plants that generally have a single stem (trunk). Examples of such trees include alder, ash, aspen, basswood (linden), beech, birch, cherry, cottonwood, elm, eucalyptus, hickory, locust, maple, oak, persimmon, poplar, sycamore, walnut, sequoia and willow. Trees are useful, for example, as a source of pulp, paper, structural material and fuel.

[0272] Homozygosity is a genetic condition existing when identical alleles reside at corresponding loci on homologous chromosomes. Heterozygosity is a genetic condition existing when different alleles reside at corresponding loci on homologous chromosomes. Homozygosity is a genetic condition existing when there is only one copy of a gene (or set of genes) with no allelic counterpart on the sister chromosome.

[0273] The plant breeding methods used herein are well known to one skilled in the art. For a discussion of plant breeding techniques, see, Poehlman, (1987) Breeding Field Crops AVI Publication Co., Westport Conn. Many of the plants which would be most preferred in this method are bred through techniques that take advantage of the plant's method of pollination.

[0274] Backcrossing methods may be used to introduce a gene into the plants. This technique has been used for decades to introduce traits into a plant. An example of a description of this and other plant breeding methodologies that are well known may be found in references such as Plant Breeding Methodology, edit. Neal Jensen, John Wiley & Sons, Inc. (1988). In a typical backcross protocol, the original variety of interest (recurrent parent) is crossed to a second variety (nonrecurrent parent) that carries the single gene of interest to be transferred. The resulting progeny from this cross are then crossed again to the recurrent parent and the process is repeated until a plant is obtained wherein essentially all of the desired morphological and physiological characteristics of the recurrent parent are recovered in the converted plant, in addition to the single transferred gene from the nonrecurrent parent.

[0275] By transgene, it is meant any nucleic acid sequence which is introduced into the genome of a cell by genetic engineering techniques. A transgene may be a native DNA sequence or a heterologous DNA sequence (i.e., “foreign DNA”). The term native DNA sequence refers to a nucleotide sequence which is naturally found in the cell but that may have been modified from its original form.

[0276] Using well-known techniques, additional promoter sequences may be isolated based on their sequence homology. In these techniques, all or part of a known promoter sequence is used as a probe which selectively hybridizes to other sequences present in a population of cloned genomic DNA fragments (i.e. genomic libraries) from a chosen organism. Methods that are readily available in the art for the hybridization of nucleic acid sequences may be used to obtain sequences which correspond to these promoter sequences in species including, but not limited to, maize (corn; Zea cans), canola (Brassica napus, Brassica rapa ssp.), alfalfa (Medicago sativa), rice (Oryza sativa), rye (Secale cereale), sorghum (Sorghum bicolor, Sorghum vulgare), sunflower (Helianthus annuus), wheat (Triticum aestivum), soybean (Glycine max), tobacco (Nicotiana tabacum), potato (Solanum tuberosum), peanuts (Arachis hypogaea), cotton (Gossypium hirsutum), sweet potato (Ipomoea batatus), cassava (Manihot esculenta), coffee (Cofea spp.), coconut (Cocos nucifera), pineapple (Ananas comosus), citrus trees (Citrus spp.), cocoa (Theobroma cacao), tea (Camellia sinensis), banana (Musa spp.), avocado (Persea americana), fig (Ficus casica), guava (Psidium guajava), mango (Mangifera indica), olive (Olea europaea), oats, barley, vegetables, ornamentals and conifers. Preferably, plants include maize, soybean, sunflower, safflower, canola, wheat, barley, rye, alfalfa and sorghum.

[0277] The entire promoter sequence or portions thereof may be used as a probe capable of specifically hybridizing to corresponding promoter sequences. To achieve specific hybridization under a variety of conditions, such probes include sequences that are unique and are preferably at least about 10 nucleotides in length and most preferably at least about 20 nucleotides in length. Such probes may be used to amplify corresponding promoter sequences from a chosen organism by the well-known process of polymerase chain reaction (PCR). This technique may be used to isolate additional promoter sequences from a desired organism or as a diagnostic assay to determine the presence of the promoter sequence in an organism. Examples include hybridization screening of plated DNA libraries (either plaques or colonies; see e.g., Innis, et al., (1990) PCR Protocols, A Guide to Methods and Applications, eds., Academic Press).

[0278] In general, sequences that correspond to a promoter sequence of the present disclosure and hybridize to a promoter sequence disclosed herein will be at least 50% homologous, 55% homologous, 60% homologous, 65% homologous, 70% homologous, 75% homologous, 80% homologous, 85% homologous, 90% homologous, 95% homologous and even 98% homologous or more with the disclosed sequence.

[0279] Fragments of a particular promoter sequence may be used to drive the expression of a gene of interest. These fragments will comprise at least about 20 contiguous nucleotides, preferably at least about 50 contiguous nucleotides, more preferably at least about 75 contiguous nucleotides, even more preferably at least about 100 contiguous nucleotides of the particular promoter nucleotide sequences disclosed herein. The nucleotides of such fragments will usually comprise the TATA recognition sequence of the particular promoter sequence. Such fragments may be obtained by use of restriction enzymes to cleave the naturally-occurring promoter sequences disclosed herein; by synthesizing a nucleotide sequence from the naturally-occurring DNA sequence or through the use of PCR technology. See particularly, Mullis, et al., (1987) Methods Enzymol. 155:335-350 and Erlich, ed. (1989) PCR Technology (Stockton Press, New York). Again, variants of these fragments, such as those resulting from site-directed mutagenesis, are encompassed by the compositions of the present disclosure. The nucleotide sequence operably linked to the regulatory elements disclosed herein may be an antisense sequence for a targeted gene. By “antisense DNA nucleotide sequence” is intended a sequence that is in inverse orientation to the 5′-to-3′ normal orientation of that nucleotide sequence. When delivered into a plant cell, expression of the antisense DNA sequence prevents normal expression of the DNA nucleotide sequence for the targeted gene. The antisense nucleotide sequence encodes an RNA transcript that is complementary to and capable of hybridizing with the endogenous messenger RNA (mRNA) produced by transcription of the DNA nucleotide sequence for the targeted gene. In this case, production of the native protein encoded by the targeted gene is inhibited to achieve a desired phenotypic response. Thus the regulatory sequences claimed herein may be operably linked to antisense DNA sequences to reduce or inhibit expression of a native or exogenous protein in the plant.

### J. Exemplary Embodiments

[0280] In certain embodiments, seeds comprising parthenogenically-derived clonal embryos are obtained by collecting one or more seeds produced by a maternal plant defective for RdDM activity for any one of the polynucleotides or polypeptides of Table 1, wherein the maternal plant is unable to be pollinated, and wherein one or more seeds comprise parthenogenically-derived clonal embryo that is a clone of the maternal plant.

[0281] In another embodiment, seeds comprising clonal embryos are obtained by collecting one or more seeds produced by a maternal plant defective for RdDM activity for any one of the polynucleotides or polypeptides of Table 1, and the seeds are sorted to separate the seeds comprising clonal embryos from the seeds comprising non-clonal embryos; wherein the maternal plant is pollinated prior to collecting the seeds; and wherein one or more seeds produced by the maternal plant comprise an embryo that is a clone of the maternal plant.

[0282] In another embodiment, maternal plants are screened for those plants that produce seeds comprising parthenogenically-derived clonal embryos; the screening method comprising: (a) obtaining a maternal plant unable to pass on paternally-derived chromosomes to embryos, wherein the plant is silenced for RdDM activity for any one of the polynucleotides or polypeptides of Table 1; (b) harvesting the seeds; and (c) determining whether the seeds comprise clonal embryos, wherein the presence of seeds comprising clonal embryos indicates the maternal plant can produce parthenogenically-derived clonal embryos.

[0283] In another embodiment, the yield of seeds is increased by using methods comprising parthenogenically-derived clonal embryos, the method comprising: (a) obtaining a maternal plant unable to pass-on paternally-derived chromosomes to embryos, wherein the plant is silenced for RdDM activity or any one of the polynucleotides or polypeptides of Table 1; (b) pollinating the maternal plant; (c) collecting seeds produced by the maternal plant; and (d) sorting the seeds comprising parthenogenically-derived clonal embryos from seeds comprising non-clonal embryos.

[0284] In another embodiment, maternal plant comprises a construct, wherein the construct comprises a nucleic acid sequence that renders the maternal plant defective for RdDM activity or any one of the polynucleotides or polypeptides of Table 1, and wherein the maternal plant produces seeds comprising parthenogenically-derived clonal embryos. In other embodiments, the plant defective for RdDM activity is a dicot or monocot. In still other embodiments, the plant defective for RdDM activity is maize, rice, sorghum, sugarcane, barley, oat, wheat, turfgrass, soybean, canola, cotton, tobacco, sunflower, safflower, or alfalfa.

[0285] In another embodiment, maternal plant comprises a construct, wherein the construct comprises a nucleic acid sequence that renders the maternal plant defective for RdDM activity or any one of the polynucleotides or polypeptides of Table 1; wherein the maternal plant produces seeds comprising parthenogenically-derived clonal embryos; and wherein the seed, when grown, produces seeds comprising clonal embryo. In other embodiments, the plant defective for RdDM activity is a dicot or monocot. In still other embodiments, the plant defective for RdDM activity is maize, rice, sorghum, sugarcane, barley, oat, wheat, turfgrass, soybean, canola, cotton, tobacco, sunflower, safflower, or alfalfa.

[0286] In another embodiment, the number of seeds is increased by methods comprising parthenogenically-derived clonal embryos comprising: (a) subjecting a plant that is defective for RdDM activity to an abiotic stress; and (b) forming seeds in the plant; where in the number of seeds comprising parthenogenically-derived clonal embryos formed are increased compared to seeds formed in a control plant. In other embodiments, the control plant is defective for activity in the RdDM-pathway and not subjected to an abiotic stress. In still other embodiments, the abiotic stress comprises a low temperature, a high temperature, light, water deficit, flooding, anoxia, a chemical stress, a high level of salt, a low level of salt, a high level of acid, a low level of acid, a high level of mineral, a low level of mineral, or combinations thereof. In yet other embodiments, the method further comprises not pollinating the plant or exposing the plants to pollen.

[0287] In another embodiment, the number of seeds comprising parthenogenically-derived clonal embryos is increased in a plant defective for RdDM activity by a method comprising: (a) pollinating after anthesis a plant that is defective for RdDM activity; and (b) forming seeds in the plant, wherein the number of seeds comprising parthenogenically-derived clonal embryos formed are increased compared to seeds comprising parthenogenically-derived clonal embryos formed in a control plant. In other embodiments, the control plant is defective for RdDM activity and pollinated prior to anthesis. In still other embodiments, the method comprises pollinating the plant that is defective for RdDM activity one or more days after anthesis. In yet other embodiments, the method comprises pollinating the plant that is defective for RdDM activity 1, 2, 3, 4, 5, 6, 7, 8, 9, 10, 11, 12, 13, 14, 15, 16, 17, 18, 19, 20, 21, 22, 23, 24, 25, 26, 27, 28, 29, 30 days after anthesis.

[0288] In another embodiment, the number of seeds comprising parthenogenically-derived clonal embryos is increased in a plant defective for RdDM activity by method comprising: (a) pollinating the plant that is defective for RdDM activity with pollen from a plant of a different species than the plant that is defective for RdDM activity; and (b) forming seeds in the plant, wherein the number of seeds comprising parthenogenically-derived clonal embryos formed are increased compared to seeds comprising parthenogenically-derived clonal embryos formed in a control plant. In other embodiments, the control plant is disrupted in for RdDM activity and pollinated with pollen from the same species. In still other embodiments, the plant that is defective for RdDM activity and pollen are from related species of the same genera or related genera. In yet other embodiments, the method comprises pollinating the plant defective for RdDM activity 1, 2, 3, 4, 5, 6, 7, 8, 9, 10, 11, 12, 13, 14, 15, 16, 17, 18, 19, 20, 21, 22, 23, 24, 25, 26, 27, 28, 29, 30 days after anthesis. In still other embodiments, the number of seeds comprising parthenogenically-derived clonal embryos formed in the plant is increased by 1%, 2%, 3%, 4%, 5%, 6%, 7%, 8%, 9%, 10%, 11%, 12%, 13%, 14%, 15%, 16%, 17%, 18%, 19%, 20%, 25%, 30%, 35%, 40%, 45%, 50%, 55%, 60%, 65%, 70%, 75%, 80%, 85%, 90%, 95%, 99%, or 100% as compared to seeds produced by a control plant. In yet other embodiments, the plant is defective for RdDM activity for any one of the polynucleotides or polypeptides of Table 1.

[0289] In other embodiments, the plant that is defective for RdDM activity and pollen are from related species of the same genera or related genera, and the plant that is defective for RdDM activity is Zea mays L. subspecies Teosinte, Zea diploperennus, Zea luxurians, Zea nicaraguensis, Zea perennis, subspecies Zea mays subsp mays, Zea mays subsp huehuetenangensis, Zea mays subsp mexicana, or Zea mays subsp parviglumis.

[0290] In other embodiments, the plant that is defective for RdDM activity and pollen are from related species of the same genera or related genera, and the pollen is from Zea mays L. sub species, Teosinte, Zea diploperennus, Zea luxurians, Zea nicaraguensis, Zea perennis, subspecies Zea mays subsp mays, Zea mays subsp huthuetenangensis, Zea mays subsp mexicana, or Zea mays subsp parviglumis.

[0291] In other embodiments, the plant that is defective for RdDM activity and pollen are from related species of the same genera or related genera: (a) the plant that is defective for RdDM activity is Zea mays L. subspecies Teosinte, Zea diploperennus, Zea luxurians, Zea nicaraguensis, Zea perennis, subspecies Zea mays subsp mays, Zea mays subsp huehuetenangensis, Zea mays subsp mexicana, or Zea mays subsp parviglumis; and (b) and the pollen is from Zea mays L. subspecies, Teosinte, Zea diploperennus, Zea luxurians, Zea nicaraguensis, Zea perennis, subspecies Zea mays subsp mays, Zea mays subsp huehuetenangensis, Zea mays subsp mexicana, or Zea mays subsp parviglumis.

[0292] In other embodiments, the plant that is defective for RdDM activity and pollen are from related species of the same genera or related genera, and the plant that is defective for RdDM activity is Glycine max, Glycine albicans, Glycine aphyonota, Glycine arenaria, Glycine argyrea, Glycine canescens, Glycine clandestine, Glycine curvata, Glycine cyrtoloba, Glycine falcata, Glycine gracei, Glycine hirticaulis, G. hirticaulis subsp. Leptosa, Glycine lactovirens, Glycine latifolia, Glycine latrobeana, Glycine microphylla, Glycine montis-douglas, Glycine peratosa, Glycine pescadrensis, Glycine pindanica, Glycine pullenii, Glycine rubiginosa, Glycine stenophita, Glycine syndetika, Glycine tabacina, Glycine tomentella, Hayata, or Glycine soja.

[0293] In other embodiments, the plant that is defective for RdDM activity and pollen are from related species of the same genera or related genera, and the pollen is from a soybean (Glycine max), Glycine albicans, Glycine aphyonota, Glycine arenaria, Glycine argyrea, Glycine canescens, Glycine clandestine, Glycine curvata, Glycine cyrtoloba, Glycine falcata, Glycine gracei, Glycine hirticaulis, G. hirticaulis subsp. Leptosa, Glycine lactovirens, Glycine latifolia, Glycine latrobeana, Glycine microphylla, Glycine montis-douglas, Glycine peratosa, Glycine pescadrensis, Glycine pindanica, Glycine pullenii, Glycine rubiginosa, Glycine stenophita, Glycine syndetika, Glycine tabacina, Glycine tomentella, Hayata, or Glycine soja.

[0294] In other embodiments, the plant that is defective for RdDM activity and pollen are from related species of the same genera or related genera: (a) the plant that is defective for RdDM activity is Glycine max, Glycine albicans, Glycine aphyonota, Glycine arenaria, Glycine argyrea, Glycine canescens, Glycine clandestine, Glycine curvata, Glycine cyrtoloba, Glycine falcata, Glycine gracei, Glycine hirticaulis, G. hirticaulis subsp. Leptosa, Glycine lactovirens, Glycine latifolia, Glycine latrobeana, Glycine microphylla, Glycine montis-douglas, Glycine peratosa, Glycine pescadrensis, Glycine pindanica, Glycine pullenii, Glycine rubiginosa, Glycine stenophita, Glycine syndetika, Glycine tabacina, Glycine tomentella, Hayata, or Glycine soja; and (b) the pollen is from a soybean (Glycine max), Glycine albicans, Glycine aphyonota, Glycine arenaria, Glycine argyrea, Glycine canescens, Glycine clandestine, Glycine curvata, Glycine cyrtoloba, Glycine falcata, Glycine gracei, Glycine hirticaulis, G. hirticaulis subsp. Leptosa, Glycine lactovirens, Glycine latifolia, Glycine latrobeana, Glycine microphylla, Glycine montis-douglas, Glycine peratosa, Glycine pescadrensis, Glycine pindanica, Glycine pullenii, Glycine rubiginosa, Glycine stenophita, Glycine syndetika, Glycine tabacina, Glycine tomentella, Hayata, or Glycine soja.

[0295] In other embodiments, the plant that is defective for RdDM activity and pollen are from related species of the same genera or related genera, and the plant that is defective for RdDM activity is Sorghum almum, Sorghum amplum, Sorghum angustum, Sorghum arundinaceum, Sorghum bicolor subsp. Drummondii (Sudan grass) Sorghum brachypodum, Sorghum bulbosum, Sorghum burmahicum, Sorghum ecarinatum, Sorghum exstans, Sorghum grande, Johnson grass (Sorghum halepense), Sorghum interjectum, Sorghum intrans, Sorghum laxiflorum, Sorghum leiocladum, Sorghum macrospermum, Sorghum matarankense, Sorghum nitidum, Sorghum plumosum, Sorghum propinquum, Sorghum purpureosericeum, Sorghum stipoideum, Sorghum timorense, Sorghum trichocladum, Sorghum versicolor, Sorghum verticiliflorum, or Sorghum vulgare var. technicum.

[0296] In other embodiments, the plant that is defective for RdDM activity and pollen are from related species of the same genera or related genera, and the pollen is from Sorghum bicolor plant, Sorghum almum, Sorghum amplum, Sorghum angustum, Sorghum arundinaceum, Sorghum bicolor subsp. Drummondii (Sudan grass) Sorghum brachypodum, Sorghum bulbosum, Sorghum burmahicum, Sorghum ecarinatum, Sorghum exstans, Sorghum grande, Johnson grass (Sorghum halepense), Sorghum interjectum, Sorghum intrans, Sorghum laxiflorum, Sorghum leiocladum, Sorghum macrospermum, Sorghum matarankense, Sorghum nitidum, Sorghum plumosum, Sorghum propinquum, Sorghum purpureosericeum, Sorghum stipoideum, Sorghum timorense, Sorghum trichocladum, Sorghum versicolor, Sorghum verticiliflorum, or Sorghum vulgare var. technicum.

[0297] In other embodiments, the plant that is defective for RdDM activity and pollen are from related species of the same genera or related genera: (a) the plant that is defective for RdDM activity is Sorghum almum, Sorghum amplum, Sorghum angustum, Sorghum arundinaceum, Sorghum bicolor subsp. Drummondii (Sudan grass) Sorghum brachypodum, Sorghum bulbosum, Sorghum burmahicum, Sorghum ecarinatum, Sorghum exstans, Sorghum grande, Johnson grass (Sorghum halepense), Sorghum interjectum, Sorghum intrans, Sorghum laxiflorum, Sorghum leiocladum, Sorghum macrospermum, Sorghum matarankense, Sorghum nitidum, Sorghum plumosum, Sorghum propinquum, Sorghum purpureosericeum, Sorghum stipoideum, Sorghum timorense, Sorghum trichocladum, Sorghum versicolor, Sorghum verticiliflorum, or Sorghum vulgare var. technicum; and (b) the pollen is from Sorghum bicolor plant, Sorghum almum, Sorghum amplum, Sorghum angustum, Sorghum arundinaceum, Sorghum bicolor subsp. Drummondii (Sudan grass) Sorghum brachypodum, Sorghum bulbosum, Sorghum burmahicum, Sorghum ecarinatum, Sorghum exstans, Sorghum grande, Johnson grass (Sorghum halepense), Sorghum interjectum, Sorghum intrans, Sorghum laxiflorum, Sorghum leiocladum, Sorghum macrospermum, Sorghum matarankense, Sorghum nitidum, Sorghum plumosum, Sorghum propinquum, Sorghum purpureosericeum, Sorghum stipoideum, Sorghum timorense, Sorghum trichocladum, Sorghum versicolor, Sorghum verticiliflorum, or Sorghum vulgare var. technicum.

[0298] In other embodiments, the plant that is defective for RdDM activity and pollen are from related species of the same genera or related genera and the plant defective for RdDM activity is from the species comprising Triticum aestivum, Spelt (“Triticum spelta”) or “Triticum aestivum” subsp. “spelta”, Durum (“Triticum. durum”), Emmer (“Triticum dicoccon”), Einkorn (“Triticum monococcum”), Durum, Hard Red Spring, Hard Red Winter, Soft Red Winter, Hard White, Soft White, or Red wheat.

[0299] In other embodiments, the plant that is defective for RdDM activity and pollen are from related species of the same genera or related genera and the pollen is from Triticum aestivum, Spelt (“Triticum spelta”) or “Triticum aestivum” subsp. “spelta”, Durum (“Triticum. durum”), Emmer (“Triticum dicoccon”), Einkorn (“Triticum monococcum”), Durum, Hard Red Spring, Hard Red Winter, Soft Red Winter, Hard White, Soft White, or Red wheat.

[0300] In other embodiments, the plant that is defective for RdDM activity and pollen are from related species of the same genera or related genera: (a) the plant defective for RdDM activity is from the species comprising Triticum aestivum, Spelt (“Triticum spelta”) or “Triticum aestivum” subsp. “spelta”, Durum (“Triticum. durum”), Emmer (“Triticum dicoccon”), Einkorn (“Triticum monococcum”), Durum, Hard Red Spring, Hard Red Winter, Soft Red Winter, Hard White, Soft White, or Red wheat; and (b) the pollen is from Triticum aestivum, Spelt (“Triticum spelta”) or “Triticum aestivum” subsp. “spelta”, Durum (“Triticum. durum”), Emmer (“Triticum dicoccon”), Einkorn (“Triticum monococcum”), Durum, Hard Red Spring, Hard Red Winter, Soft Red Winter, Hard White, Soft White, or Red wheat.

[0301] In other embodiments, the plant that is defective for RdDM activity and pollen are from related species of the same genera or related genera and the plant defective for RdDM activity is from Arabidopsis thaliana, Arabidopsis arenicola, Arabidopsis arenosa, A. arenosa subsp. Arenosa, A. arenosa subsp. Borbasii, Arabidopsis cebennensis, Arabidopsis croatica, Arabidopsis halleri, A. halleri subsp. Halleri, A. halleri subsp. Ovirensis, A. halleri subsp. Gemmifera, Arabidopsis lyrata, A. lyrata subsp. Lyrata, lyrata subsp. Petraea, A. lyrata subsp. Kamchatica, Arabidopsis neglecta, Arabidopsis pedemontana, or Arabidopsis suecica, or Boechera holboellii.

[0302] In other embodiments, the plant that is defective for RdDM activity and pollen are from related species of the same genera or related genera and the pollen is from Arabidopsis thaliana, Arabidopsis arenicola, Arabidopsis arenosa, A. arenosa subsp. Arenosa, A. arenosa subsp. Borbasii, Arabidopsis cebennensis, Arabidopsis croatica, Arabidopsis halleri, A. halleri sub sp. Halleri, A. halleri subsp. Ovirensis, A. halleri subsp. Gemmifera, Arabidopsis lyrata, A. lyrata subsp. Lyrata, lyrata subsp. Petraea, A. lyrata subsp. Kamchatica, Arabidopsis neglecta, Arabidopsis pedemontana, or Arabidopsis suecica, or Boechera holboellii.

[0303] In other embodiments, the plant that is defective for RdDM activity and pollen are from related species of the same genera or related genera: (a) the plant defective for RdDM activity is from Arabidopsis thaliana, Arabidopsis arenicola, Arabidopsis arenosa, A. arenosa subsp. Arenosa, A. arenosa sub sp. Borbasii, Arabidopsis cebennensis, Arabidopsis croatica, Arabidopsis halleri, A. halleri subsp. Halleri, A. halleri subsp. Ovirensis, A. halleri subsp. Gemmifera, Arabidopsis lyrata, A. lyrata subsp. Lyrata, lyrata subsp. Petraea, A. lyrata subsp. Kamchatica, Arabidopsis neglecta, Arabidopsis pedemontana, or Arabidopsis suecica, or Boechera holboellii; and (b) the pollen is from Arabidopsis thaliana, Arabidopsis arenicola, Arabidopsis arenosa, A. arenosa subsp. Arenosa, A. arenosa subsp. Borbasii, Arabidopsis cebennensis, Arabidopsis croatica, Arabidopsis halleri, A. halleri subsp. Halleri, A. halleri subsp. Ovirensis, A. halleri subsp. Gemmifera, Arabidopsis lyrata, A. lyrata subsp. Lyrata, lyrata subsp. Petraea, A. lyrata subsp. Kamchatica, Arabidopsis neglecta, Arabidopsis pedemontana, or Arabidopsis suecica, or Boechera holboellii.

[0304] In another embodiment, the number of seeds comprising parthenogenically-derived clonal embryos is increased in a plant defective for RdDM activity by method comprising: (a) pollinating the plant that is defective for RdDM activity with pollen from a plant of a different species than the plant that is defective for RdDM activity; and (b) forming seeds in the plant, wherein the number of seeds comprising parthenogenically-derived clonal embryos formed are increased compared to seeds comprising parthenogenically-derived clonal embryos formed in a control plant, wherein the number of seeds comprising parthenogenically-derived clonal embryos formed in the plant is increased by 1%, 2%, 3%, 4%, 5%, 6%, 7%, 8%, 9%, 10%, 11%, 12%, 13%, 14%, 15%, 16%, 17%, 18%, 19%, 20%, 25%, 30%, 35%, 40%, 45%, 50%, 55%, 60%, 65%, 70%, 75%, 80%, 85%, 90%, 95%, 99%, or 100% as compared to seeds produced by a control plant.

[0305] In another embodiment, the number of seeds comprising parthenogenically-derived clonal embryos is increased in a plant defective for RdDM activity by method comprising: (a) pollinating the plant that is defective for RdDM activity with pollen from a plant of a different species than the plant that is defective for RdDM activity; and (b) forming seeds in the plant, wherein the number of seeds comprising parthenogenically-derived clonal embryos formed are increased compared to seeds comprising parthenogenically-derived clonal embryos formed in a control plant, wherein the number of seeds comprising parthenogenically-derived clonal embryos formed in the plant is increased by 1%, 2%, 3%, 4%, 5%, 6%, 7%, 8%, 9%, 10%, 11%, 12%, 13%, 14%, 15%, 16%, 17%, 18%, 19%, 20%, 25%, 30%, 35%, 40%, 45%, 50%, 55%, 60%, 65%, 70%, 75%, 80%, 85%, 90%, 95%, 99%, or 100% as compared to seeds produced by a control plant.

[0306] In another embodiment, a seed is enriched for asexual embryos by a method comprising: (a) introducing in a plant defective for RdDM activity an element that disrupts sexual zygote function or development; and (b) regulating expression of the element in the sexual zygote precursor cells or sexual zygote so that sexual zygote formation or development is disrupted. In other embodiments, the element is operatively linked to a promoter or operatively linked to a sexual zygote preferred promoter. In other embodiments, the promoter is a chemically inducible promoter. In other embodiments, the method further comprises exposing the plant to an inducer to effect sexual zygote formation or development. In other embodiments, the element is lethal to the sexual zygote precursor cells or sexual zygote, the element is a toxin, or the element is barnase or dam methylase. In other embodiments, the sexual zygote is ablated when the element is expressed, is ablated when the element is repressed, or is repressed using gene or post-transcriptional silencing. In other embodiments, the method further comprises regulating the expression of the element chemically. In other embodiments, the method further comprises regulating the expression of the element chemically by chemical induction or chemical repression or chemical de-repression. In other embodiments, the method further comprises regulating the expression of the element chemically by providing a chemical to the plant by foliar application, root drench application, pre-emergence application, post-emergence application, or seed treatment application. In other embodiments, the method further comprises, regulating the expression of the element using a molecular or genetic switch. In other embodiments, the method further comprises regulating the expression of the element using a genetic switch, wherein the genetic switch is a sulfonylurea-regulated gene switch or wherein the genetic switch comprises a repressor, wherein the repressor is operably linked to a promoter active in the plant wherein the promoter is a constitutive promoter, a tissue-preferred promoter, a developmental stage-preferred promoter, an inducible promoter, or a repressible promoter. In other embodiments, the method further comprises regulating the expression of the element using a transactivator system.

[0307] In another embodiment, a plant is produced by the immediately foregoing embodiment, and the method comprises a transgenic plant defective for RdDM activity, enriched for asexual embryos, and lacking a sexual zygote, and wherein the plant comprises an element that disrupts sexual zygote function or development. In other embodiments, the plant is dicot or monocot. In other embodiments, the plant is maize, rice, sorghum, sugarcane, barley, oat, wheat, turfgrass, soybean, canola, cotton, tobacco, sunflower, safflower, or alfalfa.

[0308] In another embodiment, a seed comprising an asexual embryo produced is produced from the plant of the preceding paragraph, and the method comprises an element that disrupts sexual zygote function or development from the plant of claim 104, and wherein the plant comprises an element that disrupts sexual zygote function or development. In other embodiments, the plant seed is a dicot or monot. In other embodiments, the plant seeds is maize, rice, sorghum, sugarcane, barley, oat, wheat, turfgrass, soybean, canola, cotton, tobacco, sunflower, safflower, or alfalfa.

[0309] In another embodiment, a plant cell from the plant of the preceding paragraph. In other embodiments, the plant cell is dicot or monocot. In other embodiments, the plant cell is maize, rice, sorghum, sugarcane, barley, oat, wheat, turfgrass, soybean, canola, cotton, tobacco, sunflower, safflower, or alfalfa.

[0310] In another embodiment, a sexual zygote or embryo is selectively ablated by a method comprising: providing in an embryo or sexual zygote a first construct and a second construct, said first construct having a promoter that expresses in the female gametophyte or sexual zygote operably linked to a nucleic acid encoding a split-intein toxin, said second construct having a male gamete-preferred promoter operably linked to a nucleic acid encoding the cognate split-intein toxin; wherein the split intein toxins are trans-spliced into an active toxin; thereby ablating the sexual zygote or embryo.

[0311] In another embodiment, a sexual zygote or embryo is selectively ablated by a method comprising: (a) providing in a first plant comprising a construct having a promoter that expresses in the female gamete or sexual zygote operably linked to a nucleic acid encoding a split-intein toxin; and (b) pollinating the first plant with pollen having a male gamete-preferred promoter operably linked to a nucleic acid encoding a cognate split-intein toxin to produce a plant wherein the split intein toxins are trans-spliced into an active toxin in the sexual zygote or embryo so that the sexual zygote or embryo is ablated.

[0312] In another embodiment, a sexual zygote or embryo is selectively ablated by a method comprising: (a) providing in a first plant comprising a construct having a promoter that expresses in the female gamete or sexual zygote operably linked to a nucleic acid encoding a split-intein toxin; (b) providing a second plant comprising a male gamete-preferred promoter operably linked to a nucleic acid encoding a cognate split-intein toxin; and (c) crossing the first plant with second plant to produce a plant wherein the split intein toxins are trans-spliced into an active toxin in the sexual zygote or embryo so that the sexual zygote or embryo is ablated.

[0313] In other embodiments of the foregoing method pertaining to selectively ablating a sexual zygote or embryo, the promoter that expresses in the female gamete or sexual zygote is a female gamete preferred promoter.

[0314] In other embodiments of the foregoing method pertaining to selectively ablating a sexual zygote or embryo, the promoter that expresses in the female gamete or sexual zygote is a female gamete preferred promoter, and the female gamete-preferred promoter is an egg cell-preferred promoter.

[0315] In other embodiments of the foregoing method pertaining to selectively ablating a sexual zygote or embryo, the promoter that expresses in the female gamete or sexual zygote is a sexual zygote preferred promoter.

[0316] In other embodiments of the foregoing method pertaining to selectively ablating a sexual zygote or embryo,

[0317] In other embodiments of the foregoing method pertaining to selectively ablating a sexual zygote or embryo, the promoter that does not express in the central cell or sperm cell.

[0318] In other embodiments of the foregoing method pertaining to selectively ablating a sexual zygote or embryo, the male gamete preferred promoter is sperm cell-preferred promoter.

[0319] In other embodiments of the foregoing method pertaining to selectively ablating a sexual zygote or embryo, the male gamete preferred promoter is sperm cell-preferred promoter, and the male gamete preferred promoter does not express in the egg cell.

[0320] In other embodiments of the foregoing method pertaining to selectively ablating a sexual zygote or embryo, the element is a toxin or the element is barnase or DAM.

[0321] In other embodiments of the foregoing method pertaining to selectively ablating a sexual zygote or embryo, the first plant is male sterile.

[0322] In other embodiments of the foregoing method pertaining to selectively ablating a sexual zygote or embryo, the sexual zygotes or embryos are non-viable.

[0323] In other embodiments of the foregoing method pertaining to selectively ablating a sexual zygote or embryo, the non-sexual zygotes or embryos are viable.

[0324] In other embodiments of the foregoing method pertaining to selectively ablating a sexual zygote or embryo, one or both of the plants are defective for RdDM activity.

[0325] In other embodiments of the foregoing method pertaining to selectively ablating a sexual zygote or embryo, wherein one or both of the intein-split toxins are independently repressed.

[0326] In other embodiments of the foregoing method pertaining to selectively ablating a sexual zygote or embryo, wherein one or both of the intein-split toxins are independently activated.

[0327] In other embodiments of the foregoing method pertaining to selectively ablating a sexual zygote or embryo, wherein the inteins are regulated by chemical induction, chemical repression, chemical de-repression.

[0328] In other embodiments of the foregoing method pertaining to selectively ablating a sexual zygote or embryo, wherein the inteins are regulated by using a molecular or genetic switch.

[0329] In another embodiment, a plant is produced by one of the foregoing methods pertaining to selectively ablating a sexual zygote or embryo, comprising a transgenic plant defective for RdDM activity, enriched for asexual embryos, and lacking a sexual zygote, and wherein the plant comprises split inteins. In other embodiments, the plant is a dicot or monocot. In other embodiments, the plant is maize, rice, sorghum, sugarcane, barley, oat, wheat, turfgrass, soybean, canola, cotton, tobacco, sunflower, safflower, or alfalfa.

[0330] In another embodiment, a seed is produced from a plant is produced by one of the foregoing methods pertaining to selectively ablating a sexual zygote or embryo, comprising a transgenic plant defective for RdDM activity, enriched for asexual embryos, and lacking a sexual zygote, and wherein the plant comprises split inteins., wherein the seed is enriched for asexual embryos, lacks a sexual zygote, and wherein the plant comprises split inteins. In other embodiments, the seed is a dicot or monocot. In other embodiments, the seed is maize, rice, sorghum, sugarcane, barley, oat, wheat, turfgrass, soybean, canola, cotton, tobacco, sunflower, safflower, or alfalfa.

[0331] In another embodiment, a plant cell from a plant is produced by one of the foregoing methods pertaining to selectively ablating a sexual zygote or embryo, comprising a transgenic plant defective for RdDM activity, enriched for asexual embryos, and lacking a sexual zygote, and wherein the plant comprises split inteins. In other embodiments, the plant cell is a dicot or monocot. In other embodiments, the plant cell is maize, rice, sorghum, sugarcane, barley, oat, wheat, turfgrass, soybean, canola, cotton, tobacco, sunflower, safflower, or alfalfa.

[0332] In another embodiment, a seed population of a plant is enriched for asexual embryos and endosperm by a method comprising providing a plant comprising an asexual female gametophyte defective for RdDM activity, wherein the plant is disrupted for an activity that regulates endosperm development and wherein the seeds formed comprise parthenogenically-derived clonal embryos.

[0333] In another embodiment, a seed population comprising parthenogenically-derived clonal embryos of a plant is enriched for asexual embryos and endosperm by a method comprising fertilizing a sexual female gametophyte of a plant defective for RdDM activity with pollen from a plant disrupted for an activity that regulates endosperm development, wherein the plant is homozygous for a gene or mutation that leads to autonomous endosperm formation.

[0334] In another embodiment, a seed population comprising parthenogenically-derived clonal embryos of a plant is enriched for asexual embryos and endosperm by a method comprising: (a) fertilizing a sexual female gametophyte of a plant defective for RdDM activity with pollen from a plant disrupted for an activity that regulates endosperm development, wherein the plant is homozygous for a gene or mutation that leads to autonomous endosperm formation; (b) obtaining seeds from the cross; (c) germinating the seeds and growing the seeds into plants; and (d) allowing the plants to self-pollinate to obtain modulated RdDM plants that are homozygous for gene mutations that allow endosperm development without fertilization.

[0335] In other embodiments of the preceding methods comprising a seed population for asexual embryos and endosperm, autonomous endosperm development is induced in the plant.

[0336] In other embodiments of the preceding methods comprising a seed population for asexual embryos and endosperm, the seed is formed independent of fertilization.

[0337] In other embodiments of the preceding methods comprising a seed population for asexual embryos and endosperm, an activity that regulates endosperm development in the PRC2 complex is disrupted.

[0338] In other embodiments of the preceding methods comprising a seed population for asexual embryos and endosperm, the asexual female gametophyte is disrupted for activity in for CYCLIN DEPENDENT KINASE A, cdka, or MULTIPLE SUPPRESSOR OF IRA1 (MSI1) CUL4-DDB1, Fertilization Independent Embryo (FIE), Fertilization Independent Seed-1 (FIS1), Fertilization Independent Seed-1 (FIS2), or Fertilization Independent Seed-3 (FIS3).

[0339] In other embodiments of the preceding methods comprising a seed population for asexual embryos and endosperm, the plant comprises an element that disrupts CYCLIN DEPENDENT KINASE A, cdka, or MULTIPLE SUPPRESSOR OF IRA1 (MSI1) CUL4-DDB1, Fertilization Independent Embryo (FIE), Fertilization Independent Seed-1 (FIS1), Fertilization Independent Seed-1 (FIS2), or Fertilization Independent Seed-3 (FIS3) activity.

[0340] In other embodiments of the preceding methods comprising a seed population for asexual embryos and endosperm, an element is a mutation in CYCLIN DEPENDENT KINASE A, cdka, or MULTIPLE SUPPRESSOR OF IRA1 (MSI1) CUL4-DDB1, Fertilization Independent Embryo (FIE), Fertilization Independent Seed-1 (FIS1), Fertilization Independent Seed-1 (FIS2), or Fertilization Independent Seed-3 (FIS3).

[0341] In other embodiments of the preceding methods comprising a seed population for asexual embryos and endosperm, the element disrupts the formation or activity of the FERTILIZATION-INDEPENDENT SEED (FIS) complex.

[0342] In another embodiment, a plant enriched for asexual embryos and endosperm in the seed population, the plant being produced by the method comprising providing a plant comprising an asexual female gametophyte defective for RdDM activity, wherein the plant is disrupted for an activity that regulates endosperm development and wherein the seeds formed comprise parthenogenically-derived clonal embryos, wherein the plant comprises disrupted activity in the regulation of endosperm formation and an asexual female gametophyte disrupted in activity in the RdDM-pathway and seeds comprising clonal embryos.

[0343] In another embodiment, a plant enriched for asexual embryos and endosperm in the seed population, the plant being produced by the method comprising fertilizing a sexual female gametophyte of a plant defective for RdDM activity with pollen from a plant disrupted for an activity that regulates endosperm development, wherein the plant is homozygous for a gene or mutation that leads to autonomous endosperm formation, wherein the plant comprises disrupted activity in the regulation of endosperm formation and an asexual female gametophyte disrupted in activity in the RdDM-pathway and seeds comprising clonal embryos.

[0344] In another embodiment, a seed from a plant enriched for asexual embryos and endosperm in the seed population, the plant being produced by the method comprising providing a plant comprising an asexual female gametophyte defective for RdDM activity, wherein the plant is disrupted for an activity that regulates endosperm development and wherein the seeds formed comprise parthenogenically-derived clonal embryos, wherein the plant comprises disrupted activity in the regulation of endosperm formation and an asexual female gametophyte disrupted in activity in the RdDM-pathway and seeds comprising clonal embryos.

[0345] In another embodiment, a seed from a plant enriched for asexual embryos and endosperm in the seed population, the plant being produced by the method comprising fertilizing a sexual female gametophyte of a plant defective for RdDM activity with pollen from a plant disrupted for an activity that regulates endosperm development, wherein the plant is homozygous for a gene or mutation that leads to autonomous endosperm formation, wherein the plant comprises disrupted activity in the regulation of endosperm formation and an asexual female gametophyte disrupted in activity in the RdDM-pathway and seeds comprising clonal embryos.

[0346] In any of the foregoing embodiments, the plant defective for RdDM activity for a nucleic acid having at least 100% identity to the full length of a nucleic acid of any the nucleotide sequences set forth in Table 1, or a fragment, complement, or combination thereof. In still other embodiments, the plant defective for RdDM activity for a nucleic acid having at least 90% identity to the full length of a nucleic acid of any the nucleotide sequences set forth in Table 1, or a fragment, complement, or combination thereof. In yet other embodiments, the plant defective for RdDM activity for a nucleic acid having at least 80% identity to the full length of a nucleic acid of any the nucleotide sequences set forth in Table 1, or a fragment, complement, or combination thereof. In even other embodiments, the plant defective for RdDM activity for a nucleic acid having at least 70% identity to the full length of a nucleic acid of any the nucleotide sequences set forth in Table 1, or a fragment, complement, or combination thereof.

[0347] In any of the foregoing embodiments, the plant defective for RdDM activity for a nucleic acid having at least 100% identity to the full length of a nucleic acid of any the nucleotide sequences set forth in SEQ ID NOs: 1-64, 100-230, 300-365, 399-541, 616-708, 757-820, 853-911, or 942-980, or a fragment, complement, or combination thereof. In still other embodiments, the plant defective for RdDM activity for a nucleic acid having at least 90% identity to the full length of a nucleic acid of any the nucleotide sequences set forth in SEQ ID NOs: 1-64, 100-230, 300-365, 399-541, 616-708, 757-820, 853-911, or 942-980, or a fragment, complement, or combination thereof. In yet other embodiments, the plant defective for RdDM activity for a nucleic acid having at least 80% identity to the full length of a nucleic acid of any the nucleotide sequences set forth in SEQ ID NOs: 1-64, 100-230, 300-365, 399-541, 616-708, 757-820, 853-911, or 942-980, or a fragment, complement, or combination thereof. In even other embodiments, the plant defective for RdDM activity for a nucleic acid having at least 70% identity to the full length of a nucleic acid of any the nucleotide sequences set forth in SEQ ID NOs: 1-64, 100-230, 300-365, 399-541, 616-708, 757-820, 853-911, or 942-980, or a fragment, complement, or combination thereof.

[0348] In any of the foregoing embodiments, the plant defective for RdDM activity for a polypeptide having at least 100% identity to the full length of a polypeptide of any of the amino acid sequences set forth in Table 1, or a fragment, complement, or combination thereof. In still other embodiments, the plant defective for RdDM activity for a polypeptide having at least 90% identity to the full length of a polypeptide of any of the amino acid sequences set forth in Table 1, or a fragment, complement, or combination thereof. In yet other embodiments, the plant defective for RdDM activity for a polypeptide having at least 80% identity to the full length of a polypeptide of any of the amino acid sequences set forth in Table 1, or a fragment, complement, or combination thereof. In even other embodiments, the plant defective for RdDM activity for a polypeptide having at least 70% identity to the full length of a polypeptide of any of the amino acid sequences set forth in Table 1, or a fragment, complement, or combination thereof.

[0349] In any of the foregoing embodiments, the plant defective for RdDM activity for a polypeptide having at least 100% identity to the full length of a polypeptide of any of the amino acid sequences set forth in SEQ ID NOs: 65-99, 231-299, 366-398, 542-615, 709-756, 821-852, 912-941, or 981-1005, or a fragment, complement, or combination thereof. In still other embodiments, the plant defective for RdDM activity for a polypeptide having at least 90% identity to the full length of a polypeptide of any of the amino acid sequences set forth in SEQ ID NOs: 65-99, 231-299, 366-398, 542-615, 709-756, 821-852, 912-941, or 981-1005, or a fragment, complement, or combination thereof. In yet other embodiments, the plant defective for RdDM activity for a polypeptide having at least 80% identity to the full length of a polypeptide of any of the amino acid sequences set forth in SEQ ID NOs: 65-99, 231-299, 366-398, 542-615, 709-756, 821-852, 912-941, or 981-1005, or a fragment, complement, or combination thereof. In even other embodiments, the plant defective for RdDM activity for a polypeptide having at least 70% identity to the full length of a polypeptide of any of the amino acid sequences set forth in SEQ ID NOs: 65-99, 231-299, 366-398, 542-615, 709-756, 821-852, 912-941, or 981-1005, or a fragment, complement, or combination thereof.

[0350] In any of the foregoing embodiments, the plant defective for RdDM activity for AGO4 (ARGONAUTE 4), AGO6 (ARGONAUTE 6), AGO8 (ARGONAUTE 8), AGO9 (ARGONAUTE 9), CMT3 (CHROMOMETHYLASE 3), DCL3 (DICER-LIKE 3), DRM2 (DOMAINS REARRANGED METHYLASE 2), EXS1 (EXTRA SPOROGENOUS CELLS1), IDN2 (INVOLVED IN DE NOVO 2), MET1 (METHYL TRANSFERASE 1), NPRD1a (NUCLEAR POLYMERASE D 1a), NRPD1b (NUCLEAR POLYMERASE D 1b), NRPD2 (NUCLEAR POLYMERASE D 2), NRPE1 (NUCLEAR RNA POLYMERASE E 1), NRPE2 (NUCLEAR RNA POLYMERASE E 2), RDR2 (RNA-DEPENDENT RNA POLYMERASE 2), RDR6 (RNA-DEPENDENT RNA POLYMERASE 6), SGS3 (SUPPRESSOR OF GENE SILENCING 3), SUVH2 (SUPPRESSOR OF VARIEGATION 3-9 HOMOLOG 2), and SUVH9 (SUPPRESSOR OF VARIEGATION 3-9 HOMOLOG 9). In other embodiments, the AGO4 allele is ago4-6 or ago4-1. In still other embodiments, the AGO6 allele is ago6-2. In yet other embodiments, the AGO9 allele is 9-2, 9-3 or 9-4. In other embodiments, the AGO8 allele is ago 8-1. In still other embodiments, the RDR2 allele is rdr2-1. In yet other embodiments, the RDR6 allele is rdr6-15 or rdr6-11. In other embodiments, the SGS3 allele is sgs3-11. In still other embodiments, the DRM2 allele is drm2-2. In yet other embodiments, the MET1 allele is met1-7.

[0351] In any of the foregoing embodiments, the plant defective for RdDM activity has an insertion, deletion, substitution or mutation of one or more nucleotides that makes RdDM activity defective.

[0352] In any of the foregoing embodiments, the plant defective for RdDM activity has an insertion, deletion, substitution or mutation that is introduced using CRISPR technology.

[0353] In any of the foregoing embodiments, the RdDM activity is silenced in the plant defective for RdDM activity.

[0354] In any of the foregoing embodiments, the RdDM activity is silenced in the plant defective for RdDM activity, and the RdDM activity is silenced using an element selected from the group consisting of antisense, RNAi, and hairpin molecules directed to a nuclear gene or promoter conferring RdDM activity.

[0355] In any of the foregoing embodiments, the RdDM activity is silenced in the plant defective for RdDM activity, and the RdDM activity is silenced using a promoter inverted repeat targeting the promoter driving a nuclear gene or promoter conferring RdDM activity.

[0356] In any of the foregoing embodiments, the plant defective for RdDM activity is male-sterile.

[0357] In any of the foregoing embodiments, the maternal plan is unable to self-pollinate.

[0358] In any of the foregoing embodiments, the maternal plan is unable to self-pollinate, and the maternal plant's ability to self-pollinate is disrupted physically, chemically or genetically.

[0359] In any of the foregoing embodiments, the methods described therein further comprise sorting the seeds comprising parthenogenically-derived clonal embryos based on phenotype or genotype.

[0360] In any of the foregoing embodiments, the methods therein described further comprise sorting the seeds comprising parthenogenically-derived clonal embryos based on phenotype, wherein the phenotype comprises size, shape, color, or a combination thereof of the seeds.

[0361] In any of the foregoing embodiments, the methods therein described further comprise sorting the seeds comprising parthenogenically-derived clonal embryos based on phenotype or genotype, and wherein the sorting is done visually.

[0362] In any of the foregoing embodiments, the methods described therein further comprise selecting for seeds comprising parthenogenically-derived clonal embryos.

[0363] In any of the foregoing embodiments, the methods described therein further comprise selecting for seeds comprising parthenogenically-derived clonal embryos from seeds not comprising parthenogenically-derived clonal embryos.

[0364] In any of the foregoing embodiments, the methods described therein further comprise sorting the seeds comprising parthenogenically-derived clonal embryos based on phenotype or genotype, and wherein the sorting is manual, semi-automated, or automated.

[0365] In any of the foregoing embodiments, the methods described therein further comprise sorting the seeds comprising parthenogenically-derived clonal embryos based on phenotype or genotype; wherein the sorting is automated; and wherein the automated sorting comprises a machine comprising an optical detector.

[0366] In any of the foregoing embodiments, the methods described therein further comprise sorting the seeds comprising parthenogenically-derived clonal embryos based on the absence of a paternal-inherited trait or marker in the seeds.

[0367] In any of the foregoing embodiments, the methods described therein further comprise determining the number of seeds comprising parthenogenically-derived clonal embryos.

[0368] In any of the foregoing embodiments, the methods described therein further comprise determining the number of viable seeds comprising parthenogenically-derived clonal embryos.

[0369] In any of the foregoing embodiments, the plant defective for RdDM activity is a dicot or monocot.

[0370] In any of the foregoing embodiments, the plant defective for RdDM activity is maize, rice, sorghum, sugarcane, barley, oat, wheat, turfgrass, soybean, canola, cotton, tobacco, sunflower, safflower, or alfalfa.

[0371] In another embodiment, an isolated or recombinant polynucleotide comprising a nucleic acid selected from the group consisting of: (a) a nucleic acid having at least 100% identity to the full length of a nucleic acid of any the nucleotide sequences set forth in Table 1; (b) a nucleic acid having at least 90% identity to the full length of a nucleic acid of any of the nucleotide sequences set forth in Table 1; (c) a nucleic acid having at least 80% identity to the full length of a nucleic acid of any of the nucleotide sequences set forth in Table 1; (d) a nucleic acid having at least 70% identity to the full length of a nucleic acid of any of the nucleotide sequences set forth in Table 1; and (e) any fragments, complements or combinations thereof.

[0372] In another embodiment, an isolated or recombinant polynucleotide comprising a nucleic acid selected from the group consisting of: (a) a nucleic acid having at least 100% identity to the full length of a nucleic acid of any the nucleotide sequences set forth in SEQ ID NOs: 1-64, 100-230, 300-365, 399-541, 616-708, 757-820, 853-911, or 942-980; (b) a nucleic acid having at least 90% identity to the full length of a nucleic acid of any of the nucleotide sequences set forth in SEQ ID NOs: 1-64, 100-230, 300-365, 399-541, 616-708, 757-820, 853-911, or 942-980; (c) a nucleic acid having at least 80% identity to the full length of a nucleic acid of any of the nucleotide sequences set forth in SEQ ID NOs: 1-64, 100-230, 300-365, 399-541, 616-708, 757-820, 853-911, or 942-980; (d) a nucleic acid having at least 70% identity to the full length of a nucleic acid of any of the nucleotide sequences set forth in SEQ ID NOs: 1-64, 100-230, 300-365, 399-541, 616-708, 757-820, 853-911, or 942-980; and (e) any fragments, complements or combinations thereof.

[0373] In another embodiment, an isolated or recombinant polypeptide comprising an amino acid sequence selected from the group consisting of: (a) a polypeptide having at least 100% identity to the full length of a polypeptide of any of the amino acid sequences set forth in Table 1; (b) a polypeptide having at least 90% identity to the full length of a polypeptide of any of the amino acid sequences set forth in Table 1; (c) a polypeptide having at least 80% identity to the full length of a polypeptide of any of the amino acid sequences set forth in Table 1; (d) a polypeptide having at least 70% identity to the full length of a polypeptide of any of the amino acid sequences set forth in Table 1; and (e) and any fragments, complements or combinations thereof.

[0374] In another embodiment, an isolated or recombinant polypeptide comprising an amino acid sequence selected from the group consisting of: (a) a polypeptide having at least 100% identity to the full length of a polypeptide of any of the amino acid sequences set forth in SEQ ID NOs: 65-99, 231-299, 366-398, 542-615, 709-756, 821-852, 912-941, or 981-1005; (b) a polypeptide having at least 90% identity to the full length of a polypeptide of any of the amino acid sequences set forth in SEQ ID NOs: 65-99, 231-299, 366-398, 542-615, 709-756, 821-852, 912-941, or 981-1005; (c) a polypeptide having at least 80% identity to the full length of a polypeptide of any of the amino acid sequences set forth in SEQ ID NOs: 65-99, 231-299, 366-398, 542-615, 709-756, 821-852, 912-941, or 981-1005; (d) a polypeptide having at least 70% identity to the full length of a polypeptide of any of the amino acid sequences set forth in SEQ ID NOs: 65-99, 231-299, 366-398, 542-615, 709-756, 821-852, 912-941, or 981-1005; and (e) and any fragments, complements or combinations thereof.

[0375] In another embodiment, an expression cassette comprising an element operably linked to a heterologous promoter, that when element is expressed silences a nucleic acid selected from the group consisting of: (a) a nucleic acid having at least 100% identity to the full length of a nucleic acid of any the nucleotide sequences set forth in Table 1; (b) a nucleic acid having at least 90% identity to the full length of a nucleic acid of any of the nucleotide sequences set forth in Table 1; (c) a nucleic acid having at least 80% identity to the full length of a nucleic acid of any of the nucleotide sequences set forth in Table 1; (d) a nucleic acid having at least 70% identity to the full length of a nucleic acid of any of the nucleotide sequences set forth in Table 1; and (e) any fragments, complements or combinations thereof.

[0376] In another embodiment, an expression cassette comprising an element operably linked to a heterologous promoter, that when element is expressed silences a nucleic acid selected from the group consisting of: (a) a nucleic acid having at least 100% identity to the full length of a nucleic acid of any the nucleotide sequences set forth in SEQ ID NOs: 1-64, 100-230, 300-365, 399-541, 616-708, 757-820, 853-911, or 942-980; (b) a nucleic acid having at least 90% identity to the full length of a nucleic acid of any of the nucleotide sequences set forth in SEQ ID NOs: 1-64, 100-230, 300-365, 399-541, 616-708, 757-820, 853-911, or 942-980; (c) a nucleic acid having at least 80% identity to the full length of a nucleic acid of any of the nucleotide sequences set forth in SEQ ID NOs: 1-64, 100-230, 300-365, 399-541, 616-708, 757-820, 853-911, or 942-980; (d) a nucleic acid having at least 70% identity to the full length of a nucleic acid of any of the nucleotide sequences set forth in SEQ ID NOs: 1-64, 100-230, 300-365, 399-541, 616-708, 757-820, 853-911, or 942-980; and (e) any fragments, complements or combinations thereof.

### EXAMPLES

[0377] The following examples describe selected aspects and embodiments of the present disclosure, such as exemplary methods of generating and using maternal plants that produce clonal seeds, methods of distinguishing clonal seeds/progeny from sexually-generated seeds/progeny, and methods of obtaining clonal seeds/progeny from a mixture/set of clonal seeds/progeny and sexually-generated seeds/progeny, among others. The examples are presented for illustration only and are not intended to define or limit the scope of the present disclosure.

### Example 1: Single Gene Mutations in Arabidopsis

[0378] Single Gene Mutations Causing Self-propagated Asexual Reproduction Through Seeds (Apomixis) in Arabidopsis Description—This example presents experimental results demonstrating the ability to clone a maternal plant through seeds. Results—Previous results showed that dominant mutations in ARGONAUTE9 (AGO9) and RNA-DEPENDENT RNA POLYMERASE6 (RDR6) lead to differentiation of multiple female gametic cells that are able to initiate gametogenesis without undergoing meiosis by a mechanism reminiscent of apospory, a specific type of apomixis (Olmedo-Monfil et al., 2010; Duran-Figueroa and Vielle-Calzada, 2010). This phenotype was also found in mutants of the RNA-dependent DNA methylation (RdDM) pathway such as RNA-DEPENDENT RNA POLYMERASE2 (RDR2) and DICER-LIKE3 (DCL3). Mutations in the 24-nucleotide small RNA binding protein ARGONAUTE4 (AGO4), that is also a key member of the RdDM pathway required for de novo DNA methylation of heterochromatic regions (Law and Jacobsen, 2010), show an equivalent phenotype. Plants heterozygous for ago4-1 or ago4-6 were fertile and did not show signs of seed abortion; however, they showed pre-meiotic ovules with enlarged sub-epidermal cells containing a conspicuous nucleus, and at later developmental stages, several developing female gametophytes ectopically growing at both the micropylar and chalazal regions of the ovule (FIG. 1 and FIG. 6). A complete list of mutants identified as showing these ectopic female gametophytes reminiscent of apospory is provided in FIG. 25. To determine if defects in these mutants could lead to the formation of viable diploid female gametes, heterozygous rdr6-15, ago4-1, and ago9-3 individuals were crossed to wild-type pollen and ploidy levels in the resulting progeny were determined. For all three mutants crossed as a female parent, triploid individuals were recovered at frequencies ranging between 11.3 and 17.1% (FIG. 1), indicating that plants defective in RDR6, AGO4 and AGO9 may form triploid embryos resulting from the fertilization of a diploid female gamete by a haploid sperm cell.

### Example 2: Pistillata Plant Analysis

[0379] To determine if female gametes in some of these mutants are capable of initiating autonomous development of either an embryo or the endosperm, fully male sterile pistillata (pi) plants that completely lack stamens were crossed to homozygous ago4-1 or rdr6-15 individuals, and generated a corresponding F2 population. Previous reports showed that fertilized ovules of pi individuals develop into seeds, but unfertilized ovules remain small and eventually shrivel (Chaudhury et al., 1997). To avoid any cross-pollination, each F2 individual was genotyped before flowering and 79 pi rdr6-15/+, and 122 pi ago4-1/+ or pi ago4-1/ago4-1 diploid plants that were grown to maturity in full isolation from any source of pollen were identified. In contrast to ago4 for which homozygous pi ago4-1 individuals could be recovered, all rdr6-15 F2 segregants showing the pi phenotype were heterozygous for the rdr6-15 allele, a result indicating a male gametophytic lethal effect or a prevalence of clonal seeds. Because the elongation of individual siliques—presumed to be indicative of seed initiation (Ohad et al., 1996; Chadhury et al., 1997)-was not observed in any male sterile individual showing the pi phenotype, each consecutive developing silique was manually dissected from a group of selected pi rdr6-15/+ stems, scoring the number of developing seeds that showed significant enlargement and prevalent turgidity when compared to unfertilized ovules, a morphology comparable to the seeds developing after pollination of the pi plants. No reversion of the pi phenotype was observed in any of the individuals grown to maturity. Strikingly, pi rdr6-15/+ siliques showed an unusual frequency of developing seeds at stages when most ovules present in unpollinated gynoecia of pi control plants have collapsed (FIG. 2A to 2D and FIG. 8). Most of these developing seeds grow and persist for several days without showing dehydration or shriveling. The phenotype was consistently observed in individuals from both F2 and F3 generations. A detailed observation of whole-mount cleared developing seeds showed the presence of free nuclei in the central cell and a developing embryo at the micropylar region, confirming that these plants do initiate the formation of both an embryo and its companion endosperm (FIGS. 2E and 2G). To determine if some of these developing seeds reach maturity, ten diploid F2 and ten F3 individuals showing the pi phenotype and carrying mutations in either rdr6-15 or ago4-1 were systematically harvested and searched for phenotypic evidence of seed formation by manually dissecting each independent silique at maturity. Strikingly, whereas progeny was completely absent in pi controls, all individuals carrying rdr6-15 or ago4-1 mutations produced a variable number of phenotypically normal mature seeds. For pi rdr6-15/+ individuals, the number of seeds per plant ranged between 11 and 125, whereas pi ago4-1/+ and pi ago4-1/ago4-1 plants produced between 10 and 293 seeds per plant, with no clear quantitative distinction between both genotypes or a specific generation (FIG. 5 and FIGS. 13A and 13B).

[0380] To determine if this autonomous formation of seeds is the result of a genetic interaction of pi with rdr6-15 and/or ago4-1, or if this phenotype is also present in single gene mutants involved in the RdDM pathway, immature flowers of rdr6-15/+, ago4-6/ago4-6 and ago9-2/ago9-2 individuals were emasculated, and resulting gynoecia were cytologically analyzed seven days after emasculation (dae). As in the case of plants showing the pi phenotype, the number of developing seeds that showed significant enlargement and prevalent turgidity compared to neighboring unfertilized ovules were quantified (FIG. 7A to 7F, FIGS. 16C; and 17A to 17C). In the case of twelve rdr6-15/+ individuals analyzed (116 emasculated flowers), the average percentage of seeds developing without pollination at seven dae was 26.39% (n=5849); in the case of six ago4-6/ago4-6 individuals (68 emasculated flowers), this same average was 37.93% (n=3200); and in the case of eight agog-2/agog-2 individuals (103 emasculated flowers), the average was 67.96% (n=4792; FIGS. 9-12). The cytological analysis of some of these seeds confirmed that in most cases they contain a developing embryo and endosperm with morphologies equivalent to wild-type (FIGS. 8 to 12; FIG. 3A to 3I and FIG. 18A to 18C). In a handful of cases, mature defective or normal seeds were recovered for all three mutants (FIG. 19A to 19D). Whole-mounted cleared specimens showed that non-fertilized ovules exhibit cytological evidence of seed coat initiation in the endothelial layer (FIG. 20A to 20C). Fertilization of a wild-type female gametophyte triggers the accumulation of proanthocyanidin pigments in the endothelium cell layer, which may be detected as a red stain by a vanillin assay (Debeaujon et al., 2003). In contrast to control unpollinated pistils, autonomously developing seeds showed red staining deposits in the endothelium, confirming that endosperm formation is activated (FIG. 21A to 21E). Many seeds developing in the absence of fertilization contained free nuclei in the central cell, reminiscent of normal endosperm development (FIG. 22A to 22C); for all three mutants the highest percentage was found at 7 dae (FIG. 23). Sporadically, developing seeds exhibited an early embryo (FIG. 24A to 24D). Finally, the analysis of non-pollinated siliques that reached full maturity revealed that all three genotypes are able to form viable seeds that germinate and give rise to diploid plants that are fertile. These results demonstrated that plants defective in RDR6, AGO4 or AGO9 may produce viable and fertile seeds in the absence of pollination.

[0381] When germinated, seeds recovered from unpollinated pi rdr6-15/+, pi ago4-1/+, and pi ago4-1/ago4-1 individuals gave rise to diploid plants showing the pi phenotype. In the case of pi rdr6-15/+, the genetic background of the parental genotypes differed (pi is in a Landsberg erecta ecotype, whereas rdr6-15 is in Columbia-0), the chromosomal constitution of F3 individuals could be compared to the chromosomal constitution of their diploid progeny generated in the absence of pollination. In the case of ago4/+, a cross to Columbia-0 individuals allowed the establishment of ecotype heterozygosity to precede the subsequent generation of the pi ago4 individuals that were used for genotyping. To this aim, a collection of 89 molecular markers (SSLPs and CAPS) that recognize previously characterized allelic polymorphisms that distinguish both ecotypes across all five Arabidopsis chromosomes were used (Bell and Ecker, 1994; Cho et al., 1999; Lukowitz et al., 2000). Among 17 diploid F3 rdr6-15/+ individuals tested, 9 retained the heterozygosity and genotype of their mother at all tested loci and in all five chromosomes, and 8 were nearly clonal as they showed a single-locus polymorphism at different genomic locations (FIGS. 14 and 15). In the case of 13 diploid F3 ago4/+ individuals genotyped, 7 retained the heterozygosity and genotype of their mother at all tested loci and in all five chromosomes, and 5 were nearly clonal as they showed a single-locus polymorphism at different genomic locations (FIGS. 14 and 15). These results demonstrate that these two independent mutants may consistently produce clonal seeds.

[0382] The results show that self-propagated asexual reproduction through seeds may be induced in Arabidopsis by single mutations affecting genes involved in RNA-dependent DNA methylation, a discovery indicating that transcriptional repression of repetitive genomic regions, most often associated with heterochromatin, is essential for avoiding both ectopic gamete formation and the autonomous parthenogenetic activation of gametic cells (the egg and central cell). The mechanism uncovered is highly reminiscent of autonomous apomixis of the aposporous type, a phenomenon naturally occurring in flowering species of the genus Lamprothyrsus, and Hieracium (Bicknell et al., 2000). The frequency of autonomous initiation of seed development is superior to the frequency at which viable asexual seeds are recovered in the absence of pollination for both rdr6-15 and ago4-1. Non-pollinated siliques often contain seeds showing a multicellular embryo in the absence of free nuclear proliferation of the endosperm that eventually collapse, indicating that fertilization of the central cell might be necessary for the formation of viable asexual seeds by a mechanism reminiscent of pseudogamy in natural apomicts (Nogler, 1984). The results indicate the induction of self-propagated asexual reproduction through seeds by altering the activity of a single gene in cultivated crops.

### Example 3: Arabidopsis Plant Material Analysis

[0383] Arabidopsis thaliana seeds of rdr6-15 (SAIL 34_G10), ago4-1 (CS6364), ago4-6 (SALK_071772), ago9-2 (SALK_11205), and ago9-3 (SAIL_34_G10) were germinated in Murashige and Skoog (MS) medium supplied with either kanamycin (50 ug/ul) or ppt (10 u/ul) and germinated in a growth chamber under short day conditions (16 hr light/8 hr dark) at 25° C. Seedlings were then transplanted to soil and grown in a greenhouse at 21° C.

### Example 4: Genetic Analysis and Flow Cytometry

[0384] i. Plant Growth

[0385] Adult double and single mutant individuals (pi rdr6, rdr6, pi ago4, ago4, and ago9) were classified according to developmental stage, and siliques were numbered according to their sequential position in primary stems. The first flower that had fully lost additional floral organs was tagged as Silique #1, and subsequent older siliques were given a consecutive number. Individual siliques were dissected under a Leica stereomicroscope and scored for ovule abortion and developing seed formation. In the case of individuals showing a pistillata phenotype, all fully mature siliques were individually and systematically analyzed at maturity but before dehiscence with the help of magnifying glasses, keeping a register of the position of siliques containing at least one seed, and the number of seeds per silique. In the case of emasculated single mutant individuals, 3 to 4 immature flowers were emasculated before maturity, eliminating all stamens and floral organs except the gynoecium. Seven days after emasculation, each silique was dissected under a stereo-microscope and scored for aborted ovules and developings seeds.

[0386] For flow cytometry, developing cauline leaves were used for all plants and processed as described in Dolezel et al 2007. DNA content was estimated with a PARTEC CUBE flow cytometer. Results of these methods are provided in FIGS. 2D, 5, 8, 9, 10, 11, 12, 13, 17C, 18D, and 19D.

[0387] ii. Whole-Mount Preparations and Histological Analysis

[0388] Developing siliques from wild-type, mutant or transformant lines were dissected longitudinally with hypodermic needles (1-mL insulin syringes; Becton Dickinson) and either fixed with FAA buffer (50% ethanol, 5% acetic acid, and 10% formaldehyde), dehydrated in increasing ethanol concentration, and cleared in Herr's solution (phenol:chloral hydrate:85% lactic acid:xylene:oil of clove [1:1:1:0.5:1]); or directly cleared in a drop of Hoyer's solution as previously described (Vielle-Calzada et al., 2000). For advanced stages of seed formation, seeds were punctuated to release the embryo; cleared seeds were observed in a Leica microscope (Wetzlar, Germany) under Nomarski optics. For vanillin staining, ovules and seeds were dissected from pistils and siliques, respectively, and incubated in an acidic solution (6 N HCl) of 1% (w/v) vanillin (Sigma-Aldrich) at room temperature (Aastrup et al., 1984), and mounted in a drop of glycerol. Vanillin reacts in the presence of proanthocyanidins that specifically accumulate in the endothelium layer of the seed coat, generating a red product (Debeauj on et al., 2003). Results of these methods are provided in FIG. 2D to 2G, 3A to 3I, 6A and 6B, 18A to 18C, 20A to 20C, 21A to 21E, 22A to 22C, and 24A to 24D)

[0389] iii. Molecular Genetic Analysis

[0390] DNA extractions were performed as decribed in Vielle-Calzada et al., 1999; 1 μl of DNA was used for PCR amplification with 2 mM MgCl2, 0.2 mM of each dNTP, 1 U of Taq DNA polymerase (Invitrogen), 13 μL PCR buffer, and 20 pmol of each primer for 30 cycles at a variable annealing temperature depending on the marker as described for microsatellite markers and primer sequences obtained from TAIR (arabidopsis.org). Results of these methods are included in FIGS. 4, 14, and 15.

[0391] iv. Genotyping

[0392] Seeds from all F3 individuals for both pi rdr6/+ and pi ago4/+ genotypes were germinated under growth chamber under short day conditions (16 hr light/8 hr dark) at 25° C. and total DNA extractions were conducted at rosette stage. Single nucleotide polymorphism (SNP) was obtained using a uniplex SNP genotyping platform for Kompetitive Allele Specific PCR (KASP), a global benchmark technology commercially provided by LGC Genomics (Beverly Mass. USA). Results of this method are provided in FIGS. 14 and 15.

### Example 5: Exemplary Embryo Markers and Exemplary Gametocides

[0393] Corn-Maize: An Embryo Marker for Detecting Monoploids of Maize (Zea Mays L.) D. K. Nanda and S. S. Chase

[0394] The use of an embryo marker of commercial value for detecting monoploids of maize is described. This system utilizes a male parent called the Purple Embryo Marker (b pl A C Rnj:Cudu or Pwf) which produces a deep purple pigment in the embryo and red or purple aleurone color in the endosperm. Kernels of a marked progeny which do not exhibit purple color in the embryo but do have red or purple aleurone pigment are saved for the putative monoploid embryos contained. In this study, nine single crosses of commercial value were pollinated with the Purple Embryo Marker slock. Of the 194, 157 kernels classified, it was possible to discard more than 98% before germination, from 1-rom the kernels with putative monoploids 201 actual monoploids were realized. Purple Embryo Marker: produces a deep purple pigment in the embryo. Nanda D K and Chase S S. 1966. An embryo marker for detecting monoploids of maize. Crop Science Vol. 6 (2): 213-215.

[0395] Rice: Rod—marks the epidermal layer of the embryo. Kamiya N Nishimura A Sentoku N Takabe Nagato H Matsuoka M. 203. Rice globular embryo4 (gle4) mutant is defective in radial pattern formation during embvryogenesis. Plant Cell Physiology 44(9): 875-83

[0396] REE5 and REE8—only expressed in the whole embryo

[0397] Reference: Kikuchi K, Chung C S Yoshida K. 1998. Isolation and Analysis of New Molecular Embryogenesis in Rice (Oryza sativa L.). Plant Biotechnology 15(2):77-81. goliath—embryo size marker, the mutation makes the embryos larger

[0398] Reference:

[0399] Kawakatsu T Taramino G Itoh J allen J Sato Y Hong S K Yule R Nagasawa N goliath—embryo size marker, the mutation makes the embryos larger

[0400] Reference: Kawakatsu T Taramino G Itoh J allen J Sato Y Hong S K Yule R Nagasawa N Kojima M Kusaba M Sakakibara H Sakai H Nagato Y. 2009.

[0401] PLASTROCHRON3/GOLIATH encodes a glutamate carboxypeptidase required for proper development in rice. Plant Journal 58(6):1028-1040

[0402] Wheat:

[0403] Anthocyanin purple pigment

[0404] Reference: K. M. Doshi, F. Eudes, A. Laroche, and D. Gaudet. 2007. Anthocyanin expression in marker free transgenic wheat and triticale embryos. Vitro Cellular and Developmental Biology-Plant, 43(5):429-435

[0405] Sorghum:

[0406] Promoter pPZP201 fused to GFP as a reporter gene

[0407] Reference: Gurel S Gurel E Miller t Lemaux P G. 2012. Agrobacterium-Mediated Transformation of Sorghum bicolor Using Immature Embryos. In Transgenic Plants; Methdos and Protocols Series No. 847: 109-122

[0408] Sunflower:

[0409] p35CaMV::uida fusion

[0410] Reference: Burrus M Molinier J Himber C Hunold R Bronner R Rousselin P Hahne G. 1996. Agrobacterium-mediated transformation of sunflower (Helianthus annuus L.) shoot apices: transformation patterns. Molecular Breeding 2;329-338.

[0411] Coffee:

[0412] p35CaMV::GFP fusion

[0413] Reference: Mishra M Devi S McCormac Scott N Chen D Elliott M Slater A. 2010. Green fluorescent protein as a visual slection marker for coffee transformation. Biologia 65:639-646.

[0414] Faba bean:

[0415] Natural mutation it-1—Green cotyledons.

[0416] Reference: G. Duc 1, F. Moussy 1, X. Zong2, G. Ding. 1999. Single gene mutation for green cotyledons as a marker for the embryonic genotype in faba bean, Vicia faba. Plant Breeding 118 (6):577-578.

[0417] Arabidopsis:

[0418] ET1275—Encodes a COP1-interacting protein named CIP8.

[0419] ET1278—Encodes a isoflavone reductase homolog.

[0420] Reference: Vielle-Calzada Jp, Baskar R, and Grossniklaus U. 2000. Delayed activation of the paternal genome during seed development. Nature 404: 91-94.

[0421] Plant Gametocides

[0422] maleic hydrazide (MH)

[0423] WITTWER, S. H., and HILLYER, I. G., 1954. Chemical induction of male sterility in Cucurbits. Science, 120, 893-894.

[0424] 2,4-dichloropheno-xyacetic acid (2,4-D)

[0425] REHM, S., 1952. Male sterile plants by chemical treatment. Nature 170, 38-39.

[0426] a-naphthalene acetic acid (NAA)

[0427] LAIBACH, F., and KRIBBBN, F. J., 1950. Der Einfluss von Wuchsstoff auf die Blutenbildung der Gurke. Naturwuienschaften 37, 114.

[0428] ri-iodobenoic acid (TIBA)

[0429] ATON, F. M., 1957. Selective gametocide opens way to hybrid cotton. Science, 1174-1175

[0430] Additional references to gametocides are found herein below.

### Example 6: Creation of Hybrid Male-Sterile Progeny with Seeds Comprising Parthenogenically-Derived Clonal Embryos

[0431] In this example, a male-sterile inbred is heterozygous for a dominant sterility gene, homozygous for an unlinked gene conferring defective RdDM activity, and hemizygous for a construct that comprises (1) a suppression element, for example an inverted repeat (IR) engineered to the promoter controlling expression of the dominant male-sterile gene or the coding region encoding the dominant male-sterile gene; and (2) a pollen ablation gene which results in disruption of the formation, function, or dispersal of pollen; and optionally (3) a marker gene, which may be a seed color gene. The suppression element disrupts expression of the dominant male-sterile gene, such that the otherwise male-sterile plant is male-fertile and can be selfed. Because the ablation gene prevents linked transgene transmission through pollen, any resulting sexually derived progeny will segregate 50:50 with respect to the hemizygous construct and 25% of the sexually derived progeny will be homozygous for the dominant male-sterility gene and 100% of all progeny will be homozygous for the gene conferring defective RdDM activity. Seeds comprising the parthenogenically-derived clonal embryos can be determined as described elsewhere herein. Seeds containing the construct can be identified by presence of the marker. Progeny plants from the seed can be genotyped to identify homozygous dominant male-sterile progeny with the construct and homozygous for the gene conferring defective RdDM activity; these plants are collectively referred to as the maintainer line (or “transgenic maintainer” line). Progeny homozygous for the dominant male-sterile gene, and homozygous for the gene conferring defective RdDM activity without the construct are collectively referred to as the male sterile female inbred (or “male-sterile inbred” line).

[0432] The male-sterile inbred comprising seed with parthenogenically-derived clonal embryos can be increased by crossing the maintainer line onto male sterile inbred lines. The resulting clonal and sexually derived progeny are homozygous dominant male-sterile female inbreds, homozygous for the genes defective for RdDM activity, because the maintainer construct is not passed through pollen to progeny. In this way the transgenic maintainer line is used to maintain, propagate, or increase male sterile plants comprising seed with parthenogenically-derived clonal embryos.

[0433] In a hybrid production cross, the male inbred crosses normally onto this male-sterile inbred line, and no emasculation is required. However, because the dominant sterility gene is a dominant male-sterile gene and is homozygous in the female inbred, 100% of the hybrid seed will contain one dominant male-sterile allele and one gene defective for RdDM activity, and plants produced from those seed will be male-sterile.

[0434] In some embodiments, rather than being homozygous for a gene conferring defective RdDM activity, the inbred is homozygous for a second construct, wherein the second construct comprises an inducible promoter operably linked to a second suppression element that disrupts expression of a gene conferring RdDM activity. The second suppression element may be an inverted repeat (IR) engineered to the promoter controlling expression of the gene conferring RdDM activity or to the coding region of the gene conferring RdDM activity. The second suppression element may be an artificial microRNA. The second element may confer genetic, epigenetic, post-transcriptional or post-translational modifications. At the appropriate stage, the inbred or its hybrid progeny can be treated with an inducer to suppress RdDM activity, in order to facilitate clonal seed production. In other embodiments, RdDM activity and/or male fertility is controlled using CAS9/CRISPR technology. In other embodiments, suppression is activated by crossing two parent plants containing complimentary components for suppression induction (see, for example, patent application publication #US20120266324).

### Example 7: Dominant Male Sterility in Hybrids

[0435] A dominant male sterility gene is introgressed into an inbred maize line. Since this gene acts dominantly, selfing of these lines is not possible and the mutation will segregate 50:50 in resulting outcrossed progeny. Linked genetic markers may be employed to identify those seeds or plants containing the dominant male sterility gene so they can be selected for pollination by a maize male inbred line to create F1 hybrid seed. Again this hybrid seed will segregate 50% for male sterility. An alternative approach is to use a transgenic dominant male sterility gene for dominant sterility. This gene would be linked to a seed marker gene and transformed into an inbred line. Seed from this line could then be sorted based on the presence of the seed marker gene to ensure a pure population of dominant male-sterile progeny. These progeny would then be crossed with a male inbred in a hybrid production field to yield 50% male sterility in the resultant hybrid progeny.

### Example 8: Cytological Abnormalities in Ago4 are Reminiscent of Apospory

[0436] Previous results showed that dominant mutations in ARGONAUTE9 (AGO9) and RNA-DEPENDENT RNA POLYMERASE6 (RDR6) lead to ovules showing multiple MMC-like cells that are able to initiate gametogenesis without undergoing meiosis by a mechanism reminiscent of apospory, a specific type of apomeiosis that often leads to asexual reproduction through seeds or apomixis. This phenotype was also found in other mutants of the RNA-directed DNA methylation (RdDM) pathway such as RNA-DEPENDENT RNA POLYMERASE2 (RDR2) and DICER-LIKE3 (DCL3).

[0437] i. Cytological Method

[0438] Plants were grown under growth chamber conditions at 24 degrees Celsius, and under 16 hours light/8 hours dark photoperiod regime. Developing flower buds of heterozygous and homozygous ago4-1 or ago4-6 individuals were dissected to isolate the immature gynoecium. Samples were fixed in FPA (1:0.5:7 formalin:propionic acid:ethanol) at 4 degrees Celsius for 12 hours. Samples were treated with 50 μl of a RNAse solution containing 30 μl of 5M NaCl, 1M Tris/HCl (pH=8), and 9 ml of distilled water and subsequently stained for 2 hours in a solution containing 17.4 mg L-arginine and 10 mg of propidium iodide (pH=12.4 adjusted with 5M NaOH) in distilled water. Images were captured on a laser scanning confocal microscope (Leica).

[0439] ii. Immunolocalization Method

[0440] Developing gynoecia were fixed in paraformaldehyde (1×PBS, 4% paraformaldehyde, 2% Triton), under continuous agitation for 2 h on ice, washed three times in 1×PBS, and embedded in 15% acrylamide:bisacrylamide (29:1) over pre-charged slides (Fisher Probe-On) treated with poly-L-Lys as described (Bass et al., 1997). Gynoecia were gently opened to expose ovules by pressing a coverslip on top of the acrylamide. Samples were digested in an enzymatic solution composed of 1% driselase, 0.5% cellulase, 1% pectolyase (all from Sigma) in 1×PBS for 60 min at 37° C., subsequently rinsed three times in 1×PBS, and permeabilized for 2 h in 1×PBS: 2% Triton. Blocking was 1% BSA (Roche) for 1 hour at 37° C. Slides were then incubated overnight at 4° C. with an ASY1 Arabidopsis primary antibody used at a dilution of 1:100. Slides were washed for 8 h in 1×PBS: 0.2% Triton, with refreshing of the solution every two hours. The samples were then coated overnight at 4° C. with secondary antibody Alexa Fluor 488 (Molecular Probes) at a concentration of 1:300. After washing in 1×PBS: 0.2% Triton for at least 8 h, the slides were incubated with PI (500 μg mL⁻¹) in 1×PBS for 20 min, washed for 40 min in 1×PBS, mounted in PROLONG medium (Molecular Probes) overnight at 4° C. Serial sections on Stage 1 ovules were captured on a laser scanning confocal microscope (Zeiss LSM 510 META), with multi-track configuration for detecting PI (excitation with DPSS laser at 568 nm, emission collected using BP: 575-615 nm) and Alexa 488 (excitation with Argon laser at 488, emission collected using BP: 500-550). Laser intensity and gain was set at similar levels for all experiments. Projections of selected optical sections were generated using ImageJ (Schneider et al., 2012)

[0441] iii. Results

[0442] The results in this example demonstrate that mutations in the 24-nucleotide small RNA (sRNA) binding protein ARGONAUTE4 (AGO4) show an equivalent phenotype. Contrary to wild-type individuals (FIG. 26A), plants heterozygous for ago4-1 or ago4-6 were fertile but showed pre-meiotic ovules with several enlarged sub-epidermal cells containing a conspicuous nucleus (FIGS. 26B and 26C). Results were equivalent for both mutant alleles. A the end of megasporogenesis, most ovules exhibited a variable number of enlarged ectopic cells adjacent to a single tetrad composed of three degenerated and one functional megaspore (FIG. 26D), suggesting that a single pre-meiotic precursor underwent meiosis while differentiated ectopic cells persisted without dividing.

[0443] Contrary to wild-type that invariably showed a single functional megaspore (FIG. 26E), in rare occasions mutant ovules exhibited two functional megaspores, suggesting that twin meiotic division occurred from two distinct meiotic precursors within a single ovule (FIG. 26F). After meiosis, ovules showed two female gametophytes ectopically growing in the ovule at variable frequencies ranging from 5 to 11% (FIG. 26G), suggesting that that enlarged ectopic cells can initiate gametogenesis without undergoing a prior meiotic division.

[0444] To further determine if developmental defects found in ago4 during early ovule development are at the molecular level equivalent to natural mechanisms prevailing in species reproducing by asexual reproduction through seeds (apomixis), we compared the expression of meiotic markers such as ASYNAPSIS1 (ASY1) in developing ovules of ago4 to the expression of this same marker in genotypes of Boechera stricta that reproduce either sexually or by apomixis. ASY1 is a protein that contributes to forming the central element of the synaptonemal complex, the structure that holds homologous chromosomes together during meiosis. In the wild-type ovule of Arabidopsis, ASY1 is only expressed in the megaspore mother cell (MMC) during prophase I. Using a whole mount immunolocalization protocol developed in our group (Escobar Guzman et al, in press), we have shown that contrary to the sexual genotype of B. stricta in which a single MMC enters meiosis, numerous cells in the ovule of apomict of Boechera stricta show ASY1 localization (FIGS. 27A and 27B). This occurs irrespective of their differentiation state, suggesting that apomict development is characterized by an ectopic deregulation of meiosis in the nucleus. In ago4, ASY1 is also localized in several cells of the nucleus (FIG. 27C-FIG. 27F), suggesting a deregulation of meiosis equivalent to the one occurring in the apomictic but not the sexual genotype of Boechera stricta. These results confirms that in ago4, ovules undergo developmental abnormalities that are reminiscent of natural mechanisms of apomixis.

### Example 9: Low Frequencies of Clonal Seeds are Recovered in Pi Rdr6 and Pi Ago9 (Plants Grown Under Complete Absence of Pollination

[0445] Genotypes were grown under growth chamber conditions at 24 or 28 degrees Celsius, and under 16 hours light/8 hours dark photoperiod regime, or under greenhouse conditions at an average temperature of 26 to 28 degrees Celsius, and 13.5 hours daylight/10.5 night photoperiod regime, in an empty and clear greenhouse where no male fertile germplasm was growing. A total of 50 individuals per genotype were manually harvested by carefully opening the main stem from Silique #4 to Silique #20, Silique #4 being the youngest silique that has separated from the apical inflorescence in the primary stem, and consecutive siliques are numbered top to bottom. Each silique was manually dissected under a stereo-microscope and each ovule was analyzed to determine it accumulated anthocyanins as a marker of seed initiation.

[0446] Several generations of pistillata rdr6 double mutant individuals were grown in complete absence of pollination under both greenhouse and growth chamber conditions. A total of 15 individuals were manually harvested per genotype. Although individuals for all the genotypes were sterile due to the lack of pollination, developing siliques (fruits) of all plants analyzed exhibited a variable number of aborted seeds that accumulated anthocyanin pigmentation in the seed coat. To quantify this phenotype, we arbitrarily numbered each consecutive silique, initiating the analysis with Silique #4, which is the top silique that appears separated from the apical inflorescence in each stem; the next older siliques were consecutively numbered Silique #5, Silique #6 etc. . . . until reaching Silique #20. Each silique was manually opened and carefully scored by counting the number of ovules or “seed-like” structures that accumulated anthocyanin. Results are illustrated in FIG. 28. All developing siliques showed aborted seeds at frequencies significantly higher than controls, indicating that in the absence of pollination, double mutant pistillata rdr6 can give rise to seed-like structures that show cytological features normally occurring in a wild-type developing seeds following double fertilization. However, at full plant senescence these seeds aborted and did not germinate, suggesting that rdr6 plants are not able to complete viable seed development in the complete absence of pollination.

### Example 10: Low Frequencies of Clonal Seeds are Recovered in Pi Rdr6 and Pi Ago9 (Plants Grown Under Open Pollination Conditions

[0447] Many flowering plant species that naturally undergo asexual reproduction through seeds require pollination and fertilization of the central cell for viable endosperm formation (pseudogamy). Thus, pollination could be necessary for enabling seeds to reach maturity in the case of the mutants described herein. To test this possibility, a population of 70 F3 pi rdr6-15, pi ago9-3, and pi ago4-1 individuals were grown under greenhouse conditions, in the absence of any full-sib individual that did not show the pistillata (pi) mutant phenotype, but in the presence of additional wild-type adult Arabidopsis plants as an external source of cross-pollination.

[0448] Both double mutant genotypes were grown under greenhouse conditions at an average temperature of 26 to 28 degrees Celsius, and 13.5 hours daylight/10.5 night photoperiod regime. Two trays of 35 homozygous pistillata male sterile individuals and heterozygous for either ago9-3 or rdr6-15 were placed in a greenhouse table and left to cross-pollinate with wild-type Columbia individuals placed within their vicinity at no less than 2 meters from the double mutant trays. Seeds were harvested from full senescent individuals and a sample of 200 seeds was scored for each genotype to classify the seeds in the five classes that are described in the text. For genotyping comparison between maternal plants and their progeny, DNA was extracted from individual seeds, rosette stage plantlets, or adult plants and 92 well-characterized SNPs distributed across all five chromosomes and allowing distinction between Landsberg and Columbia ecotypic backgrounds, were genotyped using competitive allele specific PCR assays (KASP). A full list of the SNP list and their genomic location can be provided if necessary.

[0449] After plant senescence, 35 F3 individuals showing the pi phenotype and carrying mutations in either rdr6-15, ago4-1 or ago9-3 were systematically harvested, and phenotypic evidence of seed formation was assessed by manually dissecting each independent silique. Whereas progeny were scarce in pi controls, individuals carrying rdr6-15, ago4-1 or ago9-3 mutations produced a variable number of mature seeds of variable size and morphology. For all three double mutant genotypes, the number of seeds per plant ranged between 15 and 250. Under normal self-pollinated conditions, mutants give rise to seeds that on average have 0.5-0.6 mm in length. Double mutant individuals gave rise to five different classes of seeds based on length and morphology. These five classes are: (a) morphologically normal seeds with a length larger than 0.3 mm but smaller than 0.7 mm; (b) morphologically normal small seeds with a length of 0.3 mm or less; (c) morphologically normal large seeds with a length of at least 0.7 mm; (d) collapsed seeds not containing embryo or endosperm; and (e) seeds of normal size showing an abnormal morphology, frequently partially collapsed and containing an abnormal or not fully differentiated embryo. Using a random sample of 200 seeds per genotype, we scored the number of seeds for each class. The results are presented in Table 1, which provides data pertaining to quantitation of abnormal seeds in double mutant backgrounds grown under open pollination in greenhouse conditions. Whereas collapsed seeds do not contain an embryo, we speculate that the small seed class has a tendency to contain embryos with reduced DNA content as compared to wild-type, whereas large seeds have an embryo with higher DNA content as compared to wild-type; we plan to conduct flow cytometry measurements to test this hypothesis.

TABLE 1

| | | Class (b) | Class (c) | Class (d) | Class (e) |
|---|---|---|---|---|---|
| | Class (a) | % small | % large | % collapsed | % abnormal |
| Genotype | % normal | seed | seed | seed | seed |
| pi | 96 (192) | 1.5 (3) | 0 | 1 (2) | 1.5 (3) |
| (n = 200) | | | | | |
| pi ago4-1 | 84 (168) | 4 (8) | 1.5 (3) | 4 (8) | 6.5 (13) |
| (n = 200) | | | | | |
| pi ago9-3 | 71 (142) | 4 (8) | 0 | 16.5 (33) | 8.5 (17) |
| (n = 200) | | | | | |
| pi rdr6-15 | 81.5 (163) | 4.5 (9) | 1 (2) | 2 (4) | 11 (22) |
| (n = 200) | | | | | |

[0450] Whereas a few of class (e) seeds germinated and gave rise to diploid adult plants, most of them did not germinate either in soil or MS media; in sporadic cases we were able to rescue an embryo by extracting it from the seed coat. These rescued embryos produced plantlets that did not flower. In double mutant individuals pi rdr6-15 and pi ago9-3 the genetic background of the parental genotypes differed (pi was either in a Landsberg erecta or Columbia-0 background), and therefore we could compare the genotype of F3 maternal individuals to the genotype of their F4 progeny in 6 independent families represented by the maternal parent and all class (e) individuals on the basis of DNA extracted from recovered plants or non-germinated individual seeds. To determine the genetic constitution of these families, we used a collection of 92 molecular markers (SSLPs and CAPS) that recognize previously characterized allelic polymorphisms that distinguish both ecotypes across all five Arabidopsis chromosomes (Bell and Ecker, 1994; Cho et al., 1999; Lukowitz et al., 2000). The results of this genotype comparison for a pi ago9 family is provided in Table 2 (data pertaining to a family of 10 pi ago9 individuals originating from class (e) seeds with comparison to the genotype of their maternal plant), and for a pi rdr6 family is presented in Table 3 (data pertaining to a family of 5 pi rdr6 individuals originating from class (e) seeds; comparison to the genotype of their maternal plant). In the case of the pi ago9 family, 4 out of 10 individuals retained the full genotype and heterozygosity of the corresponding maternal parent at all tested loci and in all five chromosomes. In the case of the pi rdr6 family, 5 out of 5 individuals retained the full genotype and heterozygosity of the corresponding maternal parent at all tested loci and in all five chromosomes. Results from some families were more variable; however, these results and others confirm that pi rdr6 and pi ago9 individuals can produce clonal seeds at a low frequency, under open cross-pollinated conditions.

TABLE 2

| | | Number of | Number |
|---|---|---|---|
| | | SNPs identical | of |
| | | to maternal | heterozygous |
| Inidvidual | Nature of DNA | genotype | markers |
| pi ago9A | [symbol] seed | 79/79 | 11 |
| pi ago9B | [symbol] seed | 79/79 | 11 |
| pi ago9C | [symbol] seed | 79/79 | 11 |
| pi ago9D | plantlet | 79/79 | 11 |
| pi ago9E | adult plant | 43/79 | 45 |
| pi ago9F | adult plant | 52/79 | 46 |
| pi ago9G | [symbol] seed | 67/79 | 15 |
| pi ago9H | [symbol] seed | 62/79 | 23 |
| pi ago9I | [symbol] seed | 66/79 | 19 |
| pi ago9J | plantlet | 31/79 | 42 |

TABLE 3

| | | Number of | Number of |
|---|---|---|---|
| | | SNPs identical | heterozygous |
| Individual | Nature of DNA | to maternal genotype | markers |
| pi rdr6A | [symbol] seed | 85/85 | 36 |
| pi rdr6B | [symbol] seed | 85/85 | 36 |
| pi rdr6C | [symbol] seed | 85/85 | 36 |
| pi rdr6D | [symbol] seed | 85/85 | 36 |
| pi rdr6E | [symbol] seed | 85/85 | 36 |

[0451] The results provided herein demonstrate that self-propagated asexual reproduction through seeds can be induced in Arabidopsis by single mutations affecting genes involved in RdDM, a discovery suggesting that transcriptional repression of repetitive genomic regions, most often associated with heterochromatin, is important for avoiding both unreduced gamete formation and the division of the egg and central cell in the absence of double fertilization. For rdr6, the frequency of initiation of autonomous seed development in the absence of pollination is higher than the frequency at which clonal seeds are recovered under open pollinated conditions, suggesting that pollination is necessary to trigger viable asexual seed formation by a mechanism yet to be elucidated. Non-pollinated siliques of pi rdr6 often contain collapsed non germinating seeds showing a multicellular abnormal embryo in the absence of endosperm, suggesting that fertilization of the central cell might be necessary for viable seed formation by a mechanisms reminiscent of pseudogamy in natural apomicts (Nogler, 1984).

### Example 11: Low Frequencies of Clonal Seeds are Recovered in Pi Rdr6 and Pi Ago9 (Plants Grown Under Open Pollination Conditions

[0452] An experiment was performed in Glycine max using guideRNA targeted CAS9 mutations in putative RdDM pathway genes. Three orthologs of Ago4 (Glyma02g44260.1, Glyma14g04510.1 and Glyma20g12070.3) and two orthologs of RDR6 (Glyma04g07151.2 and Glyma06g07251.2) were targeted in this experiment. Due to the use of multiple guide RNAs, two variations of the mutagenesis experiment were performed. In one experiment, only RDR6 orthologs were targeted, and in a second experiment, all five genes listed above were targeted. In total, 330 independent events were regenerated into plants and genotyped. From these, just over 100 plants were selected for having one or more of the ten total alleles being frame-shifted and therefore putatively knocked out. Ovules from 98 regenerated events (TO plants) were observed at the megaspore mother cell stage through mature embryo sac stage through fixation, clearing and DIC microscopy. In total, ca. 1580 ovules were observed. No observations of apospory-like development were observed in this preliminary experiment. A number of issues may account for this lack of observed apospory including: 1) poorly characterized RdDM pathway genes in Glycine max; 2) unknown somaclonal variation effects in regenerated soybean plants; 3) difficult to characterize genetics in the primary generation of regenerated CAS9 events due to potential for chimeras; 4) difficulty in obtaining large numbers of appropriately prepared soy ovules at the correct stages for observation.

[0453] Other preliminary experiments have shown that among seeds that have been produced by Arabidopsis thaliana plants of the present disclosure, some have genomes evidencing sexual reproduction (genetic material from both a male and a female parent; as specified in the original disclosure), some seeds have clonal genomes (genetic material from only the female parent, as specified in the original disclosure) and some seeds are aneuploids evidencing an abnormal number of chromosomes, as evidenced by these new preliminary results.

### Additional References on Gametocides

[0454] Albertson, M. C. and Palmer, R. G., 1979, A comparative light and electron microscopic study on macrosporogenesis in male sterile (MS) and male fertile soybeans (Glycine max L. Var.). American J. Bot., 66: 253-265.
[0455] Ali, A. J., Devakumar, C., Zaman, F. U. and Siddiq, E. A., 1999, Gametocidal potency of ethyl 4 fluorooxanilate in rice. Indian J. Genet. Pl. Bred., 59: 267-279.
[0456] Alpuerto, V. V., 1987, Inducted male sterility using gametocides in the production of hybrid tomato seed. Philippine J. of Crop Sci., 12: 20.
[0457] Anaschenko, A. V., 1972b, A study of male sterility in sunflower. Tr. Prikl Bot. Genet Sel., 46: 120-13.
[0458] Anonymous, 1999, International Rules for Seed Testing, Seed Science and Technology, 32: 1-334.
[0459] Anonymous, 2007, Agricultural output. Centre for Monitoring. Indian Economy, pp. 267-268.
[0460] Ashwathanarayana, S. C., 1986, Effect of gametocides on pollen sterility and other morphological characters in rice (Oryza sativa L.). M.Sc. (Agri.) Thesis, Univ. Agric. Sci., Bangalore.
[0461] Awasthi, N. N. C. and Dubey, D. K., 1985, Effects of some phytogametocides on growth, fertility and yield of Lentil (Lens culinaris). LENS News. (ICARDA), 12: 16-22.
[0462] Banga, S. S. and Labana, K. S., 1984, Ethrel induced male sterility in Indian mustard (Brassica juncea (L.) Coss). Zpflanzenzucht, 92: 229-233.
[0463] Bartkawiak, B. I., Rousselle, P. and Renard, M., 1979, Investigations of two lines of cytoplasmic male sterility in rape seed (Brassica napus L.). Genetica polanica, 20: 47-49.
[0464] Basavaraja, N., 1981, Studies on hybrid seed production in brinjal (Solanum melongena L.). M.Sc. (Agri.) Thesis, Univ. Agric. Sci., Bangalore.
[0465] Baydar, H. and Gokman, O. H., 2003, Hybrid seed production in safflower following the induction of male sterility by gibbberellic acid. Pl. Bred., 122: 459-461.
[0466] Beaumont, V. and Courtois, B., 1990, Anther culturability of rice plants treated with male gametocide chemicals. Internl. Rice Res. News., 15:9.
[0467] Bennekom, J. L. and Van, 1973, Application of gibberellic acid as a gametocide in onions. Zaadbelangen, 27(16): 324-325.
[0468] Berry, S. K., Kalra, C. L., Sehgal, R. C., Kulkarni, S. G., Arora, S. K. and Sharma, B. R., 1988, Quality characteristics of seed of five okra cultivars. J. Food Sci. Tec., 25: 303-305.
[0469] Berzy, T., Szundy, T., Barnabas, B., Bayer, K. and Matolesy, G., 1990, The biological effect of gametocidies on sexual processes and individual plant development in maize. Novenytermeles, 39: 97-110.
[0470] Bhardwaj, D. N. and Dubey, D. K., 1977, Chemical induction of male sterility in mungean (Phaseolus aureus Roxb.). Sci. Cul., 43(2): 89-92.
[0471] Bose, S. and Sharma, P. D., 1972 Preliminary studies on the effect of combined treatment of colchicine and giberelic acid on rice. Agric. Agro-Indus. J., 5(2): 31-32.
[0472] Campos, F. A., 1974, The use of ethrel in the induction of male sterility in sunflower. In Proceedings of the 6th Internl. Sunflower Conf., vraneanu A. V. (Ed.) Bucharest, pp. 349-351.
[0473] Chailakeryan, M. K. H. and Khryanin, V. N., 1980, Hormonal regulation of sox expression in culture of isolated hemp germs. Naturwissens Chaften, 67: 94-96.
[0474] Chan, Y. W. and Cheah, C. H., 1981, Evaluation of ethrel as a selective gametocide in the breeding of rice (Oriza sativa L.). In Proceedings of 4th International SABRAO Cong., Malaysia, p.24.
[0475] Chauhan, S. V. S. and Kinoshita, T., 1980a, Morphological and histochemical studies on pollen degeneration in cytoplasmic male sterile sugarbeet (Beta vulgaris L. Var Saccharifera). J. of Fac. Agric. Hokkaido Univ. Japan, 60: 42-46.
[0476] Chauhan, S. V. S. and Kinoshita, T., 1980c, Cytohistological and biochemical studies on pollen abortion in Datura alba L. plants treated with gametocidal compounds. In Proceedings of Japanese Acad. of Sci., 56: 344-349.
[0477] Chauhan, S. V. S. and Singh, S. P., 1966, Pollen abortion in male sterile hexaploid wheat (Norin) having Aegilaps ovota L. cytoplasm. Crop Sci., 6: 532-535.
[0478] Chauhan, S. V. S. and Singh, S. P., 1972, Effect of maleic hydrazide, FW 450 and dalapon on growth, flowering and pollen viability of Capsicum annuum L. and Datura alba L. Indian J. Pl. Phy., 15: 138-147.
[0479] Chauhan, S. V. S. and Vandana Singh, 2002, Detergent induced male sterility and bud pollination in Brassica juncea (L.). Czem and Coss. Curr. Sci., 82(8): 918-920.
[0480] Chauhan, S. V. S., 1976, Morphological and histochemical studies in natural and chemically induced male sterile plants. Curr. Sci., 45; 274-275.
[0481] Chauhan, S. V. S., 1980, Effect of maleic hydrazide, FW-450 and dalapon on anther development in Capsicum annuum. J. Indian Bot. Sci., 59: 133-136.
[0482] Chauhan, S. V. S., Agnihotri, D. K. and Gupta, H. K., 2005, Efficacy of benzotrizole as a chemical hybridizing agent in chilli cotton radish. Indian J. Genet., 65(3): 223-224.
[0483] Cheng, Y. K. and Huang, C. S., 1980, Studies on cytoplasmic genetic male sterility of cultivated rice (Oryza sativa). II. Morphological histological investigation of functional male sterility. J. of Agri. Res., China, 29(29): 7-8.
[0484] Chopra, V. L., Jain, S. K. and Swaminathan, M. S., 1960, Studies on the chemical induction of pollen sterility in some crop plants. Indian J. Genet. Pl. Breed., 20: 188-199.
[0485] Choudhury, B. and George, P. V., 1962, Preliminary trails on the induction of male sterility in brinjal (Solanum melongena L.). Indian J. Hort., Sci., 19: 140-142.
[0486] Chowdhury, J. B. and Das, K., 1966, Male sterility in Brassica campestris var. yellow sarson. Indian J. Genet and Pl. Bred., 26: 374-380.
[0487] Chowdhury, J. B. and Das, K., 1968, Cytomorphological studies on male sterility in Brassica campestris L. Cytologia, 38: 195-199.
[0488] Chowdhury, J. B., Ghai, B. S. and Varghese, T. M., 1968, Cytohistological studies on male sterility in wheat with a discussion on causes of pollen fertility in other crops. Indian J. Genet Pl. Bred., 20: 188-199.
[0489] Ciha, A. J. and Ruminski P. G., 1991, Specificity of pyridine monocarboxylates and benzoic acid analogues as chemical hybridizing agents in wheat. J. Agri. Food Chem., 39: 2072-2076.
[0490] Colhoun, L. W., Steer, M. V., 1983, The cytological effects of the gametocides ethrel and RH 531 on microsprogenesis in barley (Hardeum vulgare L.). Pl. Cen Environ., 196(1): 21-29.
[0491] Das, K. and Pandey, B. D., 1961, Male sterility in brown sarson. Indian J. Genet Pl. Bred., 21: 195-190.
[0492] Deotale, R. D., Bhiwapukar, R. M., Sorte, N. V., Waghmare, H. U., Nimje, B. H. and Alluwar, M. W., 1994, Growth and yield components of safflower (Carthamum tinctiorius L.) as influenced by 2,3,5-triiodobenzoic acid. J. Soils and Crops, 4: 125-127.
[0493] Dharmarayan, D. K., 1990, Chemical induction of male sterility and standardizing techniques for hybrid seed production rice (Oryza sativa L.). Ph.D. Thesis, Univ. Agric. Sci., Bangalore.
[0494] Dicks, J. W., 1976, Chemical restriction of stem growth in ornamentals. Outlook on Agri., 9: 69-75.
[0495] Dubey, R. S. and Singh, S. P., 1967, Chemical induction of male sterility in Abelmoschus esculentus (L.) Moench. Indian J. Agric. Sci., 38(1): 108-114.
[0496] Dutta, O. P., 1980, Male sterility in okra (Abelmoschus esculentus L. Moench) and bottle gourd and its utilization in hybrid seed production. Ph.D. Thesis, Univ. Agri. Sci., Bangalore.
[0497] Echlin, P., 1971, The role of tapetum during microsporogenesis of angiosperms, in Pollen Development and Physiology. Heslop-Harrison (ed.), Butterowrths, London, pp. 41-61.
[0498] Eenink, A. H. and Vereijken, A. L. J., 1978, Anatomical changes in flower buds of lettuce (Lactuca sativa L.) treated with a GA3 solution for induction of male sterility. Acta Bot Neerl., 27: 199-224.
[0499] Erickson, J. R., 1967, Biochemical investigations of cytoplasmic male sterility in spring wheat (Triticum aestiuvm L.). Agron. Abst., pp. 8-9.
[0500] Fairey, D. T., Shoskopf, N. C., 1975, Effect of granevar ethephon on male sterility in wheat. Crop Sci., 15(1): 29-32.
[0501] Fan Ping, Cui Dangqun and Fan Hong Wei, 1998, Studies on the male sterility induced by CHA-SC 2053 in common wheat. Acta Agriculturae Universitatis Henanensis, 32(2): 149-153.
[0502] Frank, J. and Koves, F. S., 1977, Chemical induction of male sterility in sunflower. Acta Agrono. Acad. Scienti. Hungarical, 26(3/4): 318-324.
[0503] Frank, J., Koves, F. S., 1977, Chemical induction of male sterility in sunflower. Acta Agron. Acad., Scien. Hung., 26(4): 318-324.
[0504] Gao, Q. R., Sun, L. and Liu, B., 1996, Induced male sterility and its effects on growth and development of winter wheat. J. of Shandong Agri. Univ., 27: 241-248.
[0505] Garcia, T. L., Dominguez, J. and Fernandez Martinez, J., 1979, Male sterility and female steility induced in sunflower with GA3. Anales del Institute Nacional de investigeones Agraries Prod Vegel., 9: 147-169.
[0506] Ghosh, M. S. and Bose, T. K., 1970, Sex modification in cucurbitaceous plants by using CCC. Phyton. (Hom), 27: 131-135.
[0507] Gomez, A. K and Gomez, A., 1984, Statistical Procedure for Agricultural Research, 2nd Edition, A Wiley-Interscience Publication, New York, pp. 187-241.
[0508] Graybosch, R. A. and Palmer, R. G., 1987, Analysis of male sterile character in soybean. J. Here., 78: 66-70.
[0509] Guan, C. Y., Li, X., Wang, G. H. and Chen, S. Y., 1998, Studies on the mechanisms of male sterility induced by chemical hybridizing agents in rape. II. Effects of KMS-1 on fertility in rape (Bassica napus). Chinese Journal of Oil and Crop Science, 20: 1-5.
[0510] Guilford, W. J., Patterson, T. G., Vega, R. O., Fang, L., Liang, Y., Lewis, H. A. and Labovitz, J. N., 1992, Synthesis and pollen suppressant activity of phenylcinoline-3-carboxylic acids. J. Agri. Food Chem., 40: 2026-2032.
[0511] Halevy, A. H. and Rudich, J., 1967, Modification of sex expression in muskmelon by treatment with the growth retardant B 995. Physiologia Plantarum, 20: 1052-1058.
[0512] Hansen, D. J., Bellman, S. K. and Sacher, R. M., 1976, Gibberellic acid controlled sex expression of corn tassels. Crop Sci., 16: 371-374.
[0513] Hecker, R. J. and Smith, G. A. 1975, Tests of granular ethephon as a male gametocide on sugarbeet. Canadian J. Pl. Sci., 55: 655-656.
[0514] Hecker, R. J., Bilgen, T., Bhatnagar, P. S., Smith, G. A., 1972, Tests for chemical induction of male sterility in sugarbeet. Canadian J. Pl. Sci., 52(8): 937-944.
[0515] Hillyer, LG., 1956, Effects of growth substances in flowering of cucurbitaceous plants. Ph.D. Thesis, Michigan State University.
[0516] Huang, Q. C. and Wang, L. Z., 1990, Use of male gametocide to induce complete sterility in a partially male sterile rice. Internl. Rice Res. News., 15(5): 6-7.
[0517] Huang, X. Q., Yang, A. N., Zhou, Y. L. and Zhang, Y. J., 1999, Effect of chemical hybridizing agent III (Pyrone type derivative) on male sterility in rice. Jiangsu J. Agri. Sci., 15(1): 17-20.
[0518] Hughes, W. G., Bodden, J. J. and Golanoponlu, S., 1978, The effect of sowing density and application of GA on male sterility and ear emergence in Ethephon treated field grown wheat. Ann. Rev. Ap. Bio., 88: 313-319.
[0519] Iang, M. L. L., Wang, D. Q., Zhang, A. and Huang, C., 1998, Male sterile effect of a new pyridazine compound 9403 on wheat. J. China Agri. Univ., 3: 39-44.
[0520] Illusulu, K., 1967, Cytological investigation on the male sterility in sunflower. Genetica Polanica, 30: 65-69.
[0521] Iwahori, S., Lyons, J. M. and Smith, O. E., 1970, Sex expression in cucumber plants as affected by 2-chloroethylphosphonic acid, ethylene and growth regulators. Plant Physiology (Bethesda), 46: 412-415.
[0522] Jackson, M. L., 1967, Soil Chemical Analysis. Prentice Hall of India Private Limited, New Delhi, pp. 183-192.
[0523] Jain, S. K., 1956, Natural incidence of male sterility and its chemical induction in crop plants. Assoc. Disst., IARI, New Delhi, p.267.
[0524] Jain, V. K. and Mukherjee, D., 1980, Effect of chlorflurenol methylester 74050 on sex expression and parthenocarpic fruit development in tomato. Phyton. (Hom.), 38: 89-93.
[0525] Jensen, W. A., 1962, Bot. Histochem. Prin. Prac., W. H., Freeman and Co., San Francisco.
[0526] Jensen, W. A., 1984, The effect of chemical hybridizing agent on the development of wheat pollen. In Proceedings of 8th Internl. Sym. Sexual Reprod. In Seed Pl., Fems and Mosses, p.34.
[0527] Jiang, M. L., Wang, D. Q., Zhang, A. and Huang, C., 1998, Male sterile effect of a new pyridazine compound 9403 on wheat. J. of China Agri. Univ., 3(5): 39-44.
[0528] Johnson, R. R. and Brown, C. M., 1976, Chemical control of pollination in wheat and oats. Crop Sci., 16: 584-587.
[0529] Jos, J. S. and Singh, S. P., 1967a, Chemical induction of male sterility in tobacco. Indian J. Agri. Sci., 37: 504-510.
[0530] Jos, J. S. and Singh, S. P., 1967b, Induction of male sterility in Nicotiana rustica by means of chemicals. Indian J. P1 Phy., 10: 130-138.
[0531] Joshi, A. D. and Hardas, M. W., 1974, Okra In: Hutchnson, J. B. Evolutionary Studies in World Crops. Diversity and Change in the Indian Sub-Continent. Cambridge Univ., Press, London, p.105.
[0532] Kajjidoni, S. J., 1997, Histological basis of genetic male sterility and its utilization in hybrid development in diploid cotton. Ph.D. thesis, Univ. Agri. Sci., Dharwad.
[0533] Kasambe, J. N. R., 1967, Phenotypic restoration of fertility in a male sterile mutant by treatment with gibberellic acid. Nature, 215: 668.
[0534] Kaul, C. L. and Singh, S. P., 1967a, Effects of some growth regulators with gametocidal properties on Caj anus caj an L. Indian J. of Agri. Sci., 37: 69-75.
[0535] Kaul, C. L. and Singh, S. P., 1967b, On induced male sterility in wheat, Sunnhemp and onion. Indian J. of Pl. Phy., 10: 112-118.
[0536] Kaul, C. L. and Singh, S. P., 1967c, Staminal and functional male sterility induced by chemical treatment in papilionaceous plants. Indian J. Agri. Sci., 37: 264-269.
[0537] Khulbe, R. K., Roy, N. and Yadav, V. K., 2003, Induction of male sterility in wild and related species of sunflower (Helianthus annus L.). Crop Sci., 131: 29-32.
[0538] Kiermayer, O., 1959, Induktion mannlich-steriler Bluten bei Helianthus annuus durch, 2,3,5-tri-jodbenzoesaure (TIBA). Nature Wissen., 46: 457.
[0539] Kini, A. V., Seetharam, A. and Joshi, S. S. 1994, Mechanism of pollen abortion in cytoplasmi male sterile line of sunflower. Cytologic, 54: 121-124.
[0540] Kinoshita, T., 1971, Genetical studies on the male sterility of sugarbeets (Beta vulgaris L.) and its related species. J. of Fac. Agri., Hokkaido Univ., 56: 432-541.
[0541] Klimov, M. N., 1973, Induction of male sterility in sunflower by a chemical method. Referat Zhu. Abst., 5: 55-57.
[0542] Knowles, G., 1953, Selective control of wild oats in cereal crops by Maleic hydrazide. Canadian J. Agri. Sci., 33: 402.
[0543] Konstantinova, L. N., 1980, Cytological disturbances in anther development following gametocide induced male sterility in sunflower (Helianthus annus L.). Genetika a Lechenl, 67(3): 134-140.
[0544] Konstantinova, L. N., 1980, Cytological disturbances on anther development following gametocide induced male sterility in sunflower (Helianthus annus L.). Genetika a Slechenl, 67(3): 134-140.
[0545] Koriesh, E. M., Abou, Dahab, A. M. and Ali, E. W. M., 1989, Physiological studies on Chrysanthemum morifolium. Effect of cycocel, GA and nucleic acid on flowering and inflorescence characters. Assiut J. Agric. Sci., 20(1): 43-58.
[0546] Kovacik, A. and Kryzanek, R., 1969, Biological and biochemical analysis of sterile and fertile pollen of sunflower. Genet. Slecht., USSR, 5: 79-184.
[0547] Kumar, J., Verma, M. M., Singh, K. and Gagneja, M. R., 1976, Effectiveness of ehrel as an androcide in barley. Crop Improv., 3: 39-42.
[0548] Laibach, F. and Kribben, F. J., 1951, Der Einfluss von wuchstoff auf das Geschiecht der Bluten be einer monoezischen pflanze (Cucumis sativus L.). beitr Biol. Pflanz., 28: 64-67.
[0549] Lal, S. K., Devkumar, C., Sapra, R. L., Singh, K. P., 2004, Use ofgametocide for emasculation in soybean (Glycine max (L.) Merr.). Soybean Gene. Newsl.: 31: 1-4.
[0550] Laveau, J. H., Schneider, C. and Berville, A., 1989, Microsporogenesis and abortion in cytoplasmic male sterile plants from H. petiolans or H. petiolaris fallan crossed by sunflower (H. annuus L.). Ann. Bot., 64: 137-148.
[0551] Lippert, L. F. and Hall, M. C., 1961, Gametocidal action of F W-450 on cantaloupe. In Proceedings of American Soc., Hort., Sci., 78: 319-329.
[0552] Liu, Q. L. Pen, L. S., Lu, X. Y., Luo, Z. M., Lin, F. S., Zhoo, T. B. and Wu, S. Q., 1998, Studies on utilizing a chemical hybridizing agent to guarantee the purity of two line hybrid rice. II. Baochuling's effect on TPGMSR's physio-chemical characters. J. Hunan Agri. Univ., 24: 345-350.
[0553] Mangal, J. L., 1972, Induced male sterility in brinj al following foliar application. Punjab Hort J., 12: 179-182.
[0554] Manjula, M. and Ibrahim, K. K., 1999, The effect of gametocides on plant growth characters in rice. Oryza, 36(3): 215-218.
[0555] Martin, F. W., 1982, A second edible okra species and its hybrid with common okra. Ann. Bot., 50: 277-283.
[0556] Mathur, D. S. and Lal, S. K., 1999, Chemical induction of male sterility in chickpea. Indian J. Genet Pl. Breed., 59(3): 379-380.
[0557] Mcllrath, W. J., 1957, The use of maleic hydrazide for the production of male sterility in grain sorghum. In: A. Literature Summary on Maleic hydrazide, Naugatuck Chemical Division, U S Ruber Conn., p.106.
[0558] McRae, D. H., 1983, Advances in chemical hybridization. Pl. Bred. Rev., 3: 169-191.
[0559] Meer, O. P. and Bennekam, J. L., 1973, Gibberellic acid as a gametocide for the common onion (Allium cepa L.). Euphy., 22(2): 239-243.
[0560] Mehetre, S. S., 1988, Male sterility in cotton. Agril. Rev., 9(1): 7-17.
[0561] Meyer, J R., Roux, J. B. and Thomas, R. O., 1958, A preliminary report on the induction of male sterility in cotton by maleic hybrzaide. Missouri Agril. Exper. Sta. Inf. Sheet, p.589.
[0562] Mian, H. R., Kuspira, J. and Walker, G. W. R., 1974, Histological and cytochemical studies on five genetic male sterile lines of barley (Hardeum vulgare). Canadian J. Genet Cyt., 16: 355-379.
[0563] Miller, D. A., 1961, A study of various chemicals as gametocidal agents in sorghum. Sorghu News., 4: 22-24.
[0564] Mohan Ram, H. Y. and Jaiswal, V. S., 1970, Induction of female flowers on male plants of Cannabolis sativa L. by 2 chloroethanephosphonic acid. Experimentia (Basel), 26: 214-216.
[0565] Moore, J. F., 1959, Male sterility induced in tomato by sodium 2,3-dichloroisobutyrate. Science, 129: 1738-1740.
[0566] Moore, R. H., 1950, Several effects of maleic hydrazide on crop plants. Crop Sci., 112: 52-53. Nachalas, M. M., Crawford, D. T., Goldstein, T. P. and Seligman, A. M., 1958 The histochemical demonstration of cytochrome oxidase with new reagent for the Nadi reaction. J. Histochem. Cytochem., 6: 445-456.
[0567] Nagarjuna, B., Reddy, V. P., Rao, M. R. and Reddy, E. N., 1988, Effect of growth regulators and potassium nitrate on growth, flowering and yield of chrysanthemum (Chrysanthemum indicum). South Indian Hort., 36(3): 136-140.
[0568] Nakashima and Hosokawa, S., 1974b, Studies on histological features of male sterility in sunflower (Helianthus annus L.). Proc. Crop Sci. Soc. Japan, 43: 475-481.
[0569] Narayana Gowda, J. V., 1990, Influence of pinching and cycocel on growth and flowering of china aster (Callistephus chinensis). Mysore J. Agric. Sci., 24: 278-245.
[0570] Nasrallah, M. E. and Hopp, R. J., 1963, Effect of a selective gametocide on egg plant (Solanum melongena L.). In Proceed. of American Soc. Horti. Sci., 83: 575-578.
[0571] Nelson, P. M. and Rossman, E. C., 1958, Chemical induction of male sterility in inbred maize by use of gibberellins. Science, 127: 1560-1501.
[0572] Nishi, S., Kuriyan and Tode, M., 1970, Studies on first generation hybrids and vegetables II. Experiments on the applications of gametocides, FW 450 to tomato. Bull. Hort. Res. Stat., Hirat., 9: 129-139.
[0573] Olvey, J. M., Fisher, W. D. and Patterson, L. L., 1981, TD 1123: a selective male gametocide. In Proc. Beltwide Cot. Prod. Res. Conf., Ed. J. M. Brown, Memphis, Tenn.: National Cotton Council of America, p.84.
[0574] Panse, V. G. and Sukhatme, P. V., 1978, Statistical Methods for Agricultural Workers, ICAR, New Delhi.
[0575] Parmar, K. S. Siddiq E. A. and Swaminathan, M. S., 1979 Chemical induction of male sterility in rice. Indian J. Genet Pl. Breed., 39: 529-541.
[0576] Paun, L., 1974, The cytologic mechanism of male sterility in sunflower. In Proc. 6th Intern. Sunf. Conf., Buchares, pp. 17-25.
[0577] Pederson, M. W., 1959, Effect of sodium 2,3-dichloroisobutyrate on alfalfa gametes. Agron. J, 51: 573-574.
[0578] Peiretti, D. A., Ceballos, H., Macchiavelli, R. E. and Fernandez, M., 1987, Effects of inducing male sterility by applying GA3 and F1 seed production in sunflower. Revista de Ciencias Agropecuarias, 5: 25-33.
[0579] Perez, A. T., Chang, T. T., Beachell, H. M., Vergara, B. S. and Marciano, A. P., 1973, Induction of male sterility in rice with ethrel and RH-531. SABRAO Newsletter, 5: 133-139.
[0580] Piquemal, G., 1970, How to produce hybrid sunflower seeds by inducing male sterility with gibberellic acid. In Proc. 4th Internl. Sunf. Conf., Memphis tennesses, pp. 127-135.
[0581] Porter, K. B. and Weise, A. F., 1961, Evaluation of certain chemicals as selective gametocides for wheat. Crop Sci., 1: 381-182.
[0582] Prayaga, P., Lakshamma and Anjani, K., 2002, Enhancement of male sterility in safflower by growth regulators and chemicals. Sesame and Safflower Newsletter, 16: 92-95.
[0583] Pundir, N. S. and Singh, S. P., 1965, Induction of male sterility in muskmelon by the use of FW-450. Agra Univ. J. Res. Sci., 14: 177-184.
[0584] Radley, M., 1980, Effect of abscicic acid and gibberellic acid on grain set in wheat. Ann. Rev. App. Bio., 95(3): 409-414.
[0585] Raj, A. Y., 1968, Histological studies in male sterile and male fertile sorghum. Indian J. Genet. Pl. Bred., 28: 335-341.
[0586] Rastogi, R. and Sawhney, V. K., 1988, Suppression of stamen development of CCC and ABA in tomato floral buds cultured in vitro. J. Pl Phy., 133: 620-624.
[0587] Rehm, S., 1952, Male sterile plants by chemical treatments. Nature, 170: 38-39.
[0588] Reinecke, D. M. and Bandurski, 1987, Auxin biosynthesis and metabolism. Plant Hormones and their role of plant growth and development. Ed. Devies, P. J., Boston, Martinus, Nijhoff, pp. 24-42.
[0589] Robinson, R. W., Whitaker, T. W. and Bohn, G. W., 1970, Promotion of pistillate flowering in cucurbiat by 2-chloro-ethyl phosphonic acid. Euphytica, 19: 180-183.
[0590] Rodriquez, B. P. and Lambeth, V. N., 1972, Synergism and antagonism of GA and growth inhibitors on growth and sex expression in cucumber. J. American Soc. Hort. Sci., 97: 90-92.
[0591] Rudich, J., Halevy, A. H. and Kedar, N., 1969, Increase in femaleness of three cucurbits by treatment with ethrel, an ethylene releasing compounds. Planta (Berl.), 86: 69-76.
[0592] Rudich, J., Halevy, A. H. and Kedar, N., 1970, Interaction of gibberellin and SADH on growth and sex expression of muskmelon. J. American Soc. Hort. Sci., 97: 369-372.
[0593] Ruebenbaur, T. and Schultis, L., 1960, Zastosovanie selektywnego gemetocydu FW-450 dla chemeicznego kastrowania kwaito buraka. Hodwla Roslin Aklimat Nasiennicto, USSR, 4: 199-204.
[0594] Saini, S. S. and Davis, G. N., 1969, Male sterility in Allium cepa and some species hybrids. Economic Botany, 23: 37-44.
[0595] Salgare, S. A., 1995, Gametocidal effect of acrolein on ornamental chillies. Flora and Fauna, Jhansi, 1: 95-98.
[0596] Salmon, N., 1963, Behandlung von Beta vulgaris Tel Aviv., Israel. Ref. Chem. Zentralbl., 134: 152-162.
[0597] Satyanarayana, K. V. V., Rao, N. V. P. R. G, Rao, G. M. and Murthy, B. K., 1996, Effect of gametocides on pollen sterility and plant morphology in partial sterile CMS lines of rice. New Botanist, 23: 1-4.
[0598] Sawheney, V. K., 1981, Abnormalities in pepper (Capsicum annuum L.) flowers induced by gibberellic acid. Canadian J. Bot., 59: 8-16.
[0599] Sayeres, E. R., 1959, The effect of FW-450 as a gametocide on Sorhgum vulgare. Undergrad Spec. Probl. Rep. Univ. Illinois Ubrana, p.19.
[0600] Sccles, G. S. and Evans, L. E., 1979, Pollen development in male sterile and cytoplasmic male sterile rye. Canadian J. Bot., 57: 2782-2790.
[0601] Schulz, P. J., Cross, J. W. and Almeida, E., 1993, Chemical agents that inhibit pollen development: effects of the phenylcinnoline carboxylates SC-105 and SC-1271 on the ultrastructure of developing wheat anthers (Triticum aestivum L.). Sexual Pl. Reprod., 6: 108-121.
[0602] Schuster, W., 1961, Untersuchungen uber kunstlich induzierte pollen sterillitiat bie sonnenblumen (Helianthus annuus L.). Z. pflanzenzucht., 46: 389-404.
[0603] Seetharam, A. and Kumari, P. K., 1975, Induction of male sterility by gibberellic acid in sunflower. Indian J. Genet. and Pl. Breed., 35: 136-138.
[0604] Seetharam, A. and Kusumakumari, P., 1974, Giberellic acid induced male sterility in sunflower. Sci. Cul., 40(9): 398-399.
[0605] Seetharam, A. and Kusumakumari, P., 1976, Histological studies on cytoplasmic and GA3 induced male sterility levels of sunflower. Indian J. Genet., 36: 342-344.
[0606] Shivaprasad Shetty, 1995, Effect of GA3 and cycocel on maturity, seed yield and quality in china aster. M.Sc. (Agri.) Thesis, Univ. Agric. Sci., Bangalore.
[0607] Shivaramaiah, 1985, Induction of male sterility using gametocides in common millet (Pannicum miliaceum L.) and little millet (Panicum miliure L.). M.Sc. (Agri.) Thesis, Univ. Agri Sci., Dharwad.
[0608] Simanenko, V. K., 1982, Anther and microspore development offertile and cytoplasmical male sterility (CMS) line of sunflower. Tristol. Geneta, 16(5): 34-41.
[0609] Simonenko, V. K. and Karpavich, E. V., 1979, The cytological expression of different types of male sterility in sunflower.r Referatrun VI Zhurnal, 5: 65-69.
[0610] Singh, A. K., 1999, Male gametocidal effect of synthetic detergent in rice. Indian J. Genet Pl. Bred., 59(3): 371-373.
[0611] Singh, S. P. and Hadley, H. H., 1961, Pollen abortion in cytoplasmic male sterile sorghum. Crop Sci., 1: 430-432.
[0612] Sink, K. C. and Gunesch, M. L., 1966, Gametocidal effects of sodium alpha, beta-dichloroisobutyrate (DCIB) on petunias. In Proc. American Soc. Hort. Sci., 88: 657-661.
[0613] Sprova, M., 1975, New data on male sterility in sunflower induced by gibberellic acid. Resteniev dni Nanki, 12(1): 10-17.
[0614] Sreedhar, R. V., 2003, Assessment of genetic variability in niger (Guizotia abyssinica Cass.) germplasm. M.Sc. (Agri.) Thesis, Univ. Agric. Sci., Dharwad.
[0615] Starnes, W. J. and Hadley, H. H., 1962, Some effects of the gametocide alpha, beta-dichloroisobutyrate on soybean. Crop Sci., 2: 305-310.
[0616] Stoskopf, N. C. and Law J., 1972, Some observations on ethrel as a tool for developing hybrid cereals. Canadian J. Pl. Sci., 52: 680-683.
[0617] Sundararajan, N., Nagaraju, S., Venkataraman, S. and Jayanah, M. H., 1972, Design and analysis of field experiments. Univ. Agri. Sci., Hebbal, Bangalore.
[0618] Suryanarayan Reddy, B. G., Pushpa, G., Satyam, B. A. and Prakash, K. S., 1983, Preliminary studies on gibberellic acid inducted male sterility in finger millet. Proceedings of National Seminar, Jan. 12-13, 1983, Univ. Agri. Sci., Bangalore, Ed. By Seehtaram and Shanlare Gowda.
[0619] Swarnalatha, V., 2004, Induction of male sterility and histological studies on induced male sterility in niger (Guizotia abyssinica Cass). M.Sc. (Agri.) Thesis, Univ. Agric. Sci., Dharwad. Tschabold, E. E., Heim, D. R., Beck, J. R., Wright, F. L., Rainey, D. P., Terando, N. H. and Schwer, J. F., 1988, LY 195259, new chemical hybridizing agent for wheat. Crop Science, 28: 583-588.
[0620] Vear, F., 1981, Determination of sunflower lines useable as a combining ability testers according to their aptitude to be male sterilized with giberellin. Sunflower News., 5: 5-8.
[0621] Veer Kumar, G. V., 2002, Studies on genetic variability, floral biology, autogamy and histology of GA3 induced male sterility in niger. M.Sc. (Agri.) Thesis, Univ. Agric. Sci., Bangalore.
[0622] Verma, M. M. and Kumar, J., 1978, Ethrel a male gametocide that can replace the male sterility genes in barley. Euphytica, 27: 865-968.
[0623] Verma, R. B., Singh, G. N., 1978, Stuides on chemical induction of male sterility in bhendi (Abelmoschus esculentus Moench). Indian J. Agri. Res., 12(1): 22-24.
[0624] Verober, A. I. and Blankarskaya, T. E., 1978, Cytoembryological changes of male sterility in sunflower. I. Genet I Selektoiya rast. Tez. Dokl. Lemngred, VSSR (1977) 103-104, Udersa Univ. Ukranian SSR from Refertivnvi Zhurnal, 5: 51-65.
[0625] Vittalaya Kini A., 1981, histological and histochemical studies in cytoplasmic gibberellic acid induced male sterile genes of sunflower. M.Sc. (Agri.) Thesis, Univ. Agri. Sci., Bangalore.
[0626] Walkof, C., 1959, In Prog. Rep. on FW-450 Chem. Gametocide. Rohm and Haas, Philadelphia, p.9.
[0627] Wang, X. and Que, R. F., 1981, Induction of pollen sterility by ethylene and gametocides in rice. Acta Phytophysiol. Sin., 7: 381-383.
[0628] Wang, X., QUr, R. F., 1981, Induction of pollen sterility by ethylene and gametocide in rice. ActaPhyto. Sini, 7(4): 381-383.
[0629] Wang, X. I., Meiyu, Y. U. and Yao, F. D., 1995, Effect of CRMS on male sterility of rice plants. Chinese Rice Res. News., 3: 2-4.
[0630] Warmke, H. E. and Overman, M. A., 1972a, Cytoplasmic male sterility in sorghum I callose behaviour in the fertile and sterile anthers. J. Here., 63: 103-108.
[0631] Warmke, H. E. and Overman, M. A., 1972b, Cytoplasmic male sterility in sorghum-II, Tapetal behaviour in fertile and sterile anthers. J Here., 63: 228-233.
[0632] Wit, F., 1960, Chemically induced male sterility, a new tool in plant breeding. Euphytica, 9: 1-9.
[0633] Yaduraju, N. T., 2000, Recent Adv. Herb. Use Res., TART, New Delhi, pp. 42-48.
[0634] Yogendra Sharma, Sharma, 2005, Chemical hybridizing agents (CHA)—a tool for hybrid seed production-review. Agril. Rev., 26(2): 114-123.
[0635] Yu, C., Hu, S., He, P., Sun, G., Zhang, C. Yu, Y., 2006, Inducing male sterility in Brassica napus L. by a sulphonylurea herbicide, itribenuronmethyl. Pl. Bred., 125(1): 61-64.
[0636] Yu, GuiRong, XU, Liyuan, Du, Wenping, Wang, Y. P., 2005, studies on the selection of wheat CHA and the cultivation of hybrid wheat. South West China J. Agri. Sci., 18(1): 29-32.
[0637] Zdrilko, A. F., 1967, Producing plants with male sterility by chemical means. Referat Zhurnal Abstacts, 10: 55-75.

The application's sequence listing, which the Patent Office published only in electronic form, follows.

SEQUENCE LISTING (1009 sequences)

SEQ ID NO: 1 - DNA, 3170 bp, Arabidopsis thaliana
  source 1..3170: mol_type = genomic DNA
tctcaggtcggagctaaattttgagagtaaaataaaaaagcaaaagagagaaattgaaaaaaaaagaaagaaaaataatcctctcttgtttcggctagggtttcgtttttgtttcatcgataaactcaaaggagatggattcaacaaatggtaacggagctgatcttgaatcagcaaatggggcaaacgggagtggggttactgaggcattaccacctcctccaccagttatacctccaaatgtggaaccagttcgtgttaaaactgaacttgctgagaagaaggggccagttcgagttcctatggctcgaaaaggatttggaacaaggggccaaaagatccccttgttaacaaatcatttcaaagtcgatgtggctaatcttcagggtcatttcttccactacagtgtggctctattctatgatgatggtcgtcctgttgaacaaaagggtgttggaagaaaaatccttgacaaggtgcatcagacttaccattctgatctggatggtaaagagtttgcttatgacggtgagaagacgttgtttacatatggagctttgcctagtaacaagatggatttttctgtggtgcttgaggaagtatctgctacaagggctaatggaaacggaagccccaatgggaatgaaagtccaagtgatggtgataggaaaagactgcgtaggcctaaccggtccaaaaactttagagtggagatcagctatgcggccaaaattcctcttcaagctcttgctaatgcaatgcggggacaagaatcagagaattcccaggaggcaatacgggttcttgatatcatattgaggcaacatgctgctagacaaggttgcttgcttgttcgacagtcttttttccacaatgatccaaccaactgtgaaccagttggtggtaacatcttaggatgtaggggatttcactccagtttcagaacaacgcagggtggcatgtcacttaatatggatgttacaaccaccatgatcatcaagcctggtccagtggttgatttcctaattgctaaccaaaatgctagggacccttattcgattgactggtctaaggctaaacgaacccttaagaacctaagggtaaaggtcagcccctcaggccaagaattcaagataaccggattgagtgacaagccttgcagggaacaaacgtttgaattgaagaaaaggaacccaaatgaaaatggagagttcgaaactactgaagttacagttgctgactacttccgcgatacaaggcatattgatttgcaatattctgcggatttgccttgcatcaatgttgggaagccaaagcgacccacttacattcctctcgagctctgcgcgttggttccacttcagaggtacacaaaagcacttaccacgttccaaagatctgcccttgttgagaaatccagacagaaaccccaagagaggatgactgttctgtccaaagctctgaaagttagcaactatgatgcggaaccactcctgcgatcctgtggcatttcgatcagctccaactttactcaggtggagggtcgtgttctaccagctcccaagctgaaaatgggatgtggatctgaaacctttcccagaaatggtcgctggaacttcaacaacaaggaatttgttgagcccaccaaaattcaacgatgggttgttgtcaatttctctgctcgctgtaatgtacgtcaagttgttgatgatctgataaaaattggaggatcaaaaggaattgaaattgcttctccctttcaagtgtttgaggagggtaatcaattccgccgtgctcctcctatgattcgtgttgagaacatgtttaaggacatccaatcgaaactccctggtgtcccacaattcatactatgtgtgctccctgacaaaaagaacagtgatctctatggtccatggaagaaaaaaaacttaactgaatttggcattgttactcaatgcatggctccaacgcggcaacctaatgatcagtatcttactaacttacttctgaagattaatgcaaagcttggaggcctgaactcaatgttaagtgtagagcgtacacctgcgttcactgtgatttctaaggttccaaccattatccttgggatggatgtttcacatggatctcctggacagtctgatgtcccgtccatcgctgctgtggtgagttctagggagtggccactgatatccaaatatagagcatctgttcggacacagccttctaaggctgagatgattgagtcccttgtcaagaaaaatggaactgaagacgatggcattatcaaggagttgctggtagatttctacaccagctcgaataagagaaaaccagagcatatcataattttcagggatggtgtgagtgaatctcaattcaatcaggttctgaatattgaacttgatcagatcatcgaggcttgcaagctcttagacgcaaattggaacccaaagttccttttgttggtggctcaaaagaatcatcataccaagttcttccagccaacgtctcctgaaaatgttcctccagggacaatcattgacaacaaaatatgtcacccaaagaacaatgatttctacctctgtgctcacgctggaatgattggaactacccgcccaactcactaccacgtcctgtatgatgagattggtttttcagctgacgaacttcaggaacttgtccactcgctctcctatgtgtaccaaagaagcaccagtgccatttctgttgttgcgccgatctgctatgctcacttggcagctgctcagcttgggacgttcatgaagtttgaagatcagtctgagacatcatcaagccatggtggtatcacagctccaggaccaatctctgttgcacagctcccaagactcaaagacaacgtcgccaactccatgttcttctgttaaatgagcagccctacttggctcagtaagtaagtagtagttcaataggctatctgactttcagcttaggatctctctcggccttgaagccaggcatcgacactaaggcttggaatgttttttgtgactattatcgccagccttgtttgcctgttggggtttgaatatgcttttgtcccccttaacaattcggttgtttaattaaagacttattgtagtgaatatctaagttcaggaagttacccttttgtctaaatcgttctt

SEQ ID NO: 2 - DNA, 3189 bp, Arabidopsis thaliana
  source 1..3189: mol_type = genomic DNA
tctcaggtcggagctaaattttgagagtaaaataaaaaagcaaaagagagaaattgaaaaaaaaagaaagaaaaataatcctctcttgtttcggctagggtttcgtttttgtttcatcgataaactcaaaggtgatgattttagggtcttgagatggattcaacaaatggtaacggagctgatcttgaatcagcaaatggggcaaacgggagtggggttactgaggcattaccacctcctccaccagttatacctccaaatgtggaaccagttcgtgttaaaactgaacttgctgagaagaaggggccagttcgagttcctatggctcgaaaaggatttggaacaaggggccaaaagatccccttgttaacaaatcatttcaaagtcgatgtggctaatcttcagggtcatttcttccactacagtgtggctctattctatgatgatggtcgtcctgttgaacaaaagggtgttggaagaaaaatccttgacaaggtgcatcagacttaccattctgatctggatggtaaagagtttgcttatgacggtgagaagacgttgtttacatatggagctttgcctagtaacaagatggatttttctgtggtgcttgaggaagtatctgctacaagggctaatggaaacggaagccccaatgggaatgaaagtccaagtgatggtgataggaaaagactgcgtaggcctaaccggtccaaaaactttagagtggagatcagctatgcggccaaaattcctcttcaagctcttgctaatgcaatgcggggacaagaatcagagaattcccaggaggcaatacgggttcttgatatcatattgaggcaacatgctgctagacaaggttgcttgcttgttcgacagtcttttttccacaatgatccaaccaactgtgaaccagttggtggtaacatcttaggatgtaggggatttcactccagtttcagaacaacgcagggtggcatgtcacttaatatggatgttacaaccaccatgatcatcaagcctggtccagtggttgatttcctaattgctaaccaaaatgctagggacccttattcgattgactggtctaaggctaaacgaacccttaagaacctaagggtaaaggtcagcccctcaggccaagaattcaagataaccggattgagtgacaagccttgcagggaacaaacgtttgaattgaagaaaaggaacccaaatgaaaatggagagttcgaaactactgaagttacagttgctgactacttccgcgatacaaggcatattgatttgcaatattctgcggatttgccttgcatcaatgttgggaagccaaagcgacccacttacattcctctcgagctctgcgcgttggttccacttcagaggtacacaaaagcacttaccacgttccaaagatctgcccttgttgagaaatccagacagaaaccccaagagaggatgactgttctgtccaaagctctgaaagttagcaactatgatgcggaaccactcctgcgatcctgtggcatttcgatcagctccaactttactcaggtggagggtcgtgttctaccagctcccaagctgaaaatgggatgtggatctgaaacctttcccagaaatggtcgctggaacttcaacaacaaggaatttgttgagcccaccaaaattcaacgatgggttgttgtcaatttctctgctcgctgtaatgtacgtcaagttgttgatgatctgataaaaattggaggatcaaaaggaattgaaattgcttctccctttcaagtgtttgaggagggtaatcaattccgccgtgctcctcctatgattcgtgttgagaacatgtttaaggacatccaatcgaaactccctggtgtcccacaattcatactatgtgtgctccctgacaaaaagaacagtgatctctatggtccatggaagaaaaaaaacttaactgaatttggcattgttactcaatgcatggctccaacgcggcaacctaatgatcagtatcttactaacttacttctgaagattaatgcaaagcttggaggcctgaactcaatgttaagtgtagagcgtacacctgcgttcactgtgatttctaaggttccaaccattatccttgggatggatgtttcacatggatctcctggacagtctgatgtcccgtccatcgctgctgtggtgagttctagggagtggccactgatatccaaatatagagcatctgttcggacacagccttctaaggctgagatgattgagtcccttgtcaagaaaaatggaactgaagacgatggcattatcaaggagttgctggtagatttctacaccagctcgaataagagaaaaccagagcatatcataattttcagggatggtgtgagtgaatctcaattcaatcaggttctgaatattgaacttgatcagatcatcgaggcttgcaagctcttagacgcaaattggaacccaaagttccttttgttggtggctcaaaagaatcatcataccaagttcttccagccaacgtctcctgaaaatgttcctccagggacaatcattgacaacaaaatatgtcacccaaagaacaatgatttctacctctgtgctcacgctggaatgattggaactacccgcccaactcactaccacgtcctgtatgatgagattggtttttcagctgacgaacttcaggaacttgtccactcgctctcctatgtgtaccaaagaagcaccagtgccatttctgttgttgcgccgatctgctatgctcacttggcagctgctcagcttgggacgttcatgaagtttgaagatcagtctgagacatcatcaagccatggtggtatcacagctccaggaccaatctctgttgcacagctcccaagactcaaagacaacgtcgccaactccatgttcttctgttaaatgagcagccctacttggctcagtaagtaagtagtagttcaataggctatctgactttcagcttaggatctctctcggccttgaagccaggcatcgacactaaggcttggaatgttttttgtgactattatcgccagccttgtttgcctgttggggtttgaatatgcttttgtcccccttaacaattcggttgtttaattaaagacttattgtagtgaatatctaagttcaggaagttacccttttgtctaaatcgttctt

SEQ ID NO: 3 - DNA, 2340 bp, Arabidopsis thaliana
  source 1..2340: mol_type = genomic DNA
ttgagacaacctcgaagtaatgcaaacactttaaggccggatccgattcgtgacccgaatagtttccggattcggagcccaggtgttgtttctgtcttcggttcattgggaaggatgagtacattgttaccatttcctgacctcaacctcatgccggattctcaatcctccaccgccggaaccacagccggcgacactgtagtcaccggaaagttagaagtgaaatcggaaccaattgaggaatggcaaactccaccatcgtctacctccgatcaatcagccaataccgatctcatcgccgagtttattcgtatctcagagctcttccgctcggcattcaagccactgcaggtcaaaggattagacggagtctccgtatacggattggattctggtgccatcgttgctgtaccggagaaagaaaaccgggaattgattgaaccgcctccaggatttaaggataatcgagtctccaccgtcgttgtctcgccgaaattcgagagaccgagagagctagcgagaattgcaattctaggtcatgaacaacggaaggaactccgacaagtcatgaaacgaactaggatgacttatgagtctcttcggattcatctaatggcggagagtatgaagaatcatgtacttggtcaagggcgtagacggaggagcgatatggcggctgcgtatataatgagggatcggggactgtggttgaactatgataagcacatagttggtccagtcacaggggttgaagtaggggatatattcttctaccgtatggaattgtgtgtgctgggcttacacggccagacacaagccgggattgattgtttaacggctgaacggagcgccactggagagcctatagctaccagcattgttgtctcaggtggttatgaggatgatgaagatacaggagatgttttggtttatactggtcacggtggtcaggatcatcaacacaagcagtgtgataaccagaggctagtaggtgggaatctgggaatggagagaagtatgcactacggtatcgaggtacgtgtgattagaggtattaagtatgagaacagtataagctcgaaggtgtatgtatatgatggtttgtataagatagtagattggtggtttgctgtggggaagtctggttttggggtttttaaatttaggttagtaagaattgaagggcaaccgatgatgggcagtgcggtaatgaggtttgcacaaactcttagaaataagccatcgatggttaggcctactggttatgttagctttgacctttctaacaagaaggagaatgtacccgtgtttctatataatgatgtagatggtgatcaagaaccgagacattatgagtacattgcaaaagctgtctttcctcctggaatttttggtcagggggggatcagcaggactggctgcgagtgtaagctctcttgtactgatgattgtctctgtgcaaggaagaacggtggtgagtttgcatatgatgataacgggcatctattgaaaggaaagcatgtggtatttgaatgtggggaattctgcacttgtggtccgagctgtaagagccgtgtgacacagaagggattgaggaacaggctagaggttttcagatcgaaggaaaccggttggggtgtcaggacacttgatctaattgaagctggtgctttcatatgcgaatatgcaggtgtagttgtcacgagacttcaagccgagattctgtcaatgaatggggatgttatggtctatcctggtcggttcacagaccaatggcgtaactggggtgatttatctcaagtatacccagattttgttaggccgaattatccatctctccctccactggatttctcaatggatgtgtcaaggatgaggaacgtggcttgctacattagtcacagcaaagaaccaaatgtgatggtgcaatttgttttgcatgaccacaatcacctgatgttcccccgtgtgatgctttttgcgctggagaatatctcaccgttggccgagctaagcctggattacggcttggcagatgaagtgaacggcaagctcgccatctgcaactagtttttacaaagtttgtttttgtgctatagcttgagccttgagatggagaaaattttgatcaaagcctttctctgctcgtttgttgttatgtcttccaacctttctgtgaagcaagaatgggaggcatggtcggtgagtgttctgcatccattttttgggggtaaaaacttctctttgtcaaatgtgtttgtacttttgttctgttattaatgtactgaaatttttgtatgtttctctctcccccttatgttagagcttaagctgatatat

SEQ ID NO: 4 - DNA, 2534 bp, Arabidopsis thaliana
  source 1..2534: mol_type = genomic DNA
atacaccaaatcaaacacaccaccatttttacccagaaatttgagtaccaagagagctctttttcatcctaaagagatcttcaaatttagatttcaacacataaaagattctgtaggaaaatatttgtgtaagagcttcttctccgccatggatttagcttgaaaggtgttctccaaacaaaacccatttcttcgatttctctgataaactcgtcaaacccatttcgcttctcgttgcaaaaaatgggttcttctcacattcctcttgatccgtctctaaatccgtcaccttcactgatcccaaagcttgaaccagtcactgaatcaacccaaaacttggcctttcaacttccaaacacaaacccacaagccctaatttcatcagccgtctccgatttcaacgaagccacagacttttcctcagattacaacaccgtcgccgagtcagcccggtctgctttcgctcaacggcttcaacgtcacgatgatgttgcggttcttgattccttaaccggagcaatcgtaccggttgaggagaatccggaaccggaaccgaatccttactcaaccagtgactcttcaccgtcggttgctactcaacgacctagaccgcagccacgttcgtcggagctagtgaggatcactgatgttggacctgaaagtgagagacagtttcgtgaacatgtgaggaagacgagaatgatttatgattctcttaggatgtttttgatgatggaagaagctaaacgtaatggggttggtggaagaagagctagagctgatggtaaagctggtaaagctggttcaatgatgagagattgtatgttgtggatgaatcgtgataaacgaatcgtcggttcgattcccggtgttcaagttggggatatcttcttctttaggtttgagttatgtgtcatgggcttacatggacaccctcaatctgggatcgattttcttacagggagtcttagttctaatggggagccaatagctactagtgtgattgtttctggtgggtatgaggatgatgatgatcaaggagatgtgattatgtatacaggtcagggtggacaagataggcttggaaggcaagctgaacatcagaggctggaaggtggaaaccttgcgatggaacggagtatgtattatgggattgaagtgagagttattagagggttgaagtatgagaatgaggtttctagtagagtttatgtttatgatgggttgtttaggattgttgattcttggtttgatgttgggaagtctggtttcggtgtgtttaaatatcggttggagaggattgaaggacaggctgagatgggtagttcggtgttgaagtttgctaggactcttaagactaatccattgtctgtgagaccgagaggttacatcaatttcgatatctcgaatgggaaggagaatgttcctgtctatttgtttaacgacattgacagcgatcaagaacctttgtattatgagtatcttgcgcaaacttcgtttcctcctggcttatttgttcagcaaagtggtaatgcaagtggatgtgactgtgtcaatggttgtggcagtggctgcctttgtgaagccaagaattcaggtgagattgcttatgattataatgggacgctaataagacagaaaccgttgatacatgaatgtggatcagcgtgtcagtgccctccaagctgtcgaaaccgtgtgactcaaaagggtttgaggaataggctagaagtgtttaggtcactggaaacgggttggggagttcggtctttggatgtattacatgctggtgcttttatttgtgagtatgctggggttgctttgacaagggaacaagccaacattctgaccatgaacggtgatacattggtatatcctgctcgtttctcttctgcgagatgggaagattggggagatctgtctcaggtccttgctgatttcgagcggccttcttatcctgatattcctccggttgatttcgcaatggatgtgtccaagatgaggaatgttgcttgttacataagccacagtactgatccgaatgtcattgtccagtttgtactccatgatcacaacagtctcatgttccctagagtcatgcttttcgctgctgaaaacatccctcccatgactgagctcagccttgattacggagtagttgatgattggaacgccaagcttgccatttgtaattaaaattcaaccgttaaaatcgtggttcttggccatattttccagttggtgacatgaagaatgaaggaaaggaagtgtgcagaagctaaggtttaagagaccccactcctcccatttcgagtttttgggtatctttgaacatttgggagtgtgtgtttttgggggtaataggatacaaaacttaaaagctgtttgttttgtttgtactgttttgttcttgggtttgtctcgtactaatcaagtaaaacaaatgtctcgtactctatgactctctctttctaaattggtattagatgaaattacaccatatattttgatgaaaaacatttgcgttcaatcgt

SEQ ID NO: 5 - DNA, 3786 bp, Arabidopsis thaliana
  source 1..3786: mol_type = genomic DNA
ctctttcgtttactcgccgaagtcaaataaaaacgagagatggtttcagctatggcgggttctccctttttcgcatactcactaatcctctctccagtctccgcattgcttctatttctacctcgtatccagtattagattgaaaaagatctcactgtgagaaatggggtcagagggaaatatgaagaagtcggttgtgacacaagtaagcattggtggatttggggaatccactactgcaaaacaactcacagattaccttgaagatgaagtaggaattgtttggcgttgcagattaaaaacttcgtggactcctcctgggtcttatcctaattttgaaatcgcagacacttcaaatatccccagtattgatgaatataagaaagtggagcctcatgcctttgtccatttcgcagtttttgaatcagctggtcgtgccatggatgctgcagggcaatgcaacctcatcttggatggccagccgttaaaagtcagtttgggtcctaagaatccatattcccttaatcaaagaagaagaacgactgtaccttataagttggctggtattacacttgagattgggacattggtttctcgggatgatttttttgtttcttggagagctgaaggggttgatttcctggtggatccttttgacaacacgtgcaagttttgtttcagaaagagcactgccttctctttcaaggatgcagtgatgcatgctgtgatcaattgtgattataagttggagttattggtgagagatatacaaacagtcaggcagtataaaaccttgcatggctttgtgcttattttgcagctggcttcttcaccccgtgtctggtacagaactgctgatgatgatatttacgatactgtccctggcgatctcttggatgatgatgatccttggatccgtaccactgattttactcaagttggggcaattggtcgatgtcattcatatcgagtgctcatatctccgcggtatgaaaataaactgagaacagccttagattattttaggatgcggagggtgcaagaggaacgtgtgaggtggcctccccgtatccgtaatgagccttgttttggggagcctgtgtcagatcatttcttctgcattcatcacaaggaaggaatctcttttgagatcatgtttctagtaaattcggtattgcacaggggtgtctttaaccagtttcagttgactgagcgattctttgatcttctaagaaaccaacccaaggacgtcaatatagcttctctcaagcatctctgtacctataaacgaccagtttttgatgcgtacaagaggttgaagcttgttcaggaatggattcagaaaaatccaaagcttttagggagtcatgaacaatctgaggatatctctgagatcagaagactagtaattaccccaaccagagcctattgcctacccccagaagttgagctctccaacagggtactcaggagatacaaagctgttgctgaaagatttttgcgggtaactttcatggatgaaagtatgcagaccataaattcgaatgttctctcttactttgttgctcctattgtgaaggatttgacatcaagttctttctcccagaagacctacgtttttaaaagagtgaagagcatattaaccgatgggtttaaactatgtggtagaaaatacagttttctagcattctcagccaatcaactgagagaccgctctgcatggttctttgctgaagacgggaaaacacgtgtgtcagatataaaaacatggatggggaagttcaaagacaagaatgtggcaaaatgtgctgctaggatgggcctgtgcttctcctccacatatgccactgtagatgtcatgcctcacgaggttgacactgaggttccagatattgagagaaatgggtatgttttctctgacggaattggtacaatcacacctgacctcgctgacgaagtaatggagaaacttaagttggatgtgcactacagcccttgtgcttatcagatacgttacgcaggtttcaaaggggttgttgctcgttggccatcaaaaagtgatggaatcaggctagcccttcgagacagtatgaagaagttcttttccaaacatacgatcttggagatctgttcctggacgaggtttcaacctgggttcttaaatcggcagataattacccttctatccgtactaggtgttccggatgaaatattctgggatatgcaggaatccatgctctataaactgaaccgcatccttgatgatacagatgtggcatttgaagttctcacggcatcatgtgctgaacagggaaacactgcagctatcatgcttagtgcaggtttcaaaccaaaaaccgagccgcatctacgcgggatgttgtcttcagtcagaattgcacaactctggggtctcagagaaaaatctcgtatttttgttacttcaggaaggtggctaatgggttgcctagacgaagcagggatacttgaacatggccaatgctttattcaagtctctaaaccgtctatagaaaattgtttctccaaacatgggtctcgttttaaggagacaaagacagatctggaagtagttaaaggctatgtagccattgctaagaatccttgtcttcacccaggggatgtaaggattttagaagctgttgatgtaccccagctgcatcacatgtatgactgccttattttccctcagaaaggtgataggccgcatacaaacgaagcttctggcagtgaccttgacggggacctgtactttgtggcttgggatcagaaactcatccctcccaacaggaaaagctatccggccatgcattatgatgcagctgaagagaagagtttaggccgtgctgtcaaccaccaggacataatcgatttctttgcaagaaacttggcgaatgagcagttgggcacaatttgcaatgcacacgtcgttcatgctgatagaagtgagtatggagccatggacgaagaatgtttgctactggcagaactagctgccactgcagttgatttcccaaagacagggaaaattgtgtcaatgcccttccacctaaaaccaaaactctacccagatttcatgggaaaagaagactaccaaacttacaagtcgaacaaaatcttgggtcggctttacagacgggtaaaagaggtttatgatgaagatgcagaagcttcctcagaagaaagcacagacccaagtgccatcccttatgacgctgttcttgaaataccgggatttgaagatttgatccctgaggcatggggtcacaaatgtttgtacgacgggcaactcattggtcttcttgggcaatacaaggtgcagaaagaggaagagattgtgacgggtcacatctggtccatgcccaaatacacaagcaagaaacaaggcgaactgaaagaaagactgaagcattcttataattcccttaaaaaggagttcaggaaagtatttgaggaaacaatccctgaccatgaaaatctcagcgaggaggaaaaaaacatcttgtatgagaagaaggcttcagcttggtatcatgtaacttaccatcccgagtgggtgaagaagtctttagagctgcaagatccagatgagtccagtcatgcggcgatgctgagttttgcttggattgcagctgattatcttgcaagaatcaaaatccggtcacgggaaatgggaagtatcgactcagccaagcctgttgattctttggctaagtttcttgctcagcgtctctaaaaggttatgtttaatgccgtaaggccactctg

SEQ ID NO: 6 - DNA, 3452 bp, Arabidopsis thaliana
  source 1..3452: mol_type = genomic DNA
atggtgtcagagacgacgacgaaccgatcaacggttaaaatctcaaacgttcctcaaaccatagtcgccgacgaactcctccggttcttagaactccacctcggcgaagatactgtattcgcactcgaaatcccaacaactcgtgacaattggaagccaagagacttcgctcgagtacaattcactaccctcgaagtcaaatctcgagcccagcttctctcttctcaaagcaagctccttttcaaaacccataacctaagactctctgaagcttatgatgatatcatccctcgtcctgtagatccaaggaaaaggctagacgacatcgttttgactgttgggtttcctgagtctgatgaaaaaaggttttgtgccctagaaaaatgggatggtgtgaggtgttggattttgactgagaagagaagagttgagttttgggtttgggaaagtggtgattgttataagattgaagttaggtttgaggatattattgaaactcttagttgttgtgttaatggtgacgcttctgagattgatgcatttcttctcaagctgaaatatggaccgaaggtatttaaaagagtaacagttcacatagccacaaagtttaagtctgatcggtacagattctgcaaggaggattttgatttcatgtggattcggacaactgatttctctggttcgaaatcaattggtacatcaacttgcttttgtttggaagtccacaatggctcaacgatgttagacattttctcgggcttaccttactaccgagaagacactttgagtctaacttatgtggatgggaagacctttgcttctgcagctcaaattgttcccctcttgaatgccgccattttggggttagagtttccatatgagatccttttccaactcaatgcgcttgttcatgcgcagaaaatcagtctttttgctgcgtcagatatggaactgatcaaaatccttcgtggtatgagtttggaaaccgcattggtgatcctcaagaaacttcaccagcaaagttctatatgttatgatcctgtcttctttgtcaagactcagatgcaatctgtggttaagaagatgaagcattcccctgcatcagcttataaaagattgaccgagcagaacatcatgagttgtcagagagcttacgttacaccctcaaagatctatctgttgggtccagagcttgagactgcaaattatgttgtgaagaactttgcagagcatgtctcggatttcatgagagttacttttgtggaagaagattggagcaagcttcccgcaaatgctctctctgtgaactccaaggaaggctattttgtgaagccctctagaaccaacatttataacagggtgttgtcaatccttggagaagggattaccgttgggcctaagaggtttgagttcttggctttttcagcgagccaactgcgaggaaattcggtctggatgtttgcttctaacgagaaagtaaaagcggaagatataagagaatggatgggttgtttccgtaaaatccgaagcatttccaaatgtgctgctaggatgggtcagttgttcagtgcttcgcggcaaacacttattgtccgtgcacaagatgtggagcagattcccgacatcgaagtgacaactgatggtgctgattactgcttctcggatggcattgggaaaatttcacttgcatttgccaagcaagttgcacagaagtgtggattgagtcatgtcccttctgcctttcaaattcgatacggtggctacaaaggtgtgattgctgttgaccgcagttccttccgaaagttgtctctgcgtgatagtatgcttaaatttgactcgaacaacaggatgctgaacgttaccaggtggacagagtcgatgccttgcttcttaaaccgggagatcatttgccttttgtcgacccttggaatagaagatgcaatgtttgaggcgatgcaagcggtgcatttatctatgcttgggaatatgcttgaagaccgcgatgcagcacttaatgttctgcagaaattgagcggagaaaattccaagaatttgctagttaagatgctgcttcaaggatatgcaccgagttcagaaccttacctctcaatgatgcttcgtgtgcaccacgagagccagctttctgaactaaagagcagatgcaggatacttgtaccgaaaggacggatcttgatcggttgcatggatgaaatgggtatcctggagtatggccaagtgtatgttcgtgtaaccctgactaaagcggaactgaaatctcgcgatcagagctactttcgcaagattgatgaggaaacatctgtggttattgggaaagtggtcgtgacgaaaaacccatgtcttcaccctggagatattagagttcttgatgctatatatgaggtccatttcgaagaaaagggatatctcgactgcatcatctttcctcagaagggagaaagaccacatccaaatgaatgttctggtggcgatctcgacggagaccagttttttgttagctgggatgagaagattatacctagcgaaatggaccctccaatggactatgctggaagcaggcctcgtctaatggatcatgacgtcacgttagaggaaatccacaaattttttgtggattatatgataagcgacacgcttggggtgatctcaactgcacatttggttcacgcagaccgtgaccctgaaaaagcccggagccagaagtgtctagagttagcaaatcttcactctagggctgttgattttgcaaaaactggagctccagctgagatgccttatgccttaaagcccagagagttccctgattttctggaacggtttgagaaaccaacatacatctctgagtctgtgtttgggaaactataccgtgctgtgaagagctctctagcacagagaaagccagaagctgagagcgaggacacggtagcttatgatgtgacacttgaagaagctggctttgagagctttatagagacagcgaaagcccatagagacatgtatggtgagaaactgacctcgttgatgatatactatggagctgctaacgaagaggagattctcacaggcattttgaaaaccaaggagatgtatctggcgagagataaccggaggtatggtgatatgaaggatagaattacgctttccgtgaaagatttgcataaagaggccatgggatggttcgagaaaagctgcgaggacgaacaacagaagaagaagctagcatcggcgtggtactatgtaacatacaatccaaaccatcgcgatgagaagttgacattcttgagtttcccatggatcgtaggtgacgttttgcttgatataaaggctgaaaatgcacagagacagagcgttgaagagaaaacaagtggacttgtatccatttgattgccctatataacacttggtgtagtagaattgctagttaaaggactata

SEQ ID NO: 7 - DNA, 3955 bp, Arabidopsis thaliana
  source 1..3955: mol_type = genomic DNA
aatttcttcacttctctttgactgcttcgcttaaccactgaaaaagtgtgccaagggttttctacgtcgaatctctccgcattctcagcgattttccggcgacgtttactctgcactcctccgacaccgccgttttactccatcgtgccagctttaagcaatcaagggtttttgttcgtacagtgtgttttgaggtatgccagatatggacattgatgtgaaggatcttgaagagttcgaggctactactggggagatcaatctatctgagctaggagaaggttttctgcagagtttctgcaaaaaagctgcaacttctttctttgataagtatggacttataagtcatcagctcaactcctacaactacttcattgaacacgggcttcagaatgtgtttcaatcctttggtgagatgcttgtggaaccgtcttttgatgttgtaaagaagaaggataatgattggagatacgcaacggtgaagttcggagaagtcactgtggagaagcctactttcttttcggatgacaaggagcttgagtttctcccatggcatgctaggcttcagaacatgacatactctgcaaggatcaaagtcaatgtccaagttgaggtgttcaagaatactgttgttaaaagcgacaaattcaagacaggacaagacaactatgtcgagaagaagatactggatgtcaaaaagcaggacattctaattggtagcattcctgtcatggtgaaatctatcctttgcaaaacaagcgagaaagggaaagaaaactgcaaaaagggggattgtgcctttgatcagggtggatatttcgtgataaagggggctgagaaggtgtttatagctcaagaacagatgtgcacaaagagactgtggatttctaattcaccatggacagtctccttcaggtccgaaaataaaagaaatagattcattgtgcgcctctcggagaatgagaaagcagaagactataagagaagggagaaagtactgacagtgtacttcttgtcgactgagattccagtctggctcctcttctttgcgctaggtgtttcgtcagacaaagaagccatggatctaattgcttttgatggtgatgatgcaagcattaccaacagtctcatagcttctatccatgtagctgatgcagtttgtgaagcttttcgctgtgggaacaatgctttaacatatgttgaacagcagatcaaaagcaccaaattccctcctgctgaaagtgtggatgagtgcctccatctgtatttgtttccaggcctccaaagtttgaagaagaaagctcgattcctgggctatatggtgaagtgccttctgaactcgtatgcgggaaaaagaaaatgcgaaaacagggacagtttccggaataagcgaattgagctcgctggagaactattggagagggagataagggtgcatctggcacatgctagaagaaagatgaccagggccatgcagaaacacctctcaggcgatggtgatttgaagcctattgagcattatttggatgcttctgttatcacaaatgggcttagtagagccttctctactggagcatggtctcatcctttcaggaagatggaaagggtttcaggtgttgtggctaatttgggtcgtgcaaatccattgcagactctgattgatctgaggagaacgcgacagcaagtcttatataccggcaaggttggagatgctagatatccgcacccctctcactggggcagagtatgctttttgtcaactccagacggtgaaaattgtggtcttgtgaagaacatgtctcttctgggacttgtgagcacccaaagtttggagtctgtggtggaaaagctcttcgcttgtggaatggaagagctgatggatgatacatgcacaccattgtttggcaaacataaagttcttctcaatggagactgggttggattatgtgcagattctgaatcctttgtcgcggagttaaaaagcaggcggcgccaaagtgaattacctcgtgagatggaaatcaagcgagataaagatgacaatgaggtaagaattttcactgatgctggtagactactccgacctctcttggttgtggaaaatctccaaaagttgaagcaagaaaaaccttcacagtatccttttgaccatcttcttgaccatgggattctcgagctgatcgggattgaggaagaagaagactgtaatacagcatggggaatcaaacagcttctgaaggaaccaaagatatacacacattgcgaattggacctgtcattcttgttgggtgtgagctgtgcagttgtcccatttgcaaatcacgaccatgggagaagagttctctaccagtcccagaagcactgccaacaagccattggattctcatcaacgaaccctaacatccgctgcgatacgctgtcccagcagctgttctatcctcagaagccactgttcaagacattggcgtcggagtgtcttaaaaaagaagtgctgttcaatggccagaacgcaattgttgctgtgaatgttcatctcgggtacaaccaagaggattccattgtgatgaacaaggcttcattggaacgtggtatgttccgttcagagcagattagaagctacaaagcagaggttgatgctaaagactcagagaagaggaagaagatggatgagcttgttcagtttggaaagacacacagcaaaatcggcaaagtagacagccttgaagatgacgggtttcctttcattggtgctaacatgagtactggcgatattgtcattggcagatgcaccgagtctggggctgatcacagtataaagctcaagcacactgagagaggaattgtgcaaaaagtggtattatcatctaatgatgaagggaagaattttgctgcggtttctctgagacaggttcgttctccatgccttggagataagttttccagtatgcatggccagaagggtgttttaggctacctagaggaacagcagaattttcctttcacgatccaaggcatagttcctgatattgtgataaacccgcacgctttcccttctaggcaaacaccaggtcaactcttggaggctgctctctccaaaggaatcgcttgtcctatacaaaaggagggtagctctgctgcatacaccaaattgacacgtcatgccactcctttctccactccgggtgtcactgaaatcaccgagcagcttcacagggccggcttttcaagatggggaaacgaaagggtctacaacggtagatcaggtgagatgatgcgttctatgatattcatgggcccaactttctaccagcgacttgtccacatgtcagaggacaaagtcaagttcaggaacactggaccagtccacccgctcacacgccagccagttgcagacaggaagagatttggcgggataaaatttggagaaatggagcgagactgcctaatagctcacggtgcatcagctaatctgcatgagcgtctcttcactctaagtgactcttctcagatgcacatctgcagaaaatgtaagacctatgcgaatgtgatcgagaggactccaagcagtggaagaaagattagagggccatattgtagagtctgcgtatcctcagaccatgtggttagggtctatgttccgtatggagctaagcttctgtgtcaggagctgttcagcatgggcatcactctcaacttcgacaccaagctatgctgattccccctctttattatgtaaatggcttattgccttaagaccatgttatgtgtagtttgcttcagtcccggttctggttagtagtataggttttggtttggttgattcggtaagggttatccgaaccgaagaaatcgtaaaaccgagccactgatgactgaactaacccgtaagtgttgcttttgtgagatttgactctttaaccgttaataattctcggatctaaagtaaagttttagg

SEQ ID NO: 8 - DNA, 3993 bp, Arabidopsis thaliana
  source 1..3993: mol_type = genomic DNA
tactagtactagtgacgtcaatttcttcacttctctttgactgcttcgcttaaccactgaaaaagtgtgccaagggttttctacgtcgaatctctccgcattctcagcgattttccggcgacgtttactctgcactcctccgacaccgccgttttactccatcgtgccagctttaagcaatcaaggtacctattttagggtttttgttcgtacagtgtgttttgaggtatgccagatatggacattgatgtgaaggatcttgaagagttcgaggctactactggggagatcaatctatctgagctaggagaaggttttctgcagagtttctgcaaaaaagctgcaacttctttctttgataagtatggacttataagtcatcagctcaactcctacaactacttcattgaacacgggcttcagaatgtgtttcaatcctttggtgagatgcttgtggaaccgtcttttgatgttgtaaagaagaaggataatgattggagatacgcaacggtgaagttcggagaagtcactgtggagaagcctactttcttttcggatgacaaggagcttgagtttctcccatggcatgctaggcttcagaacatgacatactctgcaaggatcaaagtcaatgtccaagttgaggtgttcaagaatactgttgttaaaagcgacaaattcaagacaggacaagacaactatgtcgagaagaagatactggatgtcaaaaagcaggacattctaattggtagcattcctgtcatggtgaaatctatcctttgcaaaacaagcgagaaagggaaagaaaactgcaaaaagggggattgtgcctttgatcagggtggatatttcgtgataaagggggctgagaaggtgtttatagctcaagaacagatgtgcacaaagagactgtggatttctaattcaccatggacagtctccttcaggtccgaaaataaaagaaatagattcattgtgcgcctctcggagaatgagaaagcagaagactataagagaagggagaaagtactgacagtgtacttcttgtcgactgagattccagtctggctcctcttctttgcgctaggtgtttcgtcagacaaagaagccatggatctaattgcttttgatggtgatgatgcaagcattaccaacagtctcatagcttctatccatgtagctgatgcagtttgtgaagcttttcgctgtgggaacaatgctttaacatatgttgaacagcagatcaaaagcaccaaattccctcctgctgaaagtgtggatgagtgcctccatctgtatttgtttccaggcctccaaagtttgaagaagaaagctcgattcctgggctatatggtgaagtgccttctgaactcgtatgcgggaaaaagaaaatgcgaaaacagggacagtttccggaataagcgaattgagctcgctggagaactattggagagggagataagggtgcatctggcacatgctagaagaaagatgaccagggccatgcagaaacacctctcaggcgatggtgatttgaagcctattgagcattatttggatgcttctgttatcacaaatgggcttagtagagccttctctactggagcatggtctcatcctttcaggaagatggaaagggtttcaggtgttgtggctaatttgggtcgtgcaaatccattgcagactctgattgatctgaggagaacgcgacagcaagtcttatataccggcaaggttggagatgctagatatccgcacccctctcactggggcagagtatgctttttgtcaactccagacggtgaaaattgtggtcttgtgaagaacatgtctcttctgggacttgtgagcacccaaagtttggagtctgtggtggaaaagctcttcgcttgtggaatggaagagctgatggatgatacatgcacaccattgtttggcaaacataaagttcttctcaatggagactgggttggattatgtgcagattctgaatcctttgtcgcggagttaaaaagcaggcggcgccaaagtgaattacctcgtgagatggaaatcaagcgagataaagatgacaatgaggtaagaattttcactgatgctggtagactactccgacctctcttggttgtggaaaatctccaaaagttgaagcaagaaaaaccttcacagtatccttttgaccatcttcttgaccatgggattctcgagctgatcgggattgaggaagaagaagactgtaatacagcatggggaatcaaacagcttctgaaggaaccaaagatatacacacattgcgaattggacctgtcattcttgttgggtgtgagctgtgcagttgtcccatttgcaaatcacgaccatgggagaagagttctctaccagtcccagaagcactgccaacaagccattggattctcatcaacgaaccctaacatccgctgcgatacgctgtcccagcagctgttctatcctcagaagccactgttcaagacattggcgtcggagtgtcttaaaaaagaagtgctgttcaatggccagaacgcaattgttgctgtgaatgttcatctcgggtacaaccaagaggattccattgtgatgaacaaggcttcattggaacgtggtatgttccgttcagagcagattagaagctacaaagcagaggttgatgctaaagactcagagaagaggaagaagatggatgagcttgttcagtttggaaagacacacagcaaaatcggcaaagtagacagccttgaagatgacgggtttcctttcattggtgctaacatgagtactggcgatattgtcattggcagatgcaccgagtctggggctgatcacagtataaagctcaagcacactgagagaggaattgtgcaaaaagtggtattatcatctaatgatgaagggaagaattttgctgcggtttctctgagacaggttcgttctccatgccttggagataagttttccagtatgcatggccagaagggtgttttaggctacctagaggaacagcagaattttcctttcacgatccaaggcatagttcctgatattgtgataaacccgcacgctttcccttctaggcaaacaccaggtcaactcttggaggctgctctctccaaaggaatcgcttgtcctatacaaaaggagggtagctctgctgcatacaccaaattgacacgtcatgccactcctttctccactccgggtgtcactgaaatcaccgagcagcttcacagggccggcttttcaagatggggaaacgaaagggtctacaacggtagatcaggtgagatgatgcgttctatgatattcatgggcccaactttctaccagcgacttgtccacatgtcagaggacaaagtcaagttcaggaacactggaccagtccacccgctcacacgccagccagttgcagacaggaagagatttggcgggataaaatttggagaaatggagcgagactgcctaatagctcacggtgcatcagctaatctgcatgagcgtctcttcactctaagtgactcttctcagatgcacatctgcagaaaatgtaagacctatgcgaatgtgatcgagaggactccaagcagtggaagaaagattagagggccatattgtagagtctgcgtatcctcagaccatgtggttagggtctatgttccgtatggagctaagcttctgtgtcaggagctgttcagcatgggcatcactctcaacttcgacaccaagctatgctgattccccctctttattatgtaaatggcttattgccttaagaccatgttatgtgtagtttgcttcagtcccggttctggttagtagtataggttttggtttggttgattcggtaagggttatccgaaccgaagaaatcgtaaaaccgagccactgatgactgaactaacccgtaagtgttgcttttgtgagatttgactctttaaccgttaataattctcggatctaaagtaaagttttaggaaaact

SEQ ID NO: 9 - DNA, 3715 bp, Arabidopsis thaliana
  source 1..3715: mol_type = genomic DNA
ctcgtcgactgctcgcttaaccattgaaaaagtgagccaagggttttgattattttcgacgtctacggcgaatctctccgcatcttcatcgatttcccggcgacgtttactaccgccgttttactcaatcgtgccagcttaagcaatcgagtgtgtattgaggtataccagagatagacataaatgagatggatgttgacgagatcgagtctgctgggcagatcaatatttctgagctaggagaaagttttctccagactttctgcaaaaaagctgcgacatctttctttgaagagtttggacttataagtcatcagcttaactcctacaacttcttcattgaacacgggcttcagaatgtgtttgagtcctttggtgacattcttgtggaaccgtcttttgatgtaataaagaagaaggatggcgattggagatacgcaacggtgaaatttggaaaagtcactttggagaagcctacattcttttcggatgacaaggagcttgagtttctcccatggcatgcaggcttcagaacatgacatactcagcaaggatcaaagtcaatgcccaagttgaggtgttcaaaaaaattgttattaaacacgacaaattcaagactggacaagatgaatatgtcgagaaggagatactggatgtcaaaaaacaggacattctaattggtagcatacctgtcatggtgaaatctgtcctttgcaaaactagcgagaaaggaaaagaaaactgcaaaaaggggaattgtgcctttgatcagggtggatattttgtgataaagggggctgagaaggtgtttatagctcaagaacagatgtgcacaaagagattgtggatttctaattcaccatggacagtctccttcaggtccgaaactaaaagaaataggttcattgtgcgcctctcggagaatgagaaagcagaagactataagataatggagaaagtactgacagtgtacttcttgtcgactgagattccagtctggctcctgttctttgcgttgggtgtttcatcagacaaagaagccatggatctaattgctttcgatggtgatgatgcaagcattaccaacagtctcatagcttctatccatgaagctgatgcagtgtgtgaagcttttcgctgtgggaacaatgccctaacatatgttgaacatcagatcaaaagcaccaaattccctcctgctgaaagtgtggatgattgcctccgtctgtatttgtttccatgcctccaaggtttgaagaagaaagcccgattcctgggctatatggtgaagtgccttttgagcgcgtatgcgggaaaacgaaaatgtgaaaacagggacagtttccggaataaacgaattgagctcgctggagaactgttggagagggagataagggtgcatcttgcacatgctagaagaaagatgaccagggccatgcagaaacaactctcaggcgatggcgatttgaagcctatagagcattatttggatgcttccgttatcaccaatgggcttaatagagccttctccactggagcatggtctcatcctttcaggaagatggaaagggtctcaggtgttgtagctaatttgggtcgtgcaaatccattgcagactctgattgatctgaggagaacgcgacagcaagtcctttataccggcaaggttggagatgctagacatccgcatccttctcactggggcagagtatgctttttgtcaactccagatggtgaaaattgtggtcttgtgaagaacatgtctcttcttggacttgttagcactcaaggtttggagtctgtggtggaaatgctctttacttgcggaatggaagagctgatgaatgataccagcacaccattgtgtggcaaacacaaagttcttctcaatggagactgggttggattatgtgcagattctgaatcctttgtcggggagttaaaaagcaggcggcgccaaagtgaattacctctcgagatggaaatcaagcgagataaagatgacaatgaggtgagaattttcactgacgctggtagactactccgacctctcttggttgtggaaaatctccacaagttgaagcaagacaaacctacacagtatccttttaagcatcttcttgaccaagggattctcgagctgatcgggattgaggaagaagaagactgtactacagcatggggaatcaaacagcttctgaaggaaccaaagaattacacgcattgcgaattggacctatcattcctgttgggtgtgagctgtgcaattgtcccatttgcaaatcacgatcatgggaaaagagttctttaccagtctcagaagcattgccaacaagccatcggattctcatcaacgaaccctaacatccgctgcgatacgctgtcccagcagctgttctatccccaaaagccacttttcaagacattggcgtcagagtgtcttgaaaaagaagttctatttaatggccagaacgcaattgttgctgtgaatgttcatctcgggtacaaccaagaggactccattgtgatgaacaaggcttcattggaacgtggtatgttccgttcagagcagattagaagctacaaagcagaggttgatactaaagactcggagaagaggaagaagatggatgagcttgttcagtttggaaagacatacagcaaaatcggcaaagtagacagccttgaagatgacgggtttcctttcattggtgctaacatgagtactggcgatattgtcattggcagatgcaccgagtctggggctgatcacagtataaagctcaagcacactgagagaggaattgtgcaaaaagtggtattatcttctaatgatgaagggaagaattttgcagcggtttctctgagacaggttcgttctccatgccttggagataagttttccagtatgcatggccagaagggtgttttaggctatctagaggaacagcagaattttcctttcacgatccaaggcatagttcctgatattgtgataaacccgcacgctttcccttctaggcagacaccaggtcaactcttggaggctgctctctccaaaggaatcgcttgtcctatacaaaagaaggagggtagctctgctgcatacaccaaattgacacgtcatgccactcctttctccactccgggtgtcactgaaatcaccgagcagcttcacagggccggcttttcaagatggggaaacgaaagggtctacaatggtagatcgggtgagatgatgcgctctctgatattcatgggcccaactttctaccagcgacttgtccacatgtcagagaacaaagtcaagttcaggaacaccggaccagtccacccgctcacacgccagccagtcgcagaccggaagaggtttggcgggataagatttggagaaatggagcgagactgcctaatagctcacggtgcatccgctaatctgcacgagcggctcttcactctaagtgactcttctcagatgcacatctgcagaaaatgcaagacctatgcgaatgtgatcgagaggactccaagcagtggaagaaagatcagagggccatattgcagagtgtgcgcatcctccgaccatgtggttagggtctatgttccttatggagctaagcttctttgtcaggagctgttcagcatgggcattactctcaacttcgacaccaagctctgctgattccccgtcattattatgtaaatagcttaatgc

SEQ ID NO: 10 - DNA, 4948 bp, Arabidopsis thaliana
  source 1..4948: mol_type = genomic DNA
ttggacttagagaagagtttttttttcgttttctctgctttctcactttttcccgtttcctttgggaatacaaacggcggcttctcaaaagcctccgatttcgatttttttttcctctctttttttttgttctttctttagagtctcttcttcaacttcttctccggcatcttccgtcggagctaaggatcagaagtttttgtctgtgcactgtttcaattggatcattacatagtgaggattctctgttcgacgaaacgagaaactcttcaacatggaagacgattgtgaggagcttcaggttcccgtgggaactctaacctcgataggttttagcatttcaaacaacaatgatcgagataaaatgtctgtgctagaggttgaagcaccgaatcaggtgactgattctcggctaggattaccgaatccggattctgtctgcagaacctgtggcagcaaagatcgaaaagtttgcgaagggcatttcggggttataaacttcgcgtactcgataataaacccgtatttcctcaaggaggtagctgcgttgttaaacaaaatctgtccggggtgtaaatacattcgaaaaaagcagtttcagattaccgaagaccagcctgagagatgtagatactgcactttgaataccggttatcctctaatgaagtttagggtaactactaaagaagtcttcaggcgatccggaatcgttgttgaagtaaacgaagagagtctgatgaaactcaagaaacggggagtgttaacattgcctcctgactattggagttttttgccgcaagactctaatatcgacgagagctgtttgaaaccaacaaggcgaataataacgcatgcacaggtttatgctctgttattagggattgatcagaggctcatcaagaaggatatccctatgttcaactctcttggtctgacatcttttcctgttacaccaaatggttaccgtgtaaccgaaatagttcatcagttcaacggagctcggctaatatttgatgaacggactcggatctacaagaaactagtcggctttgagggaaacacacttgaattgagttctcgtgtgatggaatgcatgcaatattccagactcttttcggaaactgtgtcttcgagtaaagattccgcaaatccgtaccagaagaagtctgatacaccaaaactttgcggtctaaggttcatgaaagacgtgctgctcggtaaaagaagtgatcatacattccggacagtagttgttggtgatccgtccttgaagctcaacgagattggcatacccgagagtatcgcaaaaaggcttcaagtatcagagcatctcaaccagtgcaataaagaaaggcttgtcacttcctttgtccccacactgttggacaataaagagatgcatgtgagaagaggagatagattggtggctattcaagtcaatgacctccaaaccggagacaaaatattccggagtttaatggatggagacactgtgctgatgaacagaccgccttcgattcatcagcattcgcttattgcaatgacagttagaatcctcccaacgacttctgttgtctccttgaacccgatctgctgtttgccgttccgtggtgattttgatggagattgtctccacggttacgttcctcagtccattcaagcaaaggtcgagcttgatgagcttgttgctttggataagcagcttatcaacagacagaatggtcggaacttgctttctttaggacaagatagcttgacggcggcttatctggtcaatgttgagaagaactgttatcttaatcgagctcagatgcagcagcttcaaatgtattgcccatttcagcttcctccgcctgcaattatcaaagcttctccttcgagcactgagcctcaatggacgggaatgcagctattcggaatgctgtttcctcccgggtttgactacacttatcctctgaataatgtagttgtgagtaacggcgagcttttgtctttctctgaaggatctgcttggctcagagatggagaagggaatttcatcgagagattgctcaaacacgacaaagggaaagttcttgatatcatctattccgctcaagaaatgctatctcagtggttgctgatgcgcggtttgagtgtgtccttggcggatttgtacctttcctctgatctgcagtctcgaaaaaacttgactgaagagatatcatacgggttgcgggaagctgagcaagtttgcaacaagcaacagctaatggttgaatcttggagagatttccttgcagttaatggggaggataaggaagaggattcagtatcggatttggcccgattctgctatgagagacaaaaatccgctacattaagcgaacttgcagtcagtgcttttaaggatgcttacagagatgttcaggcactagcatataggtatggtgatcaatccaactcttttttgatcatgtcgaaagccggcagcaaagggaatatcgggaagctggttcagcacagcatgtgtatcggtctgcagaattcagcagtttctttgtcctttgggtttccgcgtgaactgacttgcgctgcttggaatgacccgaacagtccacttcgtggcgcaaagggaaaagacagtaccactactgagtcatatgttccttatggagtcattgagaactcgtttctaacgggtctgaatccattggaatcttttgttcattcagttacaagtcgtgacagttcattcagtggtaatgctgatctcccggggacactgagcagaagattaatgttcttcatgcgggacatatacgctgcttatgatggcactgtgagaaattctttcggaaaccagttagtccagtttacttatgagactgatggtcccgttgaagatatcacaggtgaggcacttggctcactttctgcttgtgcattatctgaggcagcttacagcgcgctggaccagccaatcagccttcttgaaacttcgccgcttctgaatcttaagaatgtattggagtgtggatcaaagaaaggtcaacgagaacagacaatgtctttgtatttgtctgaatacctttcaaagaaaaagcacgggttcgaatacgggtcacttgagatcaagaaccacttggagaaacttagtttctcagagatcgtttcaacatctatgataatattctctccaagttctaacacgaaagtaccgttaagcccgtgggtttgccattttcatatctctgagaaagtactgaagcggaaacaactgagcgcagaatccgttgtttcatctttaaacgagcagtacaagagcaggaacagagaactgaagcttgatatagttgacttagatatacaaaacacaaaccactgctcttcagacgatcaggcaatgaaggatgataacgtttgcatcacggtgactgtagttgaagcctcaaagcactcggttttggaactggatgctattcgtctcgttttgatcccttttcttcttgactctcctgtcaaaggtgatcaagggatcaaaaaggtgaatattttgtggactgaccgaccaaaagcgccaaaaaggaatgggaatcatttggcgggtgagctgtacttgaaggttacaatgtatggagatcggggcaaaagaaactgttggaccgctcttttagaaacctgccttcccatcatggatatgattgactggggccgaagccatcctgataatatccgacaatgctgctcagtttatggaatagatgctggacgcagcattttcgtagcaaatttggagtccgcggtgtcagatactggtaaggagatactaagagagcatctgcttctcgtagctgatagtctctctgttacgggagagtttgtggcattaaacgccaaaggttggagtaaacaaagacaggtcgagtccacgcctgcaccttttactcaagcatgcttctcaagcccaagtcaatgctttctcaaagctgctaaggaaggtgtcagagacgatcttcaagggtctatcgacgctttagcttggggaaaagttcctggtttcggaactggagatcagttcgaaatcatcatttcgccaaaggttcacgggtttactacaccggtagatgtgtatgaccttttgagtagtacaaagacgatgcgtagaacaaactctgcgcctaaatcagacaaagccacggtccagccttttggcttgctacattccgcattcctgaaagatatcaaggtactcgatgggaaagggattcctatgtcactgcttagaacgatctttacatggaaaaacatcgagttgctttcccagtcattgaaacgcattctccacagttacgagatcaatgaactgttgaatgagagggacgaaggacttgtgaagatggttctgcagttgcaccccaacagtgttgagaaaattggaccaggcgtcaaaggaatccgggtcgctaaatcgaagcacggagattcttgttgcttcgaggttgtaagaatagacgggacattcgaagacttctcataccacaagtgtgtcttgggagcaacaaagataattgccccaaagaaaatgaacttctacaagtcaaagtatcttaaaaatggtacactcgagtccggtggtttctccgaaaacccgtgaacagccaagtaagagtaaaaaaaaagactggctcttctgcggtataatatcgaacaatgtatgaagttgtgtgtaattttgtttaaaaagtgattagatagatataggggaaaagccttttggctttgctctaagcttctttttgctcctttcactatgtaataccttttgccttccacctaaaggcttaaaggttaattacttagtggaagcagcaacgagaagctggcaaaggaggcttctgttctgtttctgtttctgtatgtaaaccatgcaaattccggtttgactatgaaatatccggttatgttt

SEQ ID NO: 11 - DNA, 5115 bp, Arabidopsis thaliana
  source 1..5115: mol_type = genomic DNA
cggcttctcaaaagcctccgatttcgatttttttttcctctctttttttttttctttttttttttgattgatcactgtgtctgattccttatcacggaaactcttcaacatggaagacgattgtgaggagcttcaggttcccgtgggaactctaacctcgataggttttagcatttcaaacaacaatgatcgagataaaatgtctgtgctagaggttgaagcaccgaatcaggtgactgattctcggctaggattaccgaatccggattctgtctgcagaacctgtggcagcaaagatcgaaaagtttgcgaagggcatttcggggttataaacttcgcgtactcgataataaacccgtatttcctcaaggaggtagctgcgttgttaaacaaaatctgtccggggtgtaaatacattcgaaaaaagcagtttcagattaccgaagaccagcctgagagatgtagatactgcactttgaataccggttatcctctaatgaagtttagggtaactactaaagaagtcttcaggcgatccggaatcgttgttgaagtaaacgaagagagtctgatgaaactcaagaaacggggagtgttaacattgcctcctgactattggagttttttgccgcaagactctaatatcgacgagagctgtttgaaaccaacaaggcgaataataacgcatgcacaggtttatgctctgttattagggattgatcagaggctcatcaagaaggatatccctatgttcaactctcttggtctgacatcttttcctgttacaccaaatggttaccgtgtaaccgaaatagttcatcagttcaacggagctcggctaatatttgatgaacggactcggatctacaagaaactagtcggctttgagggaaacacacttgaattgagttctcgtgtgatggaatgcatgcaatattccagactcttttcggaaactgtgtcttcgagtaaagattccgcaaatccgtaccagaagaagtctgatacaccaaaactttgcggtctaaggttcatgaaagacgtgctgctcggtaaaagaagtgatcatacattccggacagtagttgttggtgatccgtccttgaagctcaacgagattggcatacccgagagtatcgcaaaaaggcttcaagtatcagagcatctcaaccagtgcaataaagaaaggcttgtcacttcctttgtccccacactgttggacaataaagagatgcatgtgagaagaggagatagattggtggctattcaagtcaatgacctccaaaccggagacaaaatattccggagtttaatggatggagacactgtgctgatgaacagaccgccttcgattcatcagcattcgcttattgcaatgacagttagaatcctcccaacgacttctgttgtctccttgaacccgatctgctgtttgccgttccgtggtgattttgatggagattgtctccacggttacgttcctcagtccattcaagcaaaggtcgagcttgatgagcttgttgctttggataagcagcttatcaacagacagaatggtcggaacttgctttctttaggacaagatagcttgacggcggcttatctggtcaatgttgagaagaactgttatcttaatcgagctcagatgcagcagcttcaaatgtattgcccatttcagcttcctccgcctgcaattatcaaagcttctccttcgagcactgagcctcaatggacgggaatgcagctattcggaatgctgtttcctcccgggtttgactacacttatcctctgaataatgtagttgtgagtaacggcgagcttttgtctttctctgaaggatctgcttggctcagagatggagaagggaatttcatcgagagattgctcaaacacgacaaagggaaagttcttgatatcatctattccgctcaagaaatgctatctcagtggttgctgatgcgcggtttgagtgtgtccttggcggatttgtacctttcctctgatctgcagtctcgaaaaaacttgactgaagagatatcatacgggttgcgggaagctgagcaagtttgcaacaagcaacagctaatggttgaatcttggagagatttccttgcagttaatggggaggataaggaagaggattcagtatcggatttggcccgattctgctatgagagacaaaaatccgctacattaagcgaacttgcagtcagtgcttttaaggatgcttacagagatgttcaggcactagcatataggtatggtgatcaatccaactcttttttgatcatgtcgaaagccggcagcaaagggaatatcgggaagctggttcagcacagcatgtgtatcggtctgcagaattcagcagtttctttgtcctttgggtttccgcgtgaactgacttgcgctgcttggaatgacccgaacagtccacttcgtggcgcaaagggaaaagacagtaccactactgagtcatatgttccttatggagtcattgagaactcgtttctaacgggtctgaatccattggaatcttttgttcattcagttacaagtcgtgacagttcattcagtggtaatgctgatctcccggggacactgagcagaagattaatgttcttcatgcgggacatatacgctgcttatgatggcactgtgagaaattctttcggaaaccagttagtccagtttacttatgagactgatggtcccgttgaagatatcacaggtgaggcacttggctcactttctgcttgtgcattatctgaggcagcttacagcgcgctggaccagccaatcagccttcttgaaacttcgccgcttctgaatcttaagaatgtattggagtgtggatcaaagaaaggtcaacgagaacagacaatgtctttgtatttgtctgaatacctttcaaagaaaaagcacgggttcgaatacgggtcacttgagatcaagaaccacttggagaaacttagtttctcagagatcgtttcaacatctatgataatattctctccaagttctaacacgaaagtaccgttaagcccgtgggtttgccattttcatatctctgagaaagtactgaagcggaaacaactgagcgcagaatccgttgtttcatctttaaacgagcagtacaagagcaggaacagagaactgaagcttgatatagttgacttagatatacaaaacacaaaccactgctcttcagacgatcaggcaatgaaggatgataacgtttgcatcacggtgactgtagttgaagcctcaaagcactcggttttggaactggatgctattcgtctcgttttgatcccttttcttcttgactctcctgtcaaaggtgatcaagggatcaaaaaggtgaatattttgtggactgaccgaccaaaagcgccaaaaaggaatgggaatcatttggcgggtgagctgtacttgaaggttacaatgtatggagatcggggcaaaagaaactgttggaccgctcttttagaaacctgccttcccatcatggatatgattgactggggccgaagccatcctgataatatccgacaatgctgctcagtttatggaatagatgctggacgcagcattttcgtagcaaatttggagtccgcggtgtcagatactggtaaggagatactaagagagcatctgcttctcgtagctgatagtctctctgttacgggagagtttgtggcattaaacgccaaaggttggagtaaacaaagacaggtcgagtccacgcctgcaccttttactcaagcatgcttctcaagcccaagtcaatgctttctcaaagctgctaaggaaggtgtcagagacgatcttcaagggtctatcgacgctttagcttggggaaaagttcctggtttcggaactggagatcagttcgaaatcatcatttcgccaaaggttcacgggtttactacaccggtagatgtgtatgaccttttgagtagtacaaagacgatgcgtagaacaaactctgcgcctaaatcagacaaagccacggtccagccttttggcttgctacattccgcattcctgaaagatatcaaggtactcgatgggaaagggattcctatgtcactgcttagaacgatctttacatggaaaaacatcgagttgctttcccagtcattgaaacgcattctccacagttacgagatcaatgaactgttgaatgagagggacgaaggacttgtgaagatggttctgcagttgcaccccaacagtgttgagaaaattggaccaggcgtcaaaggaatccgggtcgctaaatcgaagcacggagattcttgttgcttcgaggttgtaagaatagacgggacattcgaagacttctcataccacaagtgtgtcttgggagcaacaaagataattgccccaaagaaaatgaacttctacaagtcaaagtatcttaaaaatggtacactcgagtccggtggtttctccgaaaacccgtgaacagccaagtaagagtaaaaaaaaagactggctcttctgcggtataatatcgaacaatgtatgaagttgtgtgtaattttgtttaaaaagtgattagatagatataggggaaaagccttttggctttgctctaagcttctttttgctcctttcactatgtaataccttttgccttccacctaaaggcttaaaggttaattacttagtggaagcagcaacgagaagctggcaaaggaggcttctgttctgtttctgtttctgtatgtaaaccatgcaaattccggtttgactatgaaatatccggttatgtttctgttctttaccttgtttatatccgtcttcatgcaattgcaaatgatccttattacatcttcggttttccttatgagaagtgaaacttagttctcttggttatgctctgttttttcctggtttagatcggttctcaatagcatacagtttgttctttctcttaaccggtttagattagttttcttgcaatttgcttatgattcttataagtaaccaaagcctttaagtaatactaatctaaatatctccacatattatcttcaaatgtattgatcagagaaaatccccaacactatcatcacccctcaagaaaatacaggaaacattttcga

SEQ ID NO: 12 - DNA, 6348 bp, Arabidopsis thaliana
  source 1..6348: mol_type = genomic DNA
gaagaagaacaaaagatttttgagagagaaaagtagagtcactccaaaattgttctctcgcaatcttctttctcggtttcctcttttaagaaaaagtccgccattttcactctcactcagatttcttccctcttctcacctgcaaaaacccttgtttcccgctgtttcgtttcttctccggttgaggaaccaaaacgggtcaaatacgcagctgaatcatcgaattcttagggttttttcatggaggaagaatctacatcagagattcttgacggagagattgttggaatcacatttgctcttgctagtcaccatgaaatatgtattcaatcgattagtgaatccgcaattaatcatcccagtcaactcactaacgcattcttggggttacctcttgaatttggtaaatgtgaatcttgcggtgcgacagaaccagataaatgtgaaggtcattttggttatattcagcttccagtgccaatataccatcctgctcatgttaatgagttgaaacaaatgctgagccttctgtgcttgaaatgtctgaagataaagaaggcaaagggcacaagtggtggtctggcggatcgcttgttgggtgtctgttgtgaggaagcttcgcaaatctcaatcaaagatagagcatcagatggtgcctcatatctagaactgaagctcccatctaggtcaagactgcagcctggttgctggaatttcctggaaagatatggttatcgctatggaagcgattacacgcgtcccctgctggcaagagaggttaaggaaattctaagacggatccccgaagaatcaagaaagaaactcacggcaaagggacatattcctcaagaaggatacatactagagtatcttcctgtcccgcctaactgtttgtcagtgccagaggcttctgatggtttcagcaccatgtcagtggatccttccagaattgagctaaaggacgttctgaagaaagtcatagccataaaaagctctaggtctggcgagacaaactttgagtcgcataaggctgaagccagtgagatgtttagagtggtggatacctatctccaggtgaggggtactgcaaaagcggcaagaaacattgatatgagatacggggtgtctaagatctcggatagttcatcttcaaaagcttggacagaaaaaatgagaacacttttcatccgtaagggttcaggtttctcttcccgtagcgtcatcactggagatgcttaccgacatgtgaatgaggtagggatcccaatagaaattgcgcagagaatcacatttgaggaaagggttagtgtccacaatagaggttatctacaaaagttggtagacgacaagttgtgtttgagttatactcaaggttctacgacctattctttaagggatggatccaaggggcacactgagcttaaacccgggcaggttgttcatcgcagggtcatggatggggatgttgtgtttatcaacagacccccgacaacacataaacattctcttcaagcgcttcgggtgtatgttcatgaagacaacaccgtgaagattaaccctctgatgtgtagccccctcagtgctgattttgatggtgattgtgtccatttgttctaccctcagtctcttagtgctaaggcagaggttatggagctcttctctgtggagaagcaactgcttagctcacatactggacagctgattttgcagatgggtagtgattctttactgtctttgagggtaatgctggagcgggtatttctggacaaggcaactgctcaacagttagctatgtatggctctctgtccctgccaccaccagcactaaggaagtccagtaaatctggcccagcttggacagttttccagattctacagcttgcctttccagaacgtctgagttgcaaaggagacagattcctggttgatggaagtgatttgctgaagtttgatttcggggttgacgcgatggggtccatcatcaatgaaattgtaacttcaatcttcctggagaagggtccaaaggagacacttggattctttgattcgctgcagcctctattgatggaaagtctgtttgctgagggatttagtctaagtttggaagacttatccatgtctagggcagacatggatgtaattcacaacctaataatccgagagatttcacctatggtgtctcgcttgagattatcatatagagatgaattgcagctagagaacagcatccacaaagtgaaggaagtggctgctaactttatgctgaagtcatattccattcggaacttgattgatatcaagagtaactcagcaatcaccaagctggtgcagcagacaggcttcttgggtcttcagctttctgacaagaagaagttttacacgaagactctggtagaggacatggctatcttttgtaagagaaagtatggcaggatttcttcatctggtgattttggaatagtgaagggctgcttctttcatgggctggatccgtatgaagagatggctcattcaattgcagctagggaggtaattgttcgctcttcaaggggattagctgagcctggaaccctctttaagaacctgatggctgttcttcgggatatcgtgattacaaacgatggaactgtaagaaacacctgtagtaactcagtcatccagttcaaatatggagttgattctgaacgtggacatcaaggtctgtttgaagctggagaacctgttggagtattggcagctactgccatgtcaaatcctgcatataaggcagtgcttgattcctctccaaatagtaattcatcatgggagctaatgaaggaagttctgctctgcaaagtcaatttccaaaacactactaatgatcggcgcgtaatcctttatttaaacgaatgccattgtggaaaaaggttttgccaggaaaatgctgcttgcacagtcaggaacaagctgaataaagttagtcttaaagatactgcagtggaattcctagtcgaatatagaaagcaaccaactatatcagaaatttttggaattgattcatgcctacatggccatattcatcttaataagacattgctgcaagattggaacatcagtatgcaggatatacatcaaaagtgtgaggatgtaattaactcactaggacaaaagaaaaagaagaaagctactgatgatttcaagagaacaagtttgtctgtcagtgagtgctgctctttccgagatccttgtgggagcaaaggttcggatatgccttgtttgacgttctcctacaatgccaccgatcccgatctagaacgaactcttgatgttctttgcaatacagtttacccagttctgctggaaatagtgatcaaaggtgattcacggatttgctcagcaaatataatctggaatagttcagacatgacaacgtggatccggaatcgtcatgcatcccgccgaggggaatgggttttggatgtcactgttgaaaaatctgctgtcaagcaaagtggtgatgcatggagggttgtgatagactcatgtctttcagtgcttcatctaatagacacaaaacggtcaatcccttattctgtaaaacaagtgcaagaattgcttgggttatcctgtgcttttgagcaagcagtacagcgtctatcagcttcagtgagaatggtctccaagggagttttgaaagaacacatcattctcctagcaaacaacatgacttgttcagggactatgttgggtttcaattctggaggttacaaagctttgacccgatccttaaacatcaaggctccattcacagaagcaactctgattgcaccaagaaaatgttttgagaaagcggctgagaaatgtcatacagattcactatcaacagtcgttgggtcttgttcttggggaaaacgcgtggatgttggtacaggctcacagtttgagctcctatggaaccaaaaagagactggtctagatgataaagaagaaacagatgtgtacagcttccttcaaatggtcatatccacgacaaacgcagatgcatttgtttcttcccctggttttgatgttacagaggaagaaatggctgaatgggctgaatcgcccgagcgagactctgctcttggagagcccaagtttgaggacagtgccgacttccaaaatttacatgacgaaggcaagccatcaggagccaactgggagaaaagctcttcgtgggacaatggttgcagtggtggttcagagtggggagtctcaaaaagtacaggtggtgaggcaaacccggagtctaattgggaaaagactacaaatgttgagaaggaagatgcttggtctagttggaacactagaaaagatgctcaagaatcttccaagtcagattcagggggtgcttggggtataaagacaaaggatgctgatgcagatacaacaccaaactgggaaacaagtccagctccgaaggattccattgtcccagaaaataatgagccgacttctgacgtttggggacacaaatctgtttcagacaaatcgtgggacaaaaagaactggggaactgaatcagctcctgctgcatggggttctacagatgctgctgtttggggttctagtgataaaaagaactcggaaacagaatcagatgctgctgcttggggttccagggacaaaaataattctgacgttgggtcaggtgctggtgttttaggtccctggaacaagaagagctcggaaactgagtcaaatggtgctacttggggttctagtgacaaaaccaaatcaggtgctgctgcatggaattcttgggacaaaaagaacatagaaactgactcagaacctgctgcttggggttctcagggaaaaaagaattctgaaactgagtcaggtcctgctgcttggggtgcttgggacaaaaagaaatcggaaactgaaccaggtcctgctggttggggtatgggggacaaaaagaattctgaaactgaattaggccctgctgctatgggtaattgggacaaaaagaaatcggatacgaaatcaggtccagctgcttggggatctacagatgctgctgcttggggttctagtgacaaaaacaactcggaaactgaatcagatgctgctgcttggggttctaggaacaaaaagacttctgaaattgaatcaggtgctggcgcttggggttcgtggggacagccaagtcccactgcagaagacaaggataccaatgaggatgatagaaatccgtgggtttccttgaaggagaccaaaagtagagagaaggatgataaagagagaagccagtggggaaatccagccaagaaatttccatctagtggtggctggtccaatggtggtggtgcagactggaaaggaaataggaaccatactcctaggccacctagatctgaggataatttggctcccatgtttacagcaacgagacagcgcttggactcattcacctctgaggagcaagagctgctctcagatgttgagccagtcatgaggactctcaggaaaattatgcatccgtctgcgtaccctgatggagacccaatttctgatgatgacaagacgtttgtcctggagaagattttgaacttccatccccaaaaagagacaaagcttggttctggcgttgacttcatcacggttgataagcacaccatcttctcagacagcaggtgcttctttgttgtctcaactgatggggccaaacaggacttttcataccgaaaatccctcaacaactatttgatgaagaaataccctgaccgtgctgaagaattcattgacaagtactttacgaaacctcggcctagcggaaacagagacaggaacaaccaagatgccacaccacctggggaagaacagtctcagcctccgaatcagtctataggtaatggaggtgacgactttcagacacagactcagtctcagtctccatctcagactcgggctcagtctccatctcaggctcaggctcagtctccatctcagacgcagtctcagtctcagtctcagtctcagtctcagtctcagtctcagtctcagtctcagtctcagtctcagtctcagtctcagtctcagtctcagtctcagtctccatcccagactcagactcagtctccgtctcagactcaggctcaggctcagtctccatcatctcagtctccgtcccagacgcagacataaactcttgagaaccaaagaagatttggttcgtttaggtaaaccattcagtctccactgttttgttttgatgtacataaagagtggagagaatggcggtttttatcattaaaagactctgatgtgaagtgcaaaacaatgtgtaaatgcagttctctagtttcagatcgtttgtcctaa

SEQ ID NO: 13 - DNA, 4845 bp, Arabidopsis thaliana
  source 1..4845: mol_type = genomic DNA
gaccaattagggtttcgcaatcttccagtagatttcgcttctcaacggattttgaaaatggtggaaaatggggctaaagctgcgaagcgaaagaagagaccacttccagagattcaagaggtagaagatgtacctaggacgaggagaccaaggcgtgctgcagcgtgtaccagtttcaaggagaaatctattcgagtctgtgagaaatctgctactattgaagtaaagaaacagcagattgtggaggaagagtttctcgcgttacggttaacggctctggaaactgatgttgaagatcgtccaaccaggagactgaatgattttgttttgtttgattcagatggagttccacaacctctggagatgttggagattcatgacatattcgtttcaggtgctatcttaccttcagatgtgtgtactgataaggagaaagagaagggtgtgaggtgtacatcgtttggacgggttgagcattggagtatctctggttatgaagatggttcccctgttatttggatctcaacggaattggcggattatgattgtcgtaaacctgctgctagctacaggaaggtttatgattacttctatgagaaagctcgtgcttcagtggctgtgtataagaaattgtccaagtcatctggtggggatcctgatataggtcttgaggagttacttgcggcggttgtcagatcaatgagcagtggaagcaagtacttttctagtggtgcggcaatcatcgattttgttatatcccagggagattttatatataaccaactcgctggtttggatgagacagccaagaaacatgaatcaagctatgttgagattcctgttcttgtagctctcagagagaagagtagtaagattgacaagcctctgcagagggaaagaaacccatctaatggtgtgaggattaaagaagtttctcaagttgcggagagcgaggccttgacatctgatcaactggttgatggtactgatgatgacagaagatatgctatactcttacaagacgaagagaataggaaatctatgcaacagcccagaaaaaacagcagctcaggttctgcttcaaatatgttctacattaagataaatgaagatgagattgccaatgattatcctctcccatcgtactataagacctccgaagaagaaacagatgaacttatactttatgatgcttcctatgaggttcaatctgaacacctgcctcacaggatgcttcacaactgggctctttataactctgatttacgattcatatcactggaacttctaccgatgaaacaatgtgatgatattgatgtcaacatttttgggtcaggtgtggtgactgatgataatggaagttggatttctttaaacgatcctgacagcggttctcagtcacacgatcctgatgggatgtgcatattcctcagtcaaattaaagaatggatgattgagtttgggagcgatgatattatctccatttctatacgaacagatgtggcctggtaccgtcttgggaaaccatcaaaactttatgccccttggtggaaacctgttctgaaaacagcaagggttgggataagcattcttacttttcttagggtggaaagtagggttgctaggctttcatttgcagatgtcacaaaaagactgtctgggttacaggcgaatgataaagcttacatttcttctgaccccttggctgttgagagatatttggtcgtccatgggcaaattattttacagctttttgcagtttatccggacgacaatgtcaaaaggtgtccatttgttgttggtcttgcaagcaaattggaggataggcaccacacaaaatggatcatcaagaagaagaaaatttcgctgaaggaactgaatctgaatccaagggcaggcatggcaccagtagcatcgaagaggaaagctatgcaagcaacaacaactcgcctggtcaacagaatttggggagagttttactccaattactctccagaggatccattgcaggcgactgctgcagaaaatggggaggatgaggtggaagaggaaggcggaaatggggaggaagaggttgaagaggaaggtgaaaatggtctcacagaggacactgtaccagaacctgttgaggttcagaagcctcatactcctaagaaaatccgaggcagttctggaaaaagggaaataaaatgggatggtgagagtctaggaaaaacttctgctggcgagcctctctatcaacaagcccttgttggaggggaaatggtggctgtaggtggcgctgtcaccttggaagttgatgatccagatgaaatgccggccatctattttgtggagtacatgttcgaaagtacagatcactgcaaaatgttacatggtagattcttacaaagaggatctatgactgttctggggaatgctgctaacgagagggaactattcctgactaatgaatgcatgactacacagctcaaggacattaaaggagtagccagttttgagattcgatcaaggccatgggggcatcagtataggaaaaagaacatcactgcggataagcttgactgggctagagcattagaaagaaaagtaaaagatttgccaacagagtattactgcaaaagcttgtactcacctgagagagggggattctttagtcttccactaagtgatattggtcgcagttctgggttctgcacttcatgtaagataagggaggatgaagagaagaggtctacaattaaactaaatgtttcaaagacaggctttttcatcaatgggattgagtattctgttgaggattttgtctatgtcaaccctgactctattggtgggttgaaggagggtagtaaaacttcttttaagtctgggcgaaacattgggttaagagcgtatgttgtttgccaattgctggaaattgttccaaaggaatctagaaaggctgatttgggttcctttgatgttaaagtgagaaggttttataggcctgaggatgtttctgcagagaaggcctatgcttcagacatccaagaattgtatttcagccaggacacagttgttctccctccaggtgctctagagggaaaatgtgaagtaagaaagaaaagtgatatgcccttatcccgtgaatatccaatatcagaccatattttcttctgtgatcttttctttgacacctccaaaggttctctcaagcagctgcccgccaatatgaagccaaagttctctactattaaggacgacacacttttaagaaagaaaaagggaaagggagtagagagtgaaattgagtctgagattgtcaagcctgttgagccacctaaagagattcgtctggctactctagatatttttgctggttgtggtggcctgtctcatggactgaaaaaggcgggtgtatctgatgcaaagtgggcgattgagtatgaagagccagctgggcaggcttttaaacaaaaccatcctgagtcaacagtttttgttgacaactgcaatgtgattcttagggctataatggagaaaggtggagatcaagatgattgtgtctctactacagaggcaaatgaattagcagctaaactaactgaggagcagaagagtactctgccactgcctggtcaagtggacttcatcaatggtggacctccatgtcagggattttctggtatgaacaggttcaaccaaagctcttggagtaaagttcagtgtgaaatgatattagcattcttgtcctttgctgactatttccggccaaggtattttcttctggagaacgtgaggacctttgtgtcattcaataaagggcagacatttcagcttactttggcttcccttctcgaaatgggttaccaggtgagatttggaatcctggaggccggtgcatatggagtatcccaatctcgtaaacgagctttcatttgggctgctgcaccagaagaagttctccctgaatggcctgagccgatgcatgtctttggtgttccaaagttgaaaatctcactatctcaaggtttacattatgctgctgttcgtagtactgcacttggtgcccctttccgtccaatcaccgtgagagacacaattggtgatcttccatcagtagaaaacggagactctaggacaaacaaagagtataaagaggttgcagtctcgtggttccaaaaggagataagaggaaacacgattgctctcactgatcatatctgcaaggctatgaatgagcttaacctcattcgatgcaaattaatcccaactaggcctggggctgattggcatgacttgccaaagagaaaggttacgttatctgatgggcgcgtagaagaaatgattcctttttgtctcccaaacacagctgagcgccacaacggttggaagggactatatgggagattagattggcaaggaaactttccgacttccgtcacggatcctcagcccatgggtaaggttggaatgtgctttcatcctgaacagcacagaatccttacagtccgtgaatgcgcccgatctcaggggtttccggatagctacgagtttgcagggaacataaatcacaagcacaggcagattgggaatgcagtccctccaccattggcatttgctctaggtcgtaagctcaaagaagccctacatctcaagaagtctcctcaacaccaaccctagataaccacccaaatttggcatttcctttttcaataatattagtcattatgatccttgtcttgaatgaaactcattggtgctgatacttttgataaagaaagcctacgaagagtttttgtatattccgtattcggattgaaaaatctcattatacaagcaagcaatgatgtctatagactatga

SEQ ID NO: 14 - DNA, 2447 bp, Arabidopsis thaliana
  source 1..2447: mol_type = genomic DNA
gtaaaaataaaaagtaattatttgttcaaccctaggtgaaataaaggacgacccaaaacaagtgacgagagagcagagagagcttcttcttccggacactgaacagtgagagcacccatctccaacctcttcctgaacaagatgggaagcactgtgattttaagctcagatgatgaagattcagatattagtgaatctgaaatggatgagtatggagacaaaatgtacctaaaccttaaaggtgggaagctgaaagtgagactctctcctcaagcttttatctgtccttattgtccaaacaagaagaaaactagttttcaatacaaagatcttcttcaacatgcttctggagttggtaatagcaattctgataaaagaagtgcaaaggagaaagcaagtcaccttgctcttgtcaaataccttcaacaagatcttgctgattcagcttcagaagcagagccttcatcaaagcgtcagaaaaacggaaaccctattcaagattgtgatcatgacgagaagcttgtgtatccttggaaaggtattgtggtgaatattccaactacaaaggcacaagatggtcgatctgcgggcgagagtggatcgaagctaagggatgagtatattctaagaggatttaacccgactagagttcgtcctttatggaactacttgggacattcaggaacagctattgtggagtttaacaaagattggaatggacttcacaatggtcttttgtttgacaaggcttatacagtagatggtcatgggaagaaggactggttgaagaaagacggtcccaagttaggtctttacggttggattgctcgtgctgatgattataacggtaataatattattggagaaaacttgaggaagacgggtgatctgaaaactatagctgagcttacggaagaagaggcgaggaaacaggaattgcttgtgcagaacctgagacaacttgtagaagagaagaaaaaagacatgaaggagattgaggagctttgttcagttaagtcagaggaacttaatcagttgatggaagagaaggagaagaatcagcaaaagcattaccgtgagctgaatgctatacaagaaagaacaatgagtcacattcaaaagatagttgatgatcatgagaaattgaagaggctgttggagtcagagaggaagaaactcgaaatcaaatgtaatgagttggcaaagcgcgaagtgcacaatggaaccgagagaatgaaattgtctgaagatcttgaacagaatgcatctaagaatagctctcttgaactagctgccatggaacaacaaaaggcagacgaggaagttaaaaaacttgctgaagaccaaaggaggcaaaaggaggagcttcatgagaaaatcataagactagaaagacagagagatcagaaacaagcgattgagctagaagttgagcagttgaaaggacagctcaatgtgatgaagcacatggcatcagatggcgatgctgaagttgtgaaagaggtggacatcatcttcaaagatttaggtgagaaggaagcacaactcgcagatctcgataaatttaaccaaactcttatccttagagagcgcaggaccaacgatgagcttcaagaagctcataaagaattggtaaacattatgaaagaatggaacacaaatatcggtgttaagagaatgggagagctcgtgacgaaaccattcgtggatgcaatgcagcagaagtattgtcagcaagatgtggaggaccgagcagttgaagttctccaactttgggaacactatctcaaagattcagattggcatccattcaagcgggtcaagctcgaaaatgaagatagagaagtggaagtgatagatgatagagacgaaaagctgagggagctaaaggcagatttgggagatggtccttacaatgcggtcacgaaagctttgttggagataaacgagtataacccgagtggaaggtatattacaacagagctatggaacttcaaagcagataagaaggctacacttgaagaaggtgtcacttgtttacttgatcaatgggaaaaggcgaaacgcaagcgtggaatggcttagagctgcaagatgatggacatgggactgaataaaaagccgatgcggtttttagttgcagagaaatgtgtttggtttgaccaaactttggtggattctgtttgtttttcttctcagaacttagtgaataattgacacaactttgatgtcttgcatcggttcttttcattgtaacatttgtaggagtttggccgctttggacaataagaaataaaaatatcattgtaatataattcacatgtaaaacaactagatttggcctctcttctgtctcatatcttaagcatgtcatttagaaccttttattgtaaaaacaaactttgtcatgagttactttttgtagtcaaatttgatattgacccctt

SEQ ID NO: 15 - DNA, 865 bp, Arabidopsis thaliana
  source 1..865: mol_type = genomic DNA
tctcttaaaaaattcttaatggcatggagtcttcagttactaagagccggcgaatactgtggaagaagcacatggtgttgatttgaccaagcccgaccgccggagcaaggtggatcgtggatcaaccggcgccgttgtgtttcaacatctcttcatctcacgttagacatgtgtctgctacgtggcactttattttcttaaccttatctttaaatttgggtgggttaagctggaccttagatttaaatcaaagttgtaaatggtaagagatcggactttttcaccagcatatatcattaagcatgacatcagacagaaattggagatggagattcaagagctaaaaggcaaattccaagtgataaaacatttaggagatgatgatgataacattctgaaaatgaagctctggttaaagctaccatcctttgctttacatagaaggagaatctcaaggattcatcatggcatccattcaaacataaaggaaccaaggacaaatcaaatatgtgtctttcctgctgtctcatcccattttaagagtgatctggttaacgaagagtatgagcccctgaagaagcttaaagaaaaatggggagaagatgtgcataatactttaaaaataacaatcaaggatatggatgagtataatgcatgtggtaagtacccaactccagaactatggaactttaagaaaaaacttaaatcaacactgaaggaagtgattaaattccttttgaatgacatcaagagtctaaaacgccaacgaatctgtaggtgtgttatatcttttttggttgacataggtctccttatagatttaaaccaacataaaccccatatagttttagtgtataaggtttag

SEQ ID NO: 16 - DNA, 1665 bp, Arabidopsis thaliana
  source 1..1665: mol_type = genomic DNA
atgaagaagaaacaacaaaagcaggaatttgtagctgagacatcagagatgaacaacaacaacgagtgttctggacaagaccaacaaaaacgatatgtgtggccatgggttggtctagtagccaacgtaccaactgaggtggaaccatctggtcggagagtaggcaaaagcggttcaacgttacgtgatgagttcactctgaaagggtttaatccaacaagagtcaaacccatttggaataccaagggacatactggttttgctttggttgaattcgctaaagactttaaaggattcgaaagcgccatgcaattcgaaaagagttttgatttagaccgtcatgggaagagagattggaaaaaaggtcatcgcttgagagatgataagctttatggatggcttgcgagagaggatgattataatcgaagtgatactgttgggaagaatgtcaagaagaagagggatttgaaaagtatctctcagattgtagaggaagaccagaggaaactgtatcatctatttgagaatatgtgtcaaaccattgagaagaataagcaacgtaaacaacagcttgaacagaaagttgatgagactttggagagtttggaatttcataaccttatgttaaacaatagctaccaagaagagattcagaagatggagaagaatatgcaagagttttatcaacaggttcttggtggacatgaaaagtcttttgcagaactggaggcaaagagggagaagcttgacgagcgtgcaagattgattgagcaacgggctatcaaaaacgaagaagagatggaaaagaccaggcttgaaagagaaatgattcaaaaggctatgtgtgagcagaatgaagcgaatgaggaagctatgaaacttgcagaaaagcaccagaaagagaaggagaagcttcataaaaggataatggaaatggaagctaagctaaatgaaacgcaagagcttgagttggagatagagaagctgaaaggtactacaaatgtgatgaagcatatggtgggttgtgatggagataaagatattgtggagaagatagccaaaactcagatagagcttgacgctcgagaaacagctctccatgaaaaaatgatgactctcgcacgaaaagaacgtgcgaccaacgatgagtatcaagacgctcgtaaagagatgattaaggtatggaaggcgaatgaagagttgatgaagcaagagaagattagagtgaagataatgggggagttgaaccctgcacccttcttgcctgcagtgatgaacaaacataaggctatgatgctgtgttcagtgtgggcagcagagataggagatgtgcaatggactccatttagggtcgatgagtctgatggaacaccaaagcaaaaattacatatatctcaacattccaaatgtgaaatgcagagagtggtggatgaaaatgatgagaagcttcgtatgctgaagaaccagtacggtgaagaagtttatagtgaagtggtaagagcaaagctagagatggaggaacataacgctagtggcagctatgagactgaagagctttggaactatgaggagaaccgaaaggcgactatcgaggaaataacagatgtgatgttgaagataaggtccaaacttgctgctatgaagaacaaacgaaagaggccttga

SEQ ID NO: 17 - DNA, 2407 bp, Arabidopsis thaliana
  source 1..2407: mol_type = genomic DNA
atgtattccagaagagagctggaagatttggagtacagatactacagtgaaatgaaagatggtacaaggaaagtcaaaatctcagagtctctgttcaggtgtcccttttgttacatagatcgaaagcgtgattaccagtttgatgacttgcttcgacatgcttctggtattggcggtagttcccgcactaaggatgggagagataaagctagacatcttgctctggagagatatatgaggaagtatctccgccctcgagaaagaccacgtccttctccaacttcagatgtctcttctcttcctaaagaggagtttactggaaagtggaaatctactttgtcaactactgaagaaggagaattcataactactgaaaattctagttcacctcatattgtcaaagctgaaccaaagtttgtctccggagatgattctggacgtagtggtgaggaaagactaaagttttctgataaacccgaccccttttttagcaacgaagacaaatcataccctgccaaaagaccttgcctagtttctggtgcgaaagagggagatgaacctgttcaacggattggtctcagccatggtgctagctttgctccaacatatccccagaagctagtttctttgggtgctggtaatggggatcagatgtatgtgcatccctggaaaggtatcctggcgaatatgaaaagaacgtttaatgaaaaaacaaggaagtatgctggtgagagtggaagcaagataagagaagatttgatcaagaaagggtttaatccccataaagtcacgccactgtggaacggaagacttgggtttactggttttgctattgttgactttggtaaagagtgggaaggattcagaaacgcgaccatgtttgataaacactttgaagtgagtcagtgtgggaaaagagaccatgatctcacacgtgatccaggtgataagctttatggttgggtagcaaaacaagatgactactattcaagaactgctattggtgaccacctcagaaagcaaggggacttgaagagtgtttctggtaaagaggcagaagatcaaagaaagacattcacgcttgtctccaacttggaaaacacactggtaaccaaatctgataatcttcaacaaatggagagcatctacaaacaaaccagttcagtgcttgagaaaagaatgaaagagaaggatgaaatgatcaacacacataatgaaaaaatgagtattatgcagcaaactgcacgtgattatttggccagtatttatgaagaacatgaaaaggcctctcagcatctggaagctcaaaggaaagaatatgaagaccgggagaattatctagataagtgtcaagctaagaataagactgagcggagaaagcttcaatggcaaaagcataagaacttaatggcaacgcaagagcaaaacaaagctgatgaagacatgatgagattggcagaacagcaacagagggaaaaagatgaattacgtaagcaagttcgtgagctcgaggagaagatcgatgctgagcaggcattagagctagagatagagcgtatgagaggtgacttgcaggtcatgggacacatgcaagaaggtgaaggtgaagattcaaaaatcaaggagatgatagaaaagacaaaggaagaactgaaggagaaagaagaggattgggaatatcaagagtcgctctatcaaactcttgttgtaaaacatggctacactaacgatgagctacaggatgcgcgcaaggctttgattcgttcaatgcgagagttgaccacacgagcttacattggtgtgaagagaatgggagcattggatgagacaccattcaaaaaagtagctaaagagaaatatccagcagtagaagctgataaaaaagccgaagagctctgttccttgtgggaagagcacctgggagactcggcttggcatccgattaaggtcgtcgaaaaagatggaatcgcaaaggaagaactgaatgaagaagatgagaagctacaagagctgaggaaagagttgggtgaggaagtgtatgcagctgtgacacaagcgcttaaagaaaggaacgagtataatggcagtggaaggtacatagtgcctgagctttggaatttcaaacaaaacagaaaagcgagcatcaaggaaggagttgtttatctggtcaactcgtggaaacagaagaaaccaaagccgaagcgtagataaaaattaattctagaaacctctattgttgataattattaagactagatgagatttcatgattatccccactaagaatagttataaacttgagaaaaaaataaaaatagttatgaacttatgatgctgaaatcttggactgggttattcgttttgaaaagaggatttgggttttgttatttatgaatatgtttcattg

SEQ ID NO: 18 - DNA, 2353 bp, Arabidopsis thaliana
  source 1..2353: mol_type = genomic DNA
tcttccggacactgaacagtgagagcacccatctccaacctcttcctatgggaagcactgtgattttaagctcagatgatgaagattcagatattagtgaatctgaaatggatgagtatggagacaaaatgtacctaaaccttaaaggtgggaagctgaaagtgagactctctcctcaagcttttatctgtccttattgtccaaacaagaagaaaactagttttcaatacaaagatcttcttcaacatgcttctggagttggtaatagcaattctgataaaagaagtgcaaaggagaaagcaagtcaccttgctcttgtcaaataccttcaacaagatcttgctgattcagcttcagaagcagagccttcatcaaagcgtcagaaaaacggaaaccctattcaagattgtgatcatgacgagaagcttgtgtatccttggaaaggtattgtggtgaatattccaactacaaaggcacaagatggtcgatctgcgggcgagagtggatcgaagctaagggatgagtatattctaagaggatttaacccgactagagttcgtcctttatggaactacttgggacattcaggaacagctattgtggagtttaacaaagattggaatggacttcacaatggtcttttgtttgacaaggcttatacagtagatggtcatgggaagaaggactggttgaagaaagacggtcccaagttaggtctttacggttggattgctcgtgctgatgattataacggtaataatattattggagaaaacttgaggaagacgggtgatctgaaaactatagctgagcttacggaagaagaggcgaggaaacaggaattgcttgtgcagaacctgagacaacttgtagaagagaagaaaaaagacatgaaggagattgaggagctttgttcagttaagtcagaggaacttaatcagttgatggaagagaaggagaagaatcagcaaaagcattaccgtgagctgaatgctatacaagaaagaacaatgagtcacattcaaaagatagttgatgatcatgagaaattgaagaggctgttggagtcagagaggaagaaactcgaaatcaaatgtaatgagttggcaaagcgcgaagtgcacaatggaaccgagagaatgaaattgtctgaagatcttgaacagaatgcatctaagaatagctctcttgaactagctgccatggaacaacaaaaggcagacgaggaagttaaaaaacttgctgaagaccaaaggaggcaaaaggaggagcttcatgagaaaatcataagactagaaagacagagagatcagaaacaagcgattgagctagaagttgagcagttgaaaggacagctcaatgtgatgaagcacatggcatcagatggcgatgctgaagttgtgaaagaggtggacatcatcttcaaagatttaggtgagaaggaagcacaactcgcagatctcgataaatttaaccaaactcttatccttagagagcgcaggaccaacgatgagcttcaagaagctcataaagaattggtaaacattatgaaagaatggaacacaaatatcggtgttaagagaatgggagagctcgtgacgaaaccattcgtggatgcaatgcagcagaagtattgtcagcaagatgtggaggaccgagcagttgaagttctccaactttgggaacactatctcaaagattcagattggcatccattcaagcgggtcaagctcgaaaatgaagatagagaagtggaagtgatagatgatagagacgaaaagctgagggagctaaaggcagatttgggagatggtccttacaatgcggtcacgaaagctttgttggagataaacgagtataacccgagtggaaggtatattacaacagagctatggaacttcaaagcagataagaaggctacacttgaagaaggtgtcacttgtttacttgatcaatgggaaaaggcgaaacgcaagcgtggaatggcttagagctgcaagatgatggacatgggactgaataaaaagccgatgcggtttttagttgcagagaaatgtgtttggtttgaccaaactttggtggattctgtttgtttttcttctcagaacttagtgaataattgacacaactttgatgtcttgcatcggttcttttcattgtaacatttgtaggagtttggccgctttggacaataagaaataaaaatatcattgtaatataattcacatgtaaaacaactagatttggcctctcttctgtctcatatcttaagcatgtcatttagaaccttttattgtaaaaacaaactttgtcatgagttactttttgtagtcaaatttgatattgacccctt

SEQ ID NO: 19 - DNA, 2491 bp, Arabidopsis thaliana
  source 1..2491: mol_type = genomic DNA
acaattttttatctccggttaacaaattctttctcgcgacgacttcaacgcgcgacaatggcgcgtgtaagacaaacagaggtttcttggaatatctctccaagtacttttgctgcttctctatcaaaatgggaacaaacttagaaaaaaccaaaagaaatcgaaattacttggaaacaaaacatctgacgatctccagactcagctgaagtttcgagctgaatctcttcttctctacacgcgatttctctgctcgtagatgtaaaacaataacgcgaggcggtgatgaacaacaaattgagtgattttgagaaaaatctgtacaaaaaactcaagagtggaaagctcgaggtgaaagtctcataccggactttcctgtgtccttattgtcccgataataagaagaaggttggtttgtatgttgacattcttcagcatgcttctggagttggtaatagccaatccaagaaaagaagtttgactgagaaggctagtcaccgtgctcttgccaaataccttattaaagatcttgctcattacgctacttctactatatctaagcgcttaaaagccagaacatcattcattcctgctgaaaccggcgatgctcctataatttatgatgatgctcagttcgagaaacttgtgtggccttggaaaggagttttggttaatattcccacgacgagtacagaagatggtcggtcttgtactggagagagtggaccaaaacttaaggatgaattaatccgaagaggattcaacccaattagagttcgtactgtgtgggaccgtttcggtcattcgggaaccggaatagtggaatttaacagagactggaatggacttcaagatgctttggtgtttaagaaggcttatgaaggagatgggcatgggaaaaaggattggctttgtggtgctactgactcgagcctttatgcatggcttgccaatgctgatgattactacagggctaacattttaggagaaaacttgcggaagatgggtgacctcaaaagtatttataggtttgcagaagaagaggcaaggaaagaccaaaagcttttgcagcgtctgaactttatggttgagaacaaacaatatcggttgaagaaattacagataaaatattcacaggattcagttaaacttaagtatgagactgaagaaaaagaaaagattctccgtgcttacagtgaagatctgacaggaagacaacaaaaatcgactgatcatttcaataggatctttgctgatcatgaaaagcaaaaggtgcagctggagtctcagataaaggaacttgaaattagaaagttggagttggcaaaacgtgaggcagagaatgaaacgcagaggaaaatagtggcaaaagaacttgaacagaatgctgctataaatagttatgttcaactatctgccttggaacaacaaaagaccagagagaaagcgcaaagattggctgtagatcacaagatgcaaaaggaaaagcttcataagagaattgctgcactagaaaggcagcttgatcagaagcaggagcttgaactggaggtccagcaactgaaaagtcagctgagcgtgatgagactcgtggaattggacagtggttctgaaattgtgaacaaggtggagaccttcctcagagaccttagtgagacagaaggagagcttgcacacttaaatcaattcaatcaagatcttgttgttcaagagcggaagagcaatgatgaacttcaagaagctcgaagagcattgataagcaatttgagagacatgggattgcatattggtgttaagagaatgggggagcttgacaccaaaccgtttatgaaagcaatgagaataaagtactgtcaagaagatctagaggattgggcagttgaagttatccagctttgggaggaatatcttaaggacccagattggcatccttttaaacggataaagcttgagactgcagaaacaatagtggaagtaattgatgaggatgacgagaagttaagaaccctgaagaatgaactgggggatgatgcgtaccaagcagtggcaaatgcattgctggagataaacgagtataatccgagtggaaggtacatctcctcagagctatggaacttcagagaagacaggaaggctacgcttgaggaaggtgttaattctctactggagcaatggaatcaagcgaagcatctcaagtcataaaggtttatatttgcatttacccggagatggaaaataagtttagcgtgtaaaggatgtcaaaatgcaaggttcaacaattgtctctcgtctttgatgcaatatatgggtcttagaattgcgaagtaggtgtaaattagaggaggatggcgtcacattgggactcgaagttgaaactatgtttctacacttgacggttcaacattgtaggaaactaagtaacaaacattgttagatgattctaaaccttagagaagtttatgaatttgtgaagaaatgaacactttggctt

SEQ ID NO: 20 - DNA, 2503 bp, Arabidopsis thaliana
  source 1..2503: mol_type = genomic DNA
acaattttttatctccggttaacaaattctttctcgcgacgacttcaacgcgcgacaatggcgcgtgtaagacaaacagaggtttcttggaatatctctccaagtacttttgctgcttctctatcaaaatgggaacaaacttagaaaaaaccaaaagaaatcgaaattacttggaaacaaaacatctgacgatctccagactcagctgaagtttcgagctgaatctcttcttctctacacgcgatttctctgttagattatgcagctcgtagatgtaaaacaataacgcgaggcggtgatgaacaacaaattgagtgattttgagaaaaatctgtacaaaaaactcaagagtggaaagctcgaggtgaaagtctcataccggactttcctgtgtccttattgtcccgataataagaagaaggttggtttgtatgttgacattcttcagcatgcttctggagttggtaatagccaatccaagaaaagaagtttgactgagaaggctagtcaccgtgctcttgccaaataccttattaaagatcttgctcattacgctacttctactatatctaagcgcttaaaagccagaacatcattcattcctgctgaaaccggcgatgctcctataatttatgatgatgctcagttcgagaaacttgtgtggccttggaaaggagttttggttaatattcccacgacgagtacagaagatggtcggtcttgtactggagagagtggaccaaaacttaaggatgaattaatccgaagaggattcaacccaattagagttcgtactgtgtgggaccgtttcggtcattcgggaaccggaatagtggaatttaacagagactggaatggacttcaagatgctttggtgtttaagaaggcttatgaaggagatgggcatgggaaaaaggattggctttgtggtgctactgactcgagcctttatgcatggcttgccaatgctgatgattactacagggctaacattttaggagaaaacttgcggaagatgggtgacctcaaaagtatttataggtttgcagaagaagaggcaaggaaagaccaaaagcttttgcagcgtctgaactttatggttgagaacaaacaatatcggttgaagaaattacagataaaatattcacaggattcagttaaacttaagtatgagactgaagaaaaagaaaagattctccgtgcttacagtgaagatctgacaggaagacaacaaaaatcgactgatcatttcaataggatctttgctgatcatgaaaagcaaaaggtgcagctggagtctcagataaaggaacttgaaattagaaagttggagttggcaaaacgtgaggcagagaatgaaacgcagaggaaaatagtggcaaaagaacttgaacagaatgctgctataaatagttatgttcaactatctgccttggaacaacaaaagaccagagagaaagcgcaaagattggctgtagatcacaagatgcaaaaggaaaagcttcataagagaattgctgcactagaaaggcagcttgatcagaagcaggagcttgaactggaggtccagcaactgaaaagtcagctgagcgtgatgagactcgtggaattggacagtggttctgaaattgtgaacaaggtggagaccttcctcagagaccttagtgagacagaaggagagcttgcacacttaaatcaattcaatcaagatcttgttgttcaagagcggaagagcaatgatgaacttcaagaagctcgaagagcattgataagcaatttgagagacatgggattgcatattggtgttaagagaatgggggagcttgacaccaaaccgtttatgaaagcaatgagaataaagtactgtcaagaagatctagaggattgggcagttgaagttatccagctttgggaggaatatcttaaggacccagattggcatccttttaaacggataaagcttgagactgcagaaacaatagtggaagtaattgatgaggatgacgagaagttaagaaccctgaagaatgaactgggggatgatgcgtaccaagcagtggcaaatgcattgctggagataaacgagtataatccgagtggaaggtacatctcctcagagctatggaacttcagagaagacaggaaggctacgcttgaggaaggtgttaattctctactggagcaatggaatcaagcgaagcatctcaagtcataaaggtttatatttgcatttacccggagatggaaaataagtttagcgtgtaaaggatgtcaaaatgcaaggttcaacaattgtctctcgtctttgatgcaatatatgggtcttagaattgcgaagtaggtgtaaattagaggaggatggcgtcacattgggactcgaagttgaaactatgtttctacacttgacggttcaacattgtaggaaactaagtaacaaacattgttagatgattctaaaccttagagaagtttatgaatttgtgaagaaatgaacactttggct

SEQ ID NO: 21 - DNA, 1686 bp, Arabidopsis thaliana
  source 1..1686: mol_type = genomic DNA
atggagaaaaatcaacaaaagcaggaatttctagctgagacctcagagatgaagaacaccaaaaacaacgacgactgttctgtacaacaacaacaacgatttgtgtggccatgggttggtctagtagccaacataccaacggaggtggaaccatcgggtcggagagtaggcaaaagcggttcaacgttacgtgatgagttcactatgaaagggtttaatccaacaagagtccaacccatttgggatttcaagggtcattctggttttgctttggttgaattcgctaaagactttgaaggattcgaaagcgccatgaatttcgaaaggagttttaatttagaccgtcatgggaagagagattgggaaaaaggtcatcgcttgagagacaataagctctatggatgggttgccagagaggatgattataatcgaagtgatactgttgggaagaacgtcaagaagaagagagatttgaaaagtatctctcagattgtggaggaagacgagaggaaaatggttcatcttgttgagaatatgtctcaaaccattgagaagaagaagcaaagtaaacaagagcttgaacagaaagttgatgagacttctcgtttcttggagagtttggaattgcataacgttctgttaaacaaaaactaccaagaagggtttcagaagatgcagatgaagatggaagagttgtatcaacaggttctggatggacatgaaaagtctttggcagaactggaggcaaagagggagaagcttgacgagcgtgcaagactgatcgagcaacgggctatcataaacgaagaagagatggaaaagtccagacttgaaagagaaatgaatcaaaaggctatgtgtgagcagaatgaagcgaatgaggaagctatgaagcttgcagaaaagcaccaggcaagtagttcgttaaaagagaaggagaagcttcataaaaggataatggaaatggaagctaagctaaatgaaacgcaagagctggagttggagatagagaagctgaaaggtactacaaatgtgatgaagcatatggtggggagtgatggagataaagatattgtggagaagatagccaaaactcagattcagcttgacgctcaagaaacggctctccatgaaaaaatgatgactctggcacgaaaagaacgtgcaaccaacgacgagtatcaagacgttcttaaagagatgattcaggtatggaacgccaatgaagagttgatgaagcaagagaagattagagtgaagagaatggggcaattaaaccctgcacccttcttgcctgcagtgatgaagaaacataaagttacacaatcaaaggcagagaataaggctatgaagctgtgttcagtgtgggaagcaaacataggagatgtgcaatggactccatttagagtcgatgagtctgatggaacaccaaagagagttgtggatgaaaacgacgagaagcttcgtacgctgaagaaccagtacggtgaagaagtttataatgaagtggtaagaacaaaactagagattgaggaacataacgctagtggcagctatgtgattttagagctttggaactatgaggaaaaccgaaaggcgacgatggaggaagcaacagatgtgatgttgaagataaggtccaaacttgctgctatgaagaacaaacgaaagaggcttgaggtctaa

SEQ ID NO: 22 - DNA, 2183 bp, Arabidopsis thaliana
  source 1..2183: mol_type = genomic DNA
gtttcctcctccagtaaactgacgacgatacaagctctctcaccaacggcgacagtatctttgccggcggcgggagcgcttctgcttaatctgtagctcaaactaaaaattctctgggtattactcatggtgatttggaataacgatgatgatgattttttggagattgataactttcaatcttctccacggtcatctccaatacatgcaatgcagtgtagggtcgaaaatctagctggtgtagccgtgacaactagttctttgagctctcctactgagacaactgatttagttcagatgggcttctcagacgaggtttttgctacattgtttgacatgggatttcctgttgagatgatttctagagcgatcaaggaaactggaccaaatgtagaaacttcggttataattgatactatctccaaatactcaagcgactgtgaagctggttcttccaagtccaaggctattgatcatttccttgctatgggatttgatgaagaaaaagttgtcaaagccattcaagaacatggagaagacaatatggaagcaattgcaaatgcattgctctcttgtccagaggctaagaaactgccagcagcagtagaggaagaagatggcattgactggtcatcaagtgatgatgataccaattacaccgatatgttaaactcagatgatgagaaagatccaaactcaaatgaaaatggcagcaaaatacggtctttggtgaagatgggtttctcagagcttgaagcttctttagctgtcgagagatgtggagaaaatgtggatattgcagagctcacagacttcctttgtgctgctcaaatggctagggaatttagtgagttttacactgaacatgaagaacaaaagcctagacataatattaagaaaaggcggtttgagtcaaaaggagagccaagatcatctgttgatgacgagccgattcgtctaccaaatccaatgataggatttggggttccaaacgagcccggactcattacacatagatcgcttccagagttagcccgagggccaccttttttctactatgagaatgtcgccctcacacctaaaggcgtttgggagactatttccaggcacttgttcgagatcccacctgagtttgtggactcaaaatatttctgtgttgcagcgaggaagagaggctacatccacaatctccccatcaacaacagatttcagattcagcctccaccaaaatacaccatccatgatgcatttcctttgagtaagagatggtggccagaatgggataaaaggaccaagcttaattgcattttgacttgtacaggtagtgctcagttgactaacaggattcgtgtagcccttgagccttacaatgaagaaccagaaccgcctaagcatgtacaaagatatgtgattgaccagtgcaaaaaatggaatttggtttgggtgggtaaaaacaaagctgccccactcgagccagatgagatggagagtattctgggatttccaaaaaatcatactcgtggtggaggcatgagtagaactgagcgcttcaagtccttaggaaattcgtttcaggttgatactgtggcgtatcatctgtctgtcctgaagcccattttcccacatggaatcaatgttctctctcttttcacgggtattggtggtggggaagtggcacttcatcgtctccaaatcaaaatgaagcttgttgtgtctgttgagatttcaaaagtcaacagaaatattttgaaggacttttgggagcaaactaaccagactggagaattgatcgagttttcagacatccaacacttgactaatgacacaatcgaagggttgatggagaaatatggtggatttgatcttgtaattggaggaagtccttgtaacaatctggcaggcggtaatagggtaagccgagttggtcttgaaggtgatcaatcttcgttgttctttgagtattgccgtattctagaggtggtacgtgcgaggatgagaggatcttgatcattcacattacctgaagtagattgaagtagatatgactccatgaaatctagttgaactttatttttctatatctgttatgtaatatggccatgaaggtacatttttgaataatataagtcaacctaactctcttttgctttttgcgacaatatatctgcaactgcatttgcact

SEQ ID NO: 23 - DNA, 4743 bp, Arabidopsis thaliana
  source 1..4743: mol_type = genomic DNA
atgcattcgtcgttggagccggagaaaatggaggaaggtgggggaagcaattcgcttaagagaaaattctctgaaatcgatggagatcaaaatcttgattctgtctcttctcctatgatgactgactctaatggtagttatgaattgaaagtgtacgaggttgctaagaacaggaacataattgctgttttggggacagggattgataagtcagagatcactaagaggcttatcaaagctatgggttcttctgatacagacaaaagattgataattttcttggccccaactgtgaatcttgttaaacagcaatgctgtgagatcagagcacttgtgaatttgaaagttgaagagtactttggagctaaaggagttgataaatggacatctcagcgctgggatgaggaatttagcaagcacgatgttttagttatgactcctcaaatattattggatgtccttagaagtgcattcctgaaactagagatggtatgtcttctaataatagatgaatgccaccataccactggcaatcatccctatgcgaagttaatgaaggaattctatcacgaatccactagcaaaccgaagatatttggattgactgcgtcagccgtcattagaaaaggcattgtttcctctccctctaactatgcagctcaagtatcagaacttgagagactcatggactcaaagatttttaatcctgaagagcgtgaaggagtggaaaagtttgctacaacggttaaagaaggtccaatattgtataacccatcaccatcctgtagtttggaattgaaagaaaagttagaaacttcacacctcaagtttgatgcttctcttagaaggcttcaagagttgggaaaagacagttttctgaatatggataataagtttgagacatatcaaaagagattgtctatcgactacagagagattttgcattgccttgataatcttggcctgatttgcgcacacttggcggctgaagtctgcttggagaaaatctcagatacgaaagaggaaagtgaaacttataaagaatgctcaatggtgtgcaaggaatttcttgaggatattttatccaccattggggtgtatttgccgcaagatgataagagtctggtagatttgcagcaaaaccatctgtcagcagtaatttctgggcatgtatctccaaagctaaaagaactcttccatctattggattcctttagaggtgacaagcaaaagcagtgccttattttagttgagagaattataactgcgaaagtgatcgaaagattcgttaagaaagaagcctctttggcttaccttaatgtcttgtatttaaccgaaaacaacccctccaccaatgtatcggcacagaaaatgcaaattgaaatccctgatttatttcaacatggcaaggtgaatcttttattcatcacagatgtggttgaagagggatttcaggttccagattgctcatgcatggtttgttttgacctgcccaaaacaatgtgtagttactcgcagtctcaaaaacatgccaaacagagtaattctaagtctatcatgtttcttgaaagagggaacccgaagcaaagagaccatctgcatgaccttatgcgaagagaagtcctaattcaagatccagaagctccaaacttgaaatcgtgtccacctccagtgaaaaatggacacggtgtgaaggagattggatccatggttatcccagattctaacataactgtatctgaggaagcagcttccacacaaactatgagtgatcctcctagcagaaatgagcagttaccaccgtgtaaaaagttacgcttggataacaatctcttacaatccaacggcaaagagaaggttgcctcttctaaaagtaaatcatcttcatcggctgcaggttcaaaaaaacgtaaggagttgcacggaacaacctgtgcaaacgcattgtcaggaacctggggagaaaatattgatggcgccacctttcaggcttataagtttgacttctgttgtaatatttctggcgaagtatactcgagtttctctcttttgcttgagtcaactctcgccgaggatgttggtaaagttgagatggacctttacttggtcaggaagcttgtcaaggcttctgtctcaccttgtggccagatacgtttgagtcaagaggagctggtcaaagcaaaatattttcagcagtttttctttaatggcatgtttggaaagttgtttgttggatctaagtcacagggaacaaagagagaatttttgcttcaaactgacactagttctctttggcaccctgcctttatgtttctactgctaccagttgaaacaaatgatctagcttcgagtgcgacaattgattggtcagctatcaactcctgtgcctcaatagttgagttcttgaagaaaaattctcttcttgatcttcgggatagtgatgggaatcagtgcaatacctcatccggtcaggaagtcttactagacgataaaatggaagaaacgaatctgattcattttgccaatgcttcgtctgataaaaatagtctcgaagaacttgtggtcattgcaattcatactggacggatatactctatagttgaagccgtaagcgattcttctgctatgagcccctttgaggtggatgcctcatcaggctatgctacttatgcagaatattttaacaaaaagtatgggattgttttagcgcacccgaaccagccgttgatgaagttgaagcagagtcaccatgcgcacaaccttttagtcgacttcaatgaagagatggttgtgaagacagaaccaaaagctggcaatgttaggaaaagaaaaccgaatatccatgcgcatttgcctccagagcttttggctagaattgatgtaccgcgtgctgtgctaaaatcaatctacttgctgccttcagtgatgcaccgcctagagtctctaatgttggccagccagcttagggaagagattgattgtagcatagataacttcagtatatcaagtacatcgattcttgaagcagttacaacacttacatgccccgaatcattttcaatggagcggttggaactgctcggggattcagtcttgaagtatgttgcgagctgtcatctattccttaagtatcctgacaaagatgaggggcaactatcacggcagagacaatcgattatatctaactcaaatcttcaccgcttgacaaccagtcgcaaactacagggatacataagaaatggcgcttttgaaccgcgtcgctggactgcacctggtcaattttctctttttcctgttccttgcaagtgtgggattgatactagagaagtaccattggacccaaaattcttcacagaaaacatgactatcaaaataggcaagtcttgcgacatgggtcatagatgggtagtttcaaaatctgtatcagattgcgctgaggccctgattggtgcctattatgtaagcggtggattgtctgcttctctccatatgatgaaatggctcggtattgacgtcgattttgacccaaacctagtcgttgaagccatcaatagagtttctctacggtgttacattcctaaagaagatgagctcatagagttggagagaaagatccaacatgaattctctgcaaagtttcttttaaaagaggctatcacacactcctctcttcgtgaatcctattcatacgagagattagagtttcttggcgattctgtactggattttctaataacccgtcatctttttaacacctacgaacaaactgggcctggagagatgaccgatcttcgttctgcatgtgtaaacaatgaaaattttgcgcaagttgcagtgaaaaataacctgcatacccaccttcaacgctgtgctacggttctcgagactcaaataaacgactatctgatgtcctttcaaaagccagatgagactggtagatcaatcccttcaatacagggccctaaggctcttggagatgttgtggagagtatcgctggagcattgctgatcgatacgaggttagatctcgatcaagtgtggagagtctttgagccgttgctttctccacttgtaactccagataaacttcagcttcctccataccgggagctcaatgagctatgcgactctcttgggtatttctttcgagtgaaatgttcaaatgatggtgtcaaagcacaagccacgatccagttgcagctggatgatgttcttttaactggagatggatctgaacagacaaataaactggccttgggaaaagcagcttcacatctgcttacacaacttgagaagagaaacatttcacgtaaaacctcgctcggggataatcaaagttccatggatgtcaatcttgcttgcaatcatagcgacagagaaactctgacttcagagactactgaaatccagagtatagtgattccatttattggacctataaacatgaagaaaggcgggcctcgtggaactctacatgagttttgcaagaagcatctgtggccaatgcctactttcgatacctcggaagagaaatccagaactccgtttgaattcatagatggcggtgagaagcggactagcttcagcagtttcacatcgaccataaccctaaggatacccaatcgtgaggctgtgatgtatgctggagaagcaaggcctgacaagaagagttccttcgactctgcagtcgtggaattgctttatgagctcgagcgccgcaagatcgtcataatacaaaagtag

SEQ ID NO: 24 - DNA, 4742 bp, Arabidopsis thaliana
  source 1..4742: mol_type = genomic DNA
atgcattcgtcgttggagccggagaaaatggaggaaggtgggggaagcaattcgcttaagagaaaattctctgaaatcgatggagatcaaaatcttgattctgtctcttctcctatgatgactgactctaatggtagttatgaattgaaagtgtacgaggttgctaagaacaggaacataattgctgttttggggacagggattgataagtcagagatcactaagaggcttatcaaagctatgggttcttctgatacagacaaaagattgataattttcttggccccaactgtgaatcttgttaaacagcaatgctgtgagatcagagcacttgtgaatttgaaagttgaagagtactttggagctaaaggagttgataaatggacatctcagcgctgggatgaggaatttagcaagcacgatgttttagttatgactcctcaaatattattggatgtccttagaagtgcattcctgaaactagagatggtatgtcttctaataatagatgaatgccaccataccactggcaatcatccctatgcgaagttaatgaaggaattctatcacgaatccactagcaaaccgaagatatttggattgactgcgtcagccgtcattagaaaagctcaagtatcagaacttgagagactcatggactcaaagatttttaatcctgaagagcgtgaaggagtggaaaagtttgctacaacggttaaagaaggtccaatattgtataacccatcaccatcctgtagtttggaattgaaagaaaagttagaaacttcacacctcaagtttgatgcttctcttagaaggcttcaagagttgggaaaagacagttttctgaatatggataataagtttgagacatatcaaaagagattgtctatcgactacagagagattttgcattgccttgataatcttggcctgatttgcgcacacttggcggctgaagtctgcttggagaaaatctcagatacgaaagaggaaagtgaaacttataaagaatgctcaatggtgtgcaaggaatttcttgaggatattttatccaccattggggtgtatttgccgcaagatgataagagtctggtagatttgcagcaaaaccatctgtcagcagtaatttctgggcatgtatctccaaagctaaaagaactcttccatctattggattcctttagaggtgacaagcaaaagcagtgccttattttagttgagagaattataactgcgaaagtgatcgaaagattcgttaagaaagaagcctctttggcttaccttaatgtcttgtatttaaccgaaaacaacccctccaccaatgtatcggcacagaaaatgcaaattgaaatccctgatttatttcaacatggcaaggtgaatcttttattcatcacagatgtggttgaagagggatttcaggttccagattgctcatgcatggtttgttttgacctgcccaaaacaatgtgtagttactcgcagtctcaaaaacatgccaaacagagtaattctaagtctatcatgtttcttgaaagagggaacccgaagcaaagagaccatctgcatgaccttatgcgaagagaagtcctaattcaagatccagaagctccaaacttgaaatcgtgtccacctccagtgaaaaatggacacggtgtgaaggagattggatccatggttatcccagattctaacataactgtatctgaggaagcagcttccacacaaactatgagtgatcctcctagcagaaatgagcagttaccaccgtgtaaaaagttacgcttggataacaatctcttacaatccaacggcaaagagaaggttgcctcttctaaaagtaaatcatcttcatcggctgcaggttcaaaaaaacgtaaggagttgcacggaacaacctgtgcaaacgcattgtcaggaacctggggagaaaatattgatggcgccacctttcaggcttataagtttgacttctgttgtaatatttctggcgaagtatactcgagtttctctcttttgcttgagtcaactctcgccgaggatgttggtaaagttgagatggacctttacttggtcaggaagcttgtcaaggcttctgtctcaccttgtggccagatacgtttgagtcaagaggagctggtcaaagcaaaatattttcagcagtttttctttaatggcatgtttggaaagttgtttgttggatctaagtcacagggaacaaagagagaatttttgcttcaaactgacactagttctctttggcaccctgcctttatgtttctactgctaccagttgaaacaaatgatctagcttcgagtgcgacaattgattggtcagctatcaactcctgtgcctcaatagttgagttcttgaagaaaaattctcttcttgatcttcgggatagtgatgggaatcagtgcaatacctcatccggtcaggaagtcttactagacgataaaatggaagaaacgaatctgattcattttgccaatgcttcgtctgataaaaatagtctcgaagaacttgtggtcattgcaattcatactggacggatatactctatagttgaagccgtaagcgattcttctgctatgagcccctttgaggtggatgcctcatcaggctatgctacttatgcagaatattttaacaaaaagtatgggattgttttagcgcacccgaaccagccgttgatgaagttgaagcagagtcaccatgcgcacaaccttttagtcgacttcaatgaagagatggttgtgaagacagaaccaaaagctggcaatgttaggaaaagaaaaccgaatatccatgcgcatttgcctccagagcttttggctagaattgatgtaccgcgtgctgtgctaaaatcaatctacttgctgccttcagtgatgcaccgcctagagtctctaatgttggccagccagcttagggaagagattgattgtagcatagataacttcagtatatcaagtacatcgattcttgaagcagttacaacacttacatgccccgaatcattttcaatggagcggttggaactgctcggggattcagtcttgaagtatgttgcgagctgtcatctattccttaagtatcctgacaaagatgaggggcaactatcacggcagagacaatcgattatatctaactcaaatcttcaccgcttgacaaccagtcgcaaactacagggatacataagaaatggcgcttttgaaccgcgtcgctggactgcacctggtcaattttctctttttcctgttccttgcaagtgtgggattgatactagagaagtaccattggacccaaaattcttcacagaaaacatgactatcaaaataggcaagtcttgcgacatgggtcatagatgggtagtttcaaaatctgtatcagattgcgctgaggccctgattggtgcctattatgtaagcggtggattgtctgcttctctccatatgatgaaatggctcggtattgacgtcgattttgacccaaacctagtcgttgaagccatcaatagagtttctctacggtgttacattcctaaagaagatgagctcatagagttggagagaaagatccaacatgaattctctgcaaagtttcttttaaaagaggctatcacacactcctctcttcgtgaatcctattcatacgagagattagagtttcttggcgattctgtactggattttctaataacccgtcatctttttaacacctacgaacaaactgggcctggagagatgaccgatcttcgttctgcatgtgtaaacaatgaaaattttgcgcaagttgcagtgaaaaataacctgcatacccaccttcaacgctgtgctacggttctcgagactcaaataaacgactatctgatgtcctttcaaaagccagatgagactggtagatcaatcccttcaatacagggccctaaggctcttggagatgttgtggagagtatcgctggagcattgctgatcgatacgaggttagatctcgatcaagtgtggagagtctttgagccgttgctttctccacttgtaactccagataaacttcagcttcctccataccgggagctcaatgagctatgcgactctcttgggtatttctttcgagtgaaatgttcaaatgatggtgtcaaagcacaagccacgatccagttgcagctggatgatgttcttttaactggagatggatctgaacagacaaataaactggccttgggaaaagcagcttcacatctgcttacacaacttgagaagagaaacatttcacgtaaaacctcgctcggggataatcaaagttccatggatgtcaatcttgcttgcaatcatagcgacagagaaactctgacttcagagactactgaaatccagagtatagtgattccatttattggacctataaacatgaagaaaggcgggcctcgtggaactctacatgagttttgcaagaagcatctgtggccaatgcctactttcgatacctcggaagagaaatccagaactccgtttgaattcatagatggcggtgagaagcggactagcttcagcagtttcacatcgaccataaccctaaggatacccaatcgtgaggctgtgatgtatgctggagaagcaaggcctgacaagaagagttccttcgactctgcagtcgtggaattgctttatgagctcgagcgccgcaagatcgtcataatacaaaagtagactaatttagactgtactatatatgattc

SEQ ID NO: 25 - DNA, 4596 bp, Arabidopsis thaliana
  source 1..4596: mol_type = genomic DNA
atgcattcgtcgttggagccggagaaaatggaggaaggtgggggaagcaattcgcttaagagaaaattctctgaaatcgatggagatcaaaatcttgattctgtctcttctcctatgatgactgactctaatggtagttatgaattgaaagtgtacgaggttgctaagaacaggaacataattgctgttttggggacagggattgataagtcagagatcactaagaggcttatcaaagctatgggttcttctgatacagacaaaagattgataattttcttggccccaactgtgaatcttcaatgctgtgagatcagagcacttgtgaatttgaaagttgaagagtactttggagctaaaggagttgataaatggacatctcagcgctgggatgaggaatttagcaagcacgatgttttagttatgactcctcaaatattattggatgtccttagaagtgcattcctgaaactagagatggtatgtcttctaataatagatgaatgccaccataccactggcaatcatccctatgcgaagttaatgaagatttttaatcctgaagagcgtgaaggagtggaaaagtttgctacaacggttaaagaaggtccaatattgtataacccatcaccatcctgtagtttggaattgaaagaaaagttagaaacttcacacctcaagtttgatgcttctcttagaaggcttcaagagttgggaaaagacagttttctgaatatggataataagtttgagacatatcaaaagagattgtctatcgactacagagagattttgcattgccttgataatcttggcctgatttgcgcacacttggcggctgaagtctgcttggagaaaatctcagatacgaaagaggaaagtgaaacttataaagaatgctcaatggtgtgcaaggaatttcttgaggatattttatccaccattggggtgtatttgccgcaagatgataagagtctggtagatttgcagcaaaaccatctgtcagcagtaatttctgggcatgtatctccaaagctaaaagaactcttccatctattggattcctttagaggtgacaagcaaaagcagtgccttattttagttgagagaattataactgcgaaagtgatcgaaagattcgttaagaaagaagcctctttggcttaccttaatgtcttgtatttaaccgaaaacaacccctccaccaatgtatcggcacagaaaatgcaaattgaaatccctgatttatttcaacatggcaaggtgaatcttttattcatcacagatgtggttgaagagggatttcaggttccagattgctcatgcatggtttgttttgacctgcccaaaacaatgtgtagttactcgcagtctcaaaaacatgccaaacagagtaattctaagtctatcatgtttcttgaaagagggaacccgaagcaaagagaccatctgcatgaccttatgcgaagagaagtcctaattcaagatccagaagctccaaacttgaaatcgtgtccacctccagtgaaaaatggacacggtgtgaaggagattggatccatggttatcccagattctaacataactgtatctgaggaagcagcttccacacaaactatgagtgatcctcctagcagaaatgagcagttaccaccgtgtaaaaagttacgcttggataacaatctcttacaatccaacggcaaagagaaggttgcctcttctaaaagtaaatcatcttcatcggctgcaggttcaaaaaaacgtaaggagttgcacggaacaacctgtgcaaacgcattgtcaggaacctggggagaaaatattgatggcgccacctttcaggcttataagtttgacttctgttgtaatatttctggcgaagtatactcgagtttctctcttttgcttgagtcaactctcgccgaggatgttggtaaagttgagatggacctttacttggtcaggaagcttgtcaaggcttctgtctcaccttgtggccagatacgtttgagtcaagaggagctggtcaaagcaaaatattttcagcagtttttctttaatggcatgtttggaaagttgtttgttggatctaagtcacagggaacaaagagagaatttttgcttcaaactgacactagttctctttggcaccctgcctttatgtttctactgctaccagttgaaacaaatgatctagcttcgagtgcgacaattgattggtcagctatcaactcctgtgcctcaatagttgagttcttgaagaaaaattctcttcttgatcttcgggatagtgatgggaatcagtgcaatacctcatccggtcaggaagtcttactagacgataaaatggaagaaacgaatctgattcattttgccaatgcttcgtctgataaaaatagtctcgaagaacttgtggtcattgcaattcatactggacggatatactctatagttgaagccgtaagcgattcttctgctatgagcccctttgaggtggatgcctcatcaggctatgctacttatgcagaatattttaacaaaaagtatgggattgttttagcgcacccgaaccagccgttgatgaagttgaagcagagtcaccatgcgcacaaccttttagtcgacttcaatgaagagatggttgtgaagacagaaccaaaagctggcaatgttaggaaaagaaaaccgaatatccatgcgcatttgcctccagagcttttggctagaattgatgtaccgcgtgctgtgctaaaatcaatctacttgctgccttcagtgatgcaccgcctagagtctctaatgttggccagccagcttagggaagagattgattgtagcatagataacttcagtatatcaagtacatcgattcttgaagcagttacaacacttacatgccccgaatcattttcaatggagcggttggaactgctcggggattcagtcttgaagtatgttgcgagctgtcatctattccttaagtatcctgacaaagatgaggggcaactatcacggcagagacaatcgattatatctaactcaaatcttcaccgcttgacaaccagtcgcaaactacagggatacataagaaatggcgcttttgaaccgcgtcgctggactgcacctggtcaattttctctttttcctgttccttgcaagtgtgggattgatactagagaagtaccattggacccaaaattcttcacagaaaacatgactatcaaaataggcaagtcttgcgacatgggtcatagatgggtagtttcaaaatctgtatcagattgcgctgaggccctgattggtgcctattatgtaagcggtggattgtctgcttctctccatatgatgaaatggctcggtattgacgtcgattttgacccaaacctagtcgttgaagccatcaatagagtttctctacggtgttacattcctaaagaagatgagctcatagagttggagagaaagatccaacatgaattctctgcaaagtttcttttaaaagaggctatcacacactcctctcttcgtgaatcctattcatacgagagattagagtttcttggcgattctgtactggattttctaataacccgtcatctttttaacacctacgaacaaactgggcctggagagatgaccgatcttcgttctgcatgtgtaaacaatgaaaattttgcgcaagttgcagtgaaaaataacctgcatacccaccttcaacgctgtgctacggttctcgagactcaaataaacgactatctgatgtcctttcaaaagccagatgagactggtagatcaatcccttcaatacagggccctaaggctcttggagatgttgtggagagtatcgctggagcattgctgatcgatacgaggttagatctcgatcaagtgtggagagtctttgagccgttgctttctccacttgtaactccagataaacttcagcttcctccataccgggagctcaatgagctatgcgactctcttgggtatttctttcgagtgaaatgttcaaatgatggtgtcaaagcacaagccacgatccagttgcagctggatgatgttcttttaactggagatggatctgaacagacaaataaactggccttgggaaaagcagcttcacatctgcttacacaacttgagaagagaaacatttcacgtaaaacctcgctcggggataatcaaagttccatggatgtcaatcttgcttgcaatcatagcgacagagaaactctgacttcagagactactgaaatccagagtatagtgattccatttattggacctataaacatgaagaaaggcgggcctcgtggaactctacatgagttttgcaagaagcatctgtggccaatgcctactttcgatacctcggaagagaaatccagaactccgtttgaattcatagatggcggtgagaagcggactagcttcagcagtttcacatcgaccataaccctaaggatacccaatcgtgaggctgtgatgtatgctggagaagcaaggcctgacaagaagagttccttcgactctgcagtcgtggaattgctttatgagctcgagcgccgcaagatcgtcataatacaaaagtag

SEQ ID NO: 26 - DNA, 2764 bp, Arabidopsis thaliana
  source 1..2764: mol_type = genomic DNA
agggtttcatttcgtctctttatcttccttcgtctctttagcttccttcgattctctgactcaatcatggcgccgaagcgaaagagacctgcgacaaaggatgacactaccaaatccattcccaaaccgaagaagagagctcctaagcgagctaagacggtgaaagaagagccggtgacagtggtcgaggaaggggaaaagcatgttgcgaggtttctagacgagccaattccagaatctgaagcgaagagtacctggcctgacagatacaaaccgattgaggtacagccacctaaggcttcgtcaagaaagaagacgaaggatgacgaaaaagttgagatcattcgtgctcgatgccattatagacgtgcgattgttgatgagcgtcagatatatgagctgaatgatgatgcttatgtacagtctggtgagggaaaggatcccttcatttgtaaaatcattgaaatgtttgaaggggctaatgggaaactgtatttcacggctcggtggttttatagaccttctgatactgtaatgaaagagttcgagattctgatcaagaaaaagcgtgtgtttttctctgagatacaagatacaaatgaattgggattacttgaaaagaagctgaacattttgatgattcccttgaatgaaaatactaaagagactatccctgcaacagaaaactgtgactttttctgtgacatgaactatttcttgccttacgatacatttgaagctatacaacaagaaaccatgatggctataagtgaaagttcaacaatatccagtgatactgatataagagaaggagctgctgccatatcagagattggagaatgttctcaagaaacagaaggtcacaaaaaggcaactttgcttgacctttactccggctgtggagctatgtcgacagggttgtgcatgggtgcacaactgtctggtttgaacctcgtcactaaatgggctgttgacatgaatgcacatgcatgtaaaagcttgcagcataaccacccagagacaaacgtgagaaacatgaccgcagaagatttcttgtttctgcttaaggagtgggagaagctatgcattcatttctctttgagaaatagtccaaattcagaagaatatgccaaccttcacggtttgaataatgttgaggacaatgaagatgtcagcgaggagagtgaaaatgaagatgatggagaagtttttactgttgacaagattgttggtatttccttcggagtccctaaaaagttattgaaacgtggactttatttgaaggtaaggtggctgaattatgatgattctcatgatacatgggagcctattgaaggactcagtaattgccggggtaaaattgaagagttcgttaaacttggatataaatctggcatccttccgttaccaggaggtgttgatgttgtctgcggtgggccaccatgccaaggaatcagtggtcacaaccgcttcaggaacttattggaccctctagaagatcagaaaaacaagcagcttttggtgtatatgaacattgtagaatatttgaagcctaagttcgttttgatggaaaacgtcgttgacatgctgaagatggctaagggctatcttgcacggtttgctgttggacgccttctacagatgaattaccaagtgaggaatggaatgatggcagctggagcttatgggcttgctcagtttcgtttgaggttctttctatggggtgcactccctagtgagataattccgcagttcccacttccaacacatgatctagttcatagaggaaatattgtcaaggagtttcagggaaacatagtagcctatgatgaaggacatactgtgaagttagcagacaagcttttgttgaaggatgtgatttctgatcttcctgcagttgccaacagtgaaaaaagagacgagattacatatgacaaagatcccacaacgccatttcaaaagttcatcagattgagaaaggatgaagcgtcaggttcacaatcaaagtccaagtccaaaaagcatgtcttatatgatcatcaccctcttaatcttaatataaatgactatgaacgggtttgtcaggtccccaagagaaagggagcgaattttagggactttcctggtgttattgttggacctggtaatgtagtcaagttggaagagggaaaggaaagggtcaaacttgaatctggaaaaacattggttcccgattatgccttaacatatgtcgatgggaaatcatgcaaaccttttggtcgtctttggtgggacgaaattgtccccactgttgtcacacgggcagaaccccacaaccaggtgatcattcatccagagcaaaatcgggttttatccattcgagaaaatgcgagactccaaggctttcctgatgactacaaactctttggcccacccaaacagaagtacattcaagtaggtaacgctgtagctgtgccagtagcgaaggcccttggatatgctttgggaacagctttccagggactcgcagttgggaaagatccacttcttactctgcctgaaggttttgcattcatgaagccaactcttccttccgagcttgcatgaacactgttgattcatcgcatttttcgatttatcttctattcattgttttcctaggatttatctttagaccatttgctgcggaatttggatttgttttgtttaagtttcacgactttcaagtttagcaactctgaatttctggtaactttgttttaatcagatgttatggatttgtggg

SEQ ID NO: 27 - DNA, 3018 bp, Arabidopsis thaliana
  source 1..3018: mol_type = genomic DNA
caccaaaacaaacaaaccctttcttcttcctctcataatccctctctctcttcttctctctcgctcgctgctctgtttagggtttttctcgttcgtctcttctataagtactagagatggattctgatgaaccgaatgggagtggattaccacctccaccacctttcgttccagcaaatcttgtccctgaagtggagcctgtaaaaaagaacattcttctcccaatggctcggcctcgaggcagcggctccaaaggacagaagattcctcttcttactaatcactttggagtcaagttcaacaaaccaagcggttacttctttcattacagtgttgctatcaattatgaagatggccgtccagtggaggctaaaggtatcggccgaaagattcttgacaaagttcaggagacctatcaaagtgatttgggtgccaaatactttgcttatgatggcgagaagactctcttcactgttggtgctcttcccagcaacaaacttgacttctctgttgttcttgaagaaataccttctagcagaaatcacgctggaaatgatacaaatgatgctgatagaaaaagatcaaggcgtcccaaccaaactaagaaattcatggttgagataagttatgctgcaaagatccccatgcaggctattgcaagcgctcttcaagggaaggagacagagaatcttcaagacgctctgagagtgctggatattattttgcgccagagtgcagctaggcaaggttgcctccttgttcgccagtcctttttccacaatgacgtaaagaactttgtacctattggtggaggtgtcagtggttgcagagggttccattcaagtttcagaactactcagggaggcttatccctgaatattgacacttcaactacgatgatagtacaacctggacctgtagttgatttcctgcttgctaaccagaacaagaaagatccatacggaatggactggaacaaggctcgacgtgtcctcaagaatctgagagttcaaattactctttccaatagagaatacaagataagtggactaagtgaacacagctgcaaagatcaactatttacatggaggaaacctaacgacaagggagaatttgaggaggttgagatcacagtgctcaattactataaagagcgtaacattgaagtgcgttattcaggtgacttcccttgcatcaatgttggtaagccgaagcgtcccacttacttccccattgagttctgtaatcttgtgtctctacagcgatacacaaaatcgcttaccaattttcagagggctgccctagttgaaaagtctaggcagaagccacctgaaaggatggcctcgctaaccaaaggtctgaaggacagcaattacaatgccgacccggtattgcaagatagtggtgttagcattatcaccaattttacccaagttgaaggccgtatcttaccaacaccaatgctgaaagtgggcaagggagaaaacctttccccaatcaaaggaaaatggaactttatgcgtaagacactcgctgagccaacgacggttactagatgggctgttgtgaacttctctgctcgctgtgatacaaatacacttattcgtgacttgattaaatgtggacgggagaaaggaattaatgtagagcctccattcaaggatgtcatcaacgagaatcctcagtttaggaatgcaccagctactgtgagagtagagaatatgtttgagcagataaaatccaaactcccaaagccgcctctgttccttctttgcatactcgctgaaaggaaaaactctgatgtttatggcccttggaaaaaaaagaatcttgttgatcttggaattgtgactcagtgcattgctcccaccagactgaacgatcagtatctcaccaatgttctcctgaagataaatgccaagcttggtggattgaattcgttgttagctatggagcgctcaccagcaatgccaaaagtaacgcaagttcctaccatcattgttgggatggatgtatcccatggttcccctggccagtctgatataccatcaattgctgctgttgtgagctcaagacaatggccactcatctcaaaatataaggcatgtgtacgcacacaatcacgcaaaatggaaatgattgataatctcttcaaacccgtcaatggcaaagacgaaggaatgttcagggaactcttgttagacttttactacagttcagagaataggaaaccagagcacatcattattttcagggatggtgtaagcgagtctcagttcaatcaagttcttaatattgaattggatcagatgatgcaggcatgcaagtttcttgatgatacgtggcatccgaagtttacagtgatagttgcccagaagaaccaccacacaaagttcttccagtctcgaggccctgataatgttcctccaggaacaatcattgacagccagatctgtcacccacgcaactttgatttctatctctgcgcccatgctggcatgattggaactacaaggccaacacattaccatgttctgtatgacgagattgggtttgccacagacgacctccaagaacttgtgcattctctgtcctatgtctaccagaggagcaccactgcgatctcagtcgttgcacctgtatgttacgctcatttggcagctgcacagatgggaactgtgatgaagtatgaagagttgtctgagacttcttcgagccatggaggaatcaccacacctggagcagtccctgtgccacctatgccgcagctgcacaataatgtttcaacctccatgttcttctgttgatggaacatggtccagtccacacgatagctgagtttatatgcttttgatggagaaccaacgaacttttgtttactcttctctgggtttggttcctcttttgtttttcgtcgaccctttaacattgaggagatactctttatattctgtcggtttttgtgggcgctgttggttgatactttattatgcttaatcagatttggtattttaaggc

SEQ ID NO: 28 - DNA, 2997 bp, Arabidopsis thaliana
  source 1..2997: mol_type = genomic DNA
cattcttttgcttgtctgggaaacccaaagagactgtgacggagaagagaaatgagctaaataaattcctctctttgattcaccggaaccctagaaatcctcttcttaattctttcaaagattattttcccctggaaggatggagacatcttcatctctgccactgtcacccataagtatagaaccagaacagcccagccatcgagattatgacatcacaactagacgtggggttggaaccacaggcaacccaatagaattgtgcaccaatcactttaatgtttctgtgagacagccggatgtagtattttaccagtacactgttagtatcaccacagaaaacggtgatgctgttgatgggacaggaataagcagaaagcttatggaccaactattcaagacttactcttctgatcttgatggtaaaaggttggcatatgatggagagaagactttatatactgttggtcctctaccacagaacgaatttgactttctagtcatcgtggaagggtcattttcaaaacgtgattgtggtgtctctgatggtggtagttcttccggtacttgcaagcgatcaaaacgttctttcttgccaagaagttacaaggttcagatacattatgctgcagaaataccgttgaagactgttcttggcactcagagaggagcttatacaccagataagagtgctcaggatgcacttagagtgcttgacattgtactgaggcagcaagcagctgaaaggggatgccttttggtcagacaggcatttttccatagcgatgggcaccccatgaaagttggaggaggtgttataggtattcgaggtttacattcgagctttcgtccaactcatggaggactctcgcttaacattgatgtgtcaacaacaatgatcttagaacctggtccagttattgaattcctgaaagccaatcagagtgttgagacaccacggcaaatcgactggattaaggctgcgaaaatgcttaaacatatgagggttaaggcaacacaccgtaacatggaatttaaaattataggtctaagttcgaaaccgtgcaatcagcaactgttttcaatgaagattaaagatggtgaacgtgaggtacctattagagagattactgtgtatgactatttcaagcaaacctacacagagcctatttcttctgcgtactttccatgccttgatgttggcaagccagatcggcccaactatcttccactggagttttgtaatcttgtatctctgcaacgttatacaaaaccattgtcagggaggcaaagagttttacttgttgaaagttcaagacaaaaacctctagagagaattaaaacactcaatgatgcaatgcatacctactgctatgacaaggacccatttttggctggatgtggcatctccattgaaaaagaaatgactcaagttgaaggccgtgttctcaagcccccaatgctgaagtttggcaagaatgaagattttcaaccttgcaacggacggtggaactttaacaacaagatgcttctagaaccaagagctattaaaagctgggctatcgtcaacttttcttttccatgcgacagtagtcacatttcccgtgagcttataagctgtggcatgaggaaaggcattgaaattgatcgaccttttgcactagttgaagaggatccacagtacaaaaaagcaggtcctgttgaaagggtagaaaaaatgattgcaacgatgaagttaaaatttccagatcctcctcattttatcctctgtattctgccagaacggaaaacttctgatatctatggtccctggaagaagatatgcctcactgaagaagggatccacacacaatgcatctgcccaatcaagatcagtgaccaatatctcaccaatgtacttctgaagataaattcgaagcttggaggcatcaattctctgttgggaatagagtactcttacaacattccattgataaacaaaattcccaccttgattttgggtatggatgtatctcatgggcctccaggtcgggcagatgttccttcagtagcagcggttgttggttcaaaatgctggcccttaatctcaaggtatagggcagctgtaagaactcagtcaccacgtctggagatgattgattcgctcttccaacctatcgagaacactgagaaaggagataacggtatcatgaacgaattatttgtagagttctatcggacaagcagggcacggaaacctaagcagattatcattttcagggatggtgtgagtgaatcacagttcgagcaagtcttgaagatcgaagtggaccaaattataaaggcgtatcaacgtcttggtgaatctgatgtgccaaaattcactgtcattgtggctcagaagaaccaccacaccaagttgtttcaagctaagggtcctgaaaatgttcctgcaggaactgtcgtggacaccaagatcgtacacccgacaaactacgatttttacatgtgtgctcatgcaggaaaaataggaacttcaagaccggctcattaccatgtattacttgatgagattggtttctcccccgatgacttgcagaatctcatccattctctctcctatgtcaaccaacgtagcacaactgcaacttcgatcgtggctccagtacgatacgctcatcttgcagcagctcaagttgcgcaattcacaaagtttgaaggtatatcggaggacgggaaagttccagagcttccacgtctgcacgagaatgtcgaaggcaacatgttcttctgctgagtacatataagtagttctgcttcctccctagtctaaacccaaaccctcctctttagaggaagtttatcattttgcatatatgcaatcatcaccgtacagtttcattagaagtaagaagaaagatcctcgcgtagattaagaggctcattggcttattgatagcccaagtttgcttactaaacggcagcgatttttgcgtttagcttttggatttttcaata

SEQ ID NO: 29 - DNA, 2553 bp, Arabidopsis thaliana
  source 1..2553: mol_type = genomic DNA
atggatacgactctaccgcctcctcaacacatggaacgtgaacctttgaagagcaagagtagtcttcttccaatgactcgccgtggcaacggttccaaaggacagaagattcttctgctcactaaccacttcagagtcaacttcagaaaaccaaacagtcataatttcttccattacagcgttactatcacatatgaagatggtagtccacttttagccaaaggttttggcagaaagattcttgaaaaagttcaacagacttgtcaagctgatttgggttgcaaacattttgcttatgatggcgacaagaatctttatactgttggtcctcttcctagatccagtctagacttctctgttgttcttgaaaccgcgccttctaggagaaacgcagacaaaagactaaagcttcctcaccaatccaagaaattcaatgttgcaatcctttttgcgcctccagaaatcccaatggaagctattgcaaatgctcttcaaggaaagaaaactaaacatcttctagatgctatcagagtgatggactgtattttgagccaaaatgcagctagacaaggttgcctcctagttcggcaatctttcttccacaatgacgcaaagtactttgcgaatatcggtgaaggtgtagattgttgcaaaggatttcattcaagcttcagaactactcagggaggcttgtccctcaatattgatgtttcgactgctatgatagtaaaacctggtcctgttgttgattttcttattgcaaatcaaggtgtgaacgatccattctctattaactggaaaaaggctaaaaatactctgaaaaatcttagagttaaagtcctcccttcaaatcaagaatacaagataaccggactaagtggactacactgcaaagatcaaacgtttacttggaagaaaaggaaccaaaacagggaatttgaggaggttgagattacagtgtccgattacttcactaggatccgtgaaatcgaactgcgttactcgggtggcttaccttgtatcaatgttggtaagccaaatcgtcctacctactttcccattgagctctgtgagcttgtatctctacaacgctatactaaagcgctaaccaaattccagaggagtaaccttatcaaagaatcaaggcagaatccacaacaaagaattggtgtgttaaccagagctctcaagactagtaattataatgatgacccaatgttgcaagaatgtggtgttaggattggctctgacttcactcaagtcgaaggccgcgtgttaccaacaccaaagcttaaagctggcaaagaacaagacatctatcctattaatgggagttggaacttcaagaacaagccagccacagttactagatgggctgttgtgaacttctctgctcgctgtgacccgcaaaagattattgatgatttgaccagatgtggaaagatgaaaggaattaacgtagattctccataccatgtcgtctttgaagaaaatcctcagtttaaggatgccactggttctgtaagagttgataagatgtttcaacatttacaatcaatactcggcgaagttcctccaaaattccttctatgcatactcgaaaagaaaaactctgatgtttatgaaaaatcttgttcaatgtggaattgtgaatgtattgttcctcctcaaaacttaaatgatcagtatctcacaaatcttctactaaagataaatgccaagcttggtggattgaattcagttttggatatggagctgtcaggaacaatgcctctggtaatgagagttcctaccatcattattggaatggatgtatctcatggttctcctggacagtctgatcatataccatccattgccgcggttgtgagctccagagagtggccactgatctcaaaatacagggcttgtgtgcgtacacagtcgcctaaagttgaaatgatcgatagcctctttaaacccgtctctgacaaagatgatcaaggtatcatgagagagctcttgcttgactttcactcaagttctggaaagaaaccgaatcacattatcattttcagggatggtgtcagtgaatctcagtttaaccaagttcttaatattgaactggatcagatgatgcaaataaaccaccacacgaagttcttccaaaccgaaagccctaataatgttcttccaggaacaataattgacagcaacatctgtcaccaacacaacaacgatttctatctttgtgctcatgctggaaagattggaactacaaggccaacacattaccatgtgctctacgacgagattggatttgacacagatcaactccaagaacttgtgcattcactatcctatgtctaccagcggagcacaactgccatctctcttgttgcgccgatatgttatgctcatttggcggctgcacagatggcaactgcaatgaagtttgaggacatgtctgagacttcatcgagccacggcgggatcaccacagctggagcagtccctgtgcctcccatgccgaagctgaacaccaacgttgctagttcaatgttcttttgctga

SEQ ID NO: 30 - DNA, 2994 bp, Arabidopsis thaliana
  source 1..2994: mol_type = genomic DNA
atgtcaaatcgtggtggtggtggtcacggcggcgctagtcgtggtcgaggaggtggacgaaggtctgaccagagacaagatcagtcttctggtcaagttgcttggccgggtttacaacaaagctacggtggtcgtggtggttctgtttccgccggtagaggtcgtggaaacgtcggaagaggtgaaaatactggagatctgacggcgacgcaagttccggttgcttctgctgtttctggcgggagaggtcgtggtaacatcggagatccgacgttttctgttgcgtcttcgtctaagacggtgtctgttgcttcttcatctaaagaggaaagtaagaatacggaggtttctgagaccatgtcgaaccttcagattacttcgacggagacgaaacctgaaatgacgtcacttcctccggcgtcatctaaagcggttacgtttccggtacggccaggacgtggtactttggggaagaaagtcatggttcgtgcgaatcatttccttgttcaagttgctgatcgtgatctctaccattacgatgtttcgatcaatcctgaggttatatcaaagacagtgaacagaaacgtgatgaaacttctggttaagaattataaagactctcacttgggagggaagtcaccagcgtatgatggaaggaaaagcctctatactgctggtccattaccttttgactcgaaagagtttgttgtgaatctggcggagaaaagagctgacggttcctctgggaaggacagaccgtttaaagttgctgtaaagaatgtgacaagcactgatctttatcagttgcaacagttccttgatcgtaagcaaagagaggctccatatgatactatccaagtgcttgatgttgttcttagggataagccctctaatgattatgtctctgttgggaggtcttttttccacactagtttgggaaaggacgcaagagatggtaggggtgagcttggagatggtattgagtactggagaggttatttccaaagtctaaggctgactcagatgggtttgtctctgaacattgacgtttcagcaagatcattttatgaaccgattgttgtcactgactttattagcaagtttctgaatataagggacttaaacaggccacttagagactcagatcgacttaaggtgaagaaagttttgaggacactgaaagttaagttgcttcactggaacggcacaaaaagtgccaaaattagtgggatttctagtctacccatcagggagctaaggttcactctggaggacaaatcagagaagacggttgttcaatattttgctgaaaaatataattatagagtgaaataccaggctctacctgctattcaaacagggagtgacacaagacccgtctacctaccaatggagctctgccaaattgacgaagggcaaagatacaccaaaaggctcaatgagaagcaagtgactgcattgctaaaagctacctgccaacgaccccctgatagagagaactcgatcaaaaacttggttgtgaaaaataattacaatgatgatctgagcaaggagtttgggatgtcagtgactacccaactagcctcgattgaagctcgtgtacttcccccaccgatgttgaagtaccatgacagtggtaaagagaaaatggtaaatccaaggctaggacagtggaacatgattgacaagaaaatggttaatggagcaaaagtcacttcttggacttgcgtaagtttctctactcggattgaccgtggtttaccccaagagttctgcaaacagttgattgggatgtgtgtcagcaaaggaatggaatttaagcctcaacctgctattccgttcatctcttgtccccctgaacatattgaggaagctcttctcgatatccacaaaagggcacctggtctccaactgttgattgtaatattgcctgatgtgactggatcatatggaaaaataaaaaggatctgtgaaacagaattggggattgtctctcagtgttgccaacctagacaagttaataaactcaacaagcagtacatggaaaatgttgccttgaagatcaatgtcaagactgggggaaggaacactgttcttaatgatgctattagaagaaacatacctcttattactgatcgtccaaccatcatcatgggtgctgatgtgactcacccacagcctggagaggactcaagtccttctattgctgctgttgtggcctctatggactggcctgagataaacaaataccgaggattggtttctgctcaagctcatagggaagaaattattcaggacctgtataagctggttcaggatccacaacgtgggctagtccactctggtttgataagggaacatttcatagcattcaggagagctacaggccagatacctcaaaggatcatcttctatcgtgacggagtaagcgaagggcagtttagtcaggttctgctacatgagatgactgctatccgcaaggcttgtaactctctccaagagaattatgttcctcgtgttactttcgtgattgtccagaaacgtcaccacacacgtttgttccctgagcaacacgggaatcgtgatatgactgataagagtggcaatattcaaccaggtactgtcgtggacactaaaatctgtcaccctaatgaattcgacttctatttgaacagccatgctggtattcagggaacaagcaggccggcacattaccatgtacttctcgatgagaacggtttcaccgctgatcagttgcaaatgctcacaaacaacctctgctacacgtatgcgaggtgtacaaaatctgtgtcaattgtgccaccagcctactacgctcacttggctgcattccgtgcccgctactacatggagagtgagatgtctgatggaggttcgagcaggtccaggagctcaacaacaggtgtgggtcaagtcatttcgcagctcccagcaataaaagataacgtcaaggaggttatgttttattgctaa

SEQ ID NO: 31 - DNA, 5109 bp, Arabidopsis thaliana
  source 1..5109: mol_type = genomic DNA
atgcgtgacgaagttgacttgagcttgaccattccctcgaagcttttggggaagcgagacagagaacaaaaaaattgtgaagaagaaaaaaacaaaaacaaaaaagctaaaaagcagcaaaaggacccaattcttcttcacactagtgctgccactcacaagtttcttcctcctcctttgaccatgccgtacagtgaaatcggcgacgatcttcgctcactcgactttgaccacgccgatgtttcttccgaccttcacctcacttcttcttcctctgtttcttcgttttcctcttcttcgtcttctttgttctccgcggctggtacggatgatccttcaccgaaaatggagaaagaccctagaaaaatcgccaggaggtatcaggtggagctgtgtaagaaagcaacggaggagaacgttattgtatatttgggtacaggttgtgggaagactcacattgcagtgatgcttatatatgagcttggtcatttggttcttagtcccaagaaaagtgtttgtatttttcttgctcccaccgtggctttggtcgaacagcaagccaaggtcatagcggactctgtcaacttcaaagttgcaatacattgtggaggcaagaggattgtgaagagccactcggagtgggagagagagattgcagcgaatgaggttcttgttatgactccacaaatacttctgcataacttacagcactgtttcatcaagatggagtgtatctcccttctaatatttgatgagtgtcaccatgctcaacaacaaagcaaccatccttatgcagaaatcatgaaggttttctataaatcggaaagtttacaacggcctcgaatatttggaatgactgcatctccagttgttggcaaagggtcttttcaatcagagaatttatcgaaaagcattaatagccttgaaaatttgctcaatgccaaggtttattcagtggaaagcaatgtccagctggatggttttgtttcatctcctttagtcaaagtatattattatcggtcagctttaagtgatgcatctcaatcgaccatcagatatgaaaacatgctggaggacatcaaacagcggtgcttggcatcacttaagctgctgattgatactcatcaaacacaaaccctcctaagtatgaaaaggcttctcaaaagatctcatgataatctcatatatactctgctgaatcttggcctctggggagcaatacaggctgctaaaatccaattgaatagtgaccataatgtacaagacgagcctgtgggaaagaatcctaagtcaaagatatgtgatacatatctttctatggctgctgaggccctctcttctggtgttgctaaagatgagaatgcatctgacctcctcagcttagcggcgttgaaggaaccattattctctagaaagctagttcaattgattaagatcctttcggtattcaggctagagccacacatgaaatgtataatatttgtcaatcggattgtgactgcaagaacattgtcatgcatactaaataacttggaactgctacggtcttggaagtctgatttccttgttggacttagttctggactgaagagcatgtcaagaaggagtatggaaacaatacttaaacggttccaatctaaagagctcaatttactggttgccactaaagttggtgaagaaggccttgatattcagacatgctgtcttgtgatccgttatgatttaccagagactgttaccagcttcatacagtccagaggtcgtgctcgaatgcctcagtctgaatatgcgtttctagtggacagcggaaacgagaaagagatggatcttattgaaaattttaaagtaaatgaagatcgaatgaatctagaaattacttacagaagctcagaggaaacttgtcctagacttgatgaggagttatacaaagttcatgagacaggagcttgtatcagtggtggaagcagcatctcccttctctataaatattgttctaggcttccacatgatgaattttttcagcccaagccagagtttcaattcaagcctgttgacgaatttggtggaactatctgtcgcataactttacctgctaatgctcctataagtgaaatcgaaagttcactactaccttcgacagaagctgctaaaaaggatgcttgtctaaaggctgtgcatgagttgcacaacttgggtgtacttaacgattttctgttgccagattccaaggatgaaattgaggacgaattgtcagatgatgaatttgattttgataacatcaaaggtgaaggctgttcacgaggtgacctgtatgagatgcgtgtaccagtcttgtttaaacaaaagtgggatccatctacaagttgtgtcaatcttcattcttactatataatgtttgtgcctcatcccgctgataggatctacaaaaagtttggtttcttcatgaagtcacctcttcccgttgaggctgagactatggatatcgatcttcaccttgctcatcaaagatctgtaagtgtaaagatttttccatcaggggtcacagaattcgacaacgatgagataagactagctgagcttttccaggagattgccctgaaggttctttttgaacggggggagctgatcccggactttgttcccttggaactgcaagactcttctagaacaagcaaatccaccttctaccttcttcttccactctgtctgcatgatggagaaagtgttatatctgtagattgggtgactatcagaaactgcttgtcatcaccaatctttaagactccatctgttttagtggaagatatatttcctccttcgggctctcatttaaagctagcaaatggctgctggaatattgatgatgtgaagaacagcttggtttttacaacctacagtaaacaattttactttgttgctgatatctgccatggaagaaatggtttcagtcctgttaaggaatctagcaccaaaagccatgtggagagcatatataagttgtatggcgtggaactcaagcatcctgcacagccactcttgcgtgtgaaaccactttgtcatgttcggaacttgcttcacaaccgaatgcagacgaatttggaaccacaagaacttgacgaatacttcatagagattcctcccgaactttctcacttaaagataaaaggattatctaaagacatcggaagctcgttatccttgttaccatcaatcatgcatcgtatggagaatttactcgtggctattgaactgaaacatgtgctgtctgcttcgatccctgagatagctgaagtttctggtcacagggtactcgaggcgctcacaacagagaaatgtcatgagcgcctttctcttgaaaggcttgaggtgcttggtgatgcattcctcaagtttgctgttagccgacacctttttctacaccatgatagtcttgatgaaggagagttgactcggagacgctctaacgttgttaacaattccaacttgtgcaggcttgcaataaaaaaaaatctgcaggtctacatccgtgatcaagcattggatcctactcagttctttgcatttggccatccatgcagagtaacctgtgacgaggtagccagtaaagaggttcattccttgaatagggatcttgggatcttggagtcaaatactggtgaaatcagatgtagcaaaggccatcattggttgtacaagaaaacaattgctgatgtggttgaggctcttgtgggagctttcttagttgacagtggcttcaaaggtgctgtgaaatttctgaagtggattggtgtaaatgttgattttgaatccttgcaagtacaagatgcttgtattgcaagcaggcgctacttgcccctcactactcgcaataatttggagacccttgaaaaccagcttgactataagttcctccacaaaggtctacttgtacaagcctttatccatccatcttacaacaggcatggaggaggctgctaccagagattggagtttcttggggatgctgttctggactacttgatgacatcctattttttcacagtcttcccgaaactgaaacctggtcaactgaccgatctaagatctctctcagtaaataatgaggcgctagcaaatgttgctgtcagtttttcgctaaagagatttctattttgcgagtccatttatcttcatgaagttatagaggattataccaatttcctggcatcttccccattggcaagtggacaatctgaaggtccaagatgcccaaaggttcttggtgacttggtagaatcctgtttgggggctcttttcctcgattgtgggttcaacttgaatcatgtctggactatgatgctatcatttctagatccggtcaaaaacttgtctaaccttcagattagtcctataaaagaactgattgaactttgccagtcttacaagtgggatcgggaaatatcagcgacgaaaaaggatggtgcttttactgttgaactaaaagtgaccaagaatggttgttgccttacagtttctgcaactggtcggaacaaaagagagggcacaaaaaaggctgcacagctgatgattacaaacctgaaggctcatgagaacataacaacctcccatccgttggaggatgttctgaagaatggcatccgaaatgaagctaaattaattggctacaatgaagatcctatagatgttgtggatcttgttgggctggacgttgaaaacctaaatatcctagaaacttttggcgggaatagtgaaagaagcagctcatacgtcatcagacgaggtctcccccaagcaccatctaaaacagaagacaggcttcctcaaaaggccatcataaaagcaggtggaccaagcagcaaaaccgcaaaatccctcttgcacgaaacatgtgttgctaactgttggaagccaccacacttcgaatgttgtgaagaggaaggaccaggccacctgaaatcattcgtctacaaggtaatcctggaagttgaagatgcgcccaatatgacattggaatgttatggtgaggctagagcaacgaagaaaggtgcagcagagcacgctgcccaagctgctatatggtgcctcaagcattctggattcctttgctga

SEQ ID NO: 32 - DNA, 5648 bp, Arabidopsis thaliana
  source 1..5648: mol_type = genomic DNA
caaaagatgtattttaaaatctctaaactcaataactccacaaaaattttcagaatcaatgattgtagaaacacatgatttctggttcagaatttcacacactccacccaaaaaaatacccttaaaaagttataattgtattgattagctgataaaatcaatttattggaaagaaatcctaataataacgctgtaatagaagagaagagaagagagagggagacgtgagatcgtgaattatgcgtgacgaagttgacttgagcttgaccattccctcgaagcttttggggaagcgagacagagaacaaaaaaattgtgaagaagaaaaaaacaaaaacaaaaaagctaaaaagcagcaaaaggacccaattcttcttcacactagtgctgccactcacaagtttcttcctcctcctttgaccatgccgtacagtgaaatcggcgacgatcttcgctcactcgactttgaccacgccgatgtttcttccgaccttcacctcacttcttcttcctctgtttcttcgttttcctcttcttcgtcttctttgttctccgcggctggtacggatgatccttcaccgaaaatggagaaagaccctagaaaaatcgccaggaggtatcaggtggagctgtgtaagaaagcaacggaggagaacgttattgtatatttgggtacaggttgtgggaagactcacattgcagtgatgcttatatatgagcttggtcatttggttcttagtcccaagaaaagtgtttgtatttttcttgctcccaccgtggctttggtcgaacagcaagccaaggtcatagcggactctgtcaacttcaaagttgcaatacattgtggaggcaagaggattgtgaagagccactcggagtgggagagagagattgcagcgaatgagcactgtttcatcaagatggagtgtatctcccttctaatatttgatgagtgtcaccatgctcaacaacaaagcaaccatccttatgcagaaatcatgaaggttttctataaatcggaaagtttacaacggcctcgaatatttggaatgactgcatctccagttgttggcaaagggtcttttcaatcagagaatttatcgaaaagcattaatagccttgaaaatttgctcaatgccaaggtttattcagtggaaagcaatgtccagctggatggttttgtttcatctcctttagtcaaagtatattattatcggtcagctttaagtgatgcatctcaatcgaccatcagatatgaaaacatgctggaggacatcaaacagcggtgcttggcatcacttaagctgctgattgatactcatcaaacacaaaccctcctaagtatgaaaaggcttctcaaaagatctcatgataatctcatatatactctgctgaatcttggcctctggggagcaatacaggctgctaaaatccaattgaatagtgaccataatgtacaagacgagcctgtgggaaagaatcctaagtcaaagatatgtgatacatatctttctatggctgctgaggccctctcttctggtgttgctaaagatgagaatgcatctgacctcctcagcttagcggcgttgaaggaaccattattctctagaaagctagttcaattgattaagatcctttcggtattcaggctagagccacacatgaaatgtataatatttgtcaatcggattgtgactgcaagaacattgtcatgcatactaaataacttggaactgctacggtcttggaagtctgatttccttgttggacttagttctggactgaagagcatgtcaagaaggagtatggaaacaatacttaaacggttccaatctaaagagctcaatttactggttgccactaaagttggtgaagaaggccttgatattcagacatgctgtcttgtgatccgttatgatttaccagagactgttaccagcttcatacagtccagaggtcgtgctcgaatgcctcagtctgaatatgcgtttctagtggacagcggaaacgagaaagagatggatcttattgaaaattttaaagtaaatgaagatcgaatgaatctagaaattacttacagaagctcagaggaaacttgtcctagacttgatgaggagttatacaaagttcatgagacaggagcttgtatcagtggtggaagcagcatctcccttctctataaatattgttctaggcttccacatgatgaattttttcagcccaagccagagtttcaattcaagcctgttgacgaatttggtggaactatctgtcgcataactttacctgctaatgctcctataagtgaaatcgaaagttcactactaccttcgacagaagctgctaaaaaggatgcttgtctaaaggctgtgcatgagttgcacaacttgggtgtacttaacgattttctgttgccagattccaaggatgaaattgaggacgaattgtcagatgatgaatttgattttgataacatcaaaggtgaaggctgttcacgaggtgacctgtatgagatgcgtgtaccagtcttgtttaaacaaaagtgggatccatctacaagttgtgtcaatcttcattcttactatataatgtttgtgcctcatcccgctgataggatctacaaaaagtttggtttcttcatgaagtcacctcttcccgttgaggctgagactatggatatcgatcttcaccttgctcatcaaagatctgtaagtgtaaagatttttccatcaggggtcacagaattcgacaacgatgagataagactagctgagcttttccaggagattgccctgaaggttctttttgaacggggggagctgatcccggactttgttcccttggaactgcaagactcttctagaacaagcaaatccaccttctaccttcttcttccactctgtctgcatgatggagaaagtgttatatctgtagattgggtgactatcagaaactgcttgtcatcaccaatctttaagactccatctgttttagtggaagatatatttcctccttcgggctctcatttaaagctagcaaatggctgctggaatattgatgatgtgaagaacagcttggtttttacaacctacagtaaacaattttactttgttgctgatatctgccatggaagaaatggtttcagtcctgttaaggaatctagcaccaaaagccatgtggagagcatatataagttgtatggcgtggaactcaagcatcctgcacagccactcttgcgtgtgaaaccactttgtcatgttcggaacttgcttcacaaccgaatgcagacgaatttggaaccacaagaacttgacgaatacttcatagagattcctcccgaactttctcacttaaagataaaaggattatctaaagacatcggaagctcgttatccttgttaccatcaatcatgcatcgtatggagaatttactcgtggctattgaactgaaacatgtgctgtctgcttcgatccctgagatagctgaagtttctggtcacagggtactcgaggcgctcacaacagagaaatgtcatgagcgcctttctcttgaaaggcttgaggtgcttggtgatgcattcctcaagtttgctgttagccgacacctttttctacaccatgatagtcttgatgaaggagagttgactcggagacgctctaacgttgttaacaattccaacttgtgcaggcttgcaataaaaaaaaatctgcaggtctacatccgtgatcaagcattggatcctactcagttctttgcatttggccatccatgcagagtaacctgtgacgaggtagccagtaaagaggttcattccttgaatagggatcttgggatcttggagtcaaatactggtgaaatcagatgtagcaaaggccatcattggttgtacaagaaaacaattgctgatgtggttgaggctcttgtgggagctttcttagttgacagtggcttcaaaggtgctgtgaaatttctgaagtggattggtgtaaatgttgattttgaatccttgcaagtacaagatgcttgtattgcaagcaggcgctacttgcccctcactactcgcaataatttggagacccttgaaaaccagcttgactataagttcctccacaaaggtctacttgtacaagcctttatccatccatcttacaacaggcatggaggaggctgctaccagagattggagtttcttggggatgctgttctggactacttgatgacatcctattttttcacagtcttcccgaaactgaaacctggtcaactgaccgatctaagatctctctcagtaaataatgaggcgctagcaaatgttgctgtcagtttttcgctaaagagatttctattttgcgagtccatttatcttcatgaagttatagaggattataccaatttcctggcatcttccccattggcaagtggacaatctgaaggtccaagatgcccaaaggttcttggtgacttggtagaatcctgtttgggggctcttttcctcgattgtgggttcaacttgaatcatgtctggactatgatgctatcatttctagatccggtcaaaaacttgtctaaccttcagattagtcctataaaagaactgattgaactttgccagtcttacaagtgggatcgggaaatatcagcgacgaaaaaggatggtgcttttactgttgaactaaaagtgaccaagaatggttgttgccttacagtttctgcaactggtcggaacaaaagagagggcacaaaaaaggctgcacagctgatgattacaaacctgaaggctcatgagaacataacaacctcccatccgttggaggatgttctgaagaatggcatccgaaatgaagctaaattaattggctacaatgaagatcctatagatgttgtggatcttgttgggctggacgttgaaaacctaaatatcctagaaacttttggcgggaatagtgaaagaagcagctcatacgtcatcagacgaggtctcccccaagcaccatctaaaacagaagacaggcttcctcaaaaggccatcataaaagcaggtggaccaagcagcaaaaccgcaaaatccctcttgcacgaaacatgtgttgctaactgttggaagccaccacacttcgaatgttgtgaagaggaaggaccaggccacctgaaatcattcgtctacaaggtaatcctggaagttgaagatgcgcccaatatgacattggaatgttatggtgaggctagagcaacgaagaaaggtgcagcagagcacgctgcccaagctgctatatggtgcctcaagcattctggattcctttgctgatgatctcgagcggctatatatcggttagaaatagatgttatcataggcatatataacttttaccagagctacatattagcatatatgatcgacacctacaatttctcgaaagagaaaaaaggatgtctgaaaactaaccttaaaccatagattttggagcggagagctttcggcaaaagttctcttcgattgctcttctgaatttctgaatataagtatatgtttacttgtacttgatgaacccatagcatgataggctccaaaaatatagtttactcatctctcatgcatcaaatatgttcctgtgtgatcttaattaaacaatatatgaactaagcgtta

SEQ ID NO: 33 - DNA, 3324 bp, Arabidopsis thaliana
  source 1..3324: mol_type = genomic DNA
atggggaagacaattcaagtgtttggattccctaatggtgtgagcgcagaagaagttaagaagtttcttgaaagactcactggttcaggcactgtttacgcaatcaaagttagacaaccaaagaaaggtggtccaagagtctatgccattgttcaattcacatctgagagacatacgaggctgatcatcactgcggcagcagaacgtctttactatggaagatcttatctcaaggcttttgaagttgaacaagacattgttccaaagccaagagcttcattacacaccatctctggtttaaagatgttctttggatgtcaagtctcgactaagaagtttttaactctatggagtgctcaagatgtttgtgtctcgtttggaattgggatgaggaaactgcatttttcgttttcttggtatcaaaaggattatcgtcttgagctttcgtatgagaatatatggcagattgatttgcattctccgcaaggacgatcatcgaagtttcttgtgattcaggtgattggtgctcctaaaatatttgagaaagaggatcaacctatcaatcttttgtttggaataatggatttttacagtgatgggtctgatgagcaatggattagaactacagatttcacttcatcttcttgtattggtcaatcaacagcgttttgtttagagcttcctgttcatcttaatgttcctgatttcagagagaattttgccaactatgcagagcacagagccagctcttttctcattgaatctggttctagctattcatctaatgctaacacacttgttcctgttgttgatcctcctccagggtttagtttgccttttgagatcttgtttaaacttaacacattggtgcagaacgcgtgtctctccgggccagctcttgatcttgacttttatcggttgcttaatcagaaaaaatatgatagagctctcatagatcactgtcttgaaaaactctttcaccttggagaatgttgctatgagcctgctcattggcttcgcgatgagtacaagaagtggatatcgaaaggaaagcttccactgtctcctacaatatctcttgatgatggacttgtttatatgtatcgcgttcaagttacaccagcaagagtctatttctctggaccggaggtgaatgtttctaatcgtgtgcttcgacattactccaagtatatcaacaacttcctcagggtctcatttgttgatgaagatcttgaaaaggttcgttccatggatctatctccacgctcttctactcaaagaagaaccaagttatacgacaggatatattctgttcttcgcgatgggattgtcataggcgataagaagtttgagtttctcgccttttcttccagccagttgcgggagaactctgcttggatgtttgcaccaatagatcggattacagcagcacatatcagagcttggatgggtgattttgaccatataagaaatgtagctaaatatgctgcaaggcttggtcaatcttttagctcttcaagagagacacttaatgttaggagtgatgagattgaagtgattcctgatgttgagattatatctttagggacacgctatgtgttttccgatggaataggaaagatatcagctgaatttgctagaaaggtagcgaggaaatgtggtcttacagagttttctccatctgcttttcaaatccgttatggcggttataaaggagtggtggctgttgatccaaactcatcaaagaaactgtctctgaggaagagtatgagcaaattcgaatcggagaacaccaagcttgatgttctggcgtggagcaagtaccaaccttgttatatgaacagacaactgattacacttttgtctactcttggagttacggacagtgtgtttgagaagaaacaaagggaagttgtggatcgtctcgacgcaatcttgactcatcctttggaagctcacgaggctcttggtttaatggctccaggggaaaacacaaatattctcaaggcattgatcttgtgtggctataaacctgacgctgaacctttcctttcaatgatgcttcagaatttcagggcatctaagttgttggaactacggacaaaaacaaggattttcatttctggtggaagatctatgatgggatgcctagacgagaccagaacactggagtatggtcaggtagtagtgcagtattcagatcccatgaggccgggaaggcgattcatcatcaccggacctgttgttgttgccaaaaacccatgcctgcatcctggtgacgtgcgtgttcttcaagctgtcaatgtcccagctttaaatcatatggtggactgcgttgtgttcccgcaaaagggcttgaggccacacccaaatgaatgttctgggagtgatttagatggagatatttactttgtatgttgggatcaagaattggttccgccaagaacgtctgaaccaatggactacactcctgaaccaactcaaatcttggatcatgatgtcacaattgaggaagttgaagagtactttgcgaactacattgtgaatgatagtttagggatcatcgcgaatgctcataccgcctttgcggataaggaaccactcaaggcgtttagtgacccatgcattgagcttgcaaagaagttttcaactgcggtagatttcccaaaaactggtgttgcagctgtgataccgcaacatctttacgtgaaagagtatcctgatttcatggagaaaccggataagccaacatatgagtcgaagaacgtgattggtaagctttttagagaggtaaaagagcgagctccaccgttgatctcgatcaaatcattcacgcttgatgtggcctcaaagtcttatgataaagacatggaagttgacggatttgaggagtatgttgatgaagctttctaccagaaggcgaattatgatttcaagttaggtaatttgatggattactatgggattaagactgaggctgagattcttagtggtggtataatgaggatgtcaaagtcattcaccaagagacgagatgcagaatcgattggaagagcggttcgggcgttgaggaaagaaactttgtcgttgttcaatgcttctgaagaagaagaaaatgagtcagcaaaggcttcggcttggtatcatgtaacgtaccactcaagttactggggactttataatgagggtttgaatcgtgaccatttcttaagttttgcgtggtgcgtttatgataagcttgtgaggatcaagaagaccaatcttgggaggcgtcagcggcaggagacgctcgagcggttagaccatgttctgcgtttcggttga

SEQ ID NO: 34 - DNA, 7324 bp, Arabidopsis thaliana
  source 1..7324: mol_type = genomic DNA
tgccataagacggtatgagaatctacggtctcactaataccctaacatgcatagaataaaagaagggataaatgaaagcaattaaactatatatagtagataattgaaaactaaactaacaaaattaagaactaaaatgagcaaataaacaagatagataaattgaacaatcaagatgttagaaatcatgcaatcgatctacatattttcaagataatgaacctctaacaattaggctaattcatgattagtgtggtaaaagcctctaacgtaacttagccaaattcaaaatcaatttggtaaactatcacaatggttaagaaacaatgcacacaaattcctttaagttacaaagcatccgatcctaaatatcacttgctagatggttaggccagaaatcgttttctttcaattttctttgggtctgaacgtagacacaactcaaacacctctcttgatcttgtatgctttaaaatgtggtctcttcaagtcgggtatcttgtttgttttggttccgagtgcatctgtctttagccacctagctagctagaaggtaattgtagatatccattttcaccaactagctagtttttgtcctccagctggcttggctaactacgtacgttccaaatgtcaaacacttaaaaactatatgtcaacactaactaactaaatttattatatcctatatctcaagtgtacacaatgtataatattaataacataattcaagcacctcctgatcttatatacttcaaaaatgtgatgtctctctaagtggagtatcattttaattttggttccaattgcatctgtaattaaccatatatagctaacttgccgatgtgtgtaatataactaaactatagagaatatttgtagataccctcattctccagctggctagctatgtaagttccaaatgtcacacacttgactatttgtctttctccacttataaccttaatcacagatcaagaatcatctccaattatagttttctttattgaatccacctaatctctattcaccaatttataatttttataattgcggcttagatacctttttagtcaataatcaaaaatggattccagtgaggatcaaccataaacgagatcattgaagcacataaactaattgacaataagttacatagtttaggagacataaaactgtttaaattttatattgtgcttaataataatttataattattgtaacacagttgttaaatccatagttatgtagcatgtacgtgtcaattaatgcgcacattcaatattagaacacagaaggtttgtctaccaccactaccaattgaaattaaaaaatttaaaataatctagcgggacacaaagcgaagtcaataacataagtcaaccattttaacggtcaagattgtaagagtagctctactatgatggagccgtgacgtagaggaacataactgaaagcgaagaatcctcgatttatgctactgtcactgaaccattttcctctcaggtcggagctaaattttgagagtaaaataaaaaagcaaaagagagaaattgaaaaaaaaagaaagaaaaataatcctctcttgtttcggctagggtttcgtttttgtttcatcgataaactcaaaggtgatgattttagggtcttgtgagtgtgcttttttgtttgattctactgtagggtttatgttctttagctcataggttttgtgtatttcttagaaatgtggcttctttaatctctgggtttgtgactttttgtgtggtttctgtgtttttcatatcaaaaacctattttttccgagtttttttttacaaattcttactctcaagcttgaatacttcacatgcagtgttcttttgtagattttagagttaatgtgttaaaaagtttggatttttcttgcttatagagcttcttcactttgattttgtgggtttttttgttttaaaggtgagatttttgatgaggtttttgcttcaaagatgtcacctttctgggtttgtcttttgaataaagctatgaactgtcacatggctgacgcaattttgttactatgtcatgaaagctgacgtttttccgtgttatacatgtttgcttacacttgcatgcgtcaaaaaaattggggctttttagttttagtcaaagattttacttctcttttgggatttatgaaggaaagttgcaaactttctcaaattttaccatttttgctttgatgtttgtttagattgcgacagaacaaactcatatatgttgaaatttttgcttggttttgtataggattgtgtcttttgcttataaatgttgaaatctgaactttttttttgtttggtttctttgagcaggagatggattcaacaaatggtaacggagctgatcttgaatcagcaaatggggcaaacgggagtggggttactgaggcattaccacctcctccaccagttatacctccaaatgtggaaccagttcgtgttaaaactgaacttgctgagaagaaggggccagttcgagttcctatggctcgaaaaggatttggaacaaggggccaaaagatccccttgttaacaaatcatttcaaagtcgatgtggctaatcttcagggtcatttcttccactacagtgtaagtttttgaaactattttgtgttatttttgttggatgattgatgtcactagaatggatgcagtgtgtatgtttttttgctactgttatgttgacttattctgttatttggttctgaatgatgtcaaactaatgggattatttgtgggtttgtacaggtggctctattctatgatgatggtcgtcctgttgaacaaaagggtgttggaagaaaaatccttgacaaggtgcatcagacttaccattctgatctggatggtaaagagtttgcttatgacggtgagaagacgttgtttacatatggagctttgcctagtaacaagatggatttttctgtggtgcttgaggaagtatctgctacaaggtaaaacatcatctgactatagtcattacattggttgtgtgctttagtttttgttcttagtaaggattttgtgagcagggctaatggaaacggaagccccaatgggaatgaaagtccaagtgatggtgataggaaaagactgcgtaggcctaaccggtccaaaaactttagagtggagatcagctatgcggccaaaattcctcttcaagctcttgctaatgcaatgcggggacaagaatcagagaattcccaggaggcaatacgggttcttgatatcatattgaggcaacatgctgctagacagtaagtgtcaagtgtatatatgtattttgttaatctcatatatttgtctttctaatacctatggtacaaattgcagaggttgcttgcttgttcgacagtcttttttccacaatgatccaaccaactgtgaaccagttggtggtaacatcttaggatgtaggggatttcactccagtttcagaacaacgcagggtggcatgtcacttaatatgggtacataatttcacttgtacttgatgttggtgtttgattctgtctgttgtagcaataatttagtgtctaatagtttatgttttgttcttatgctagatgttacaaccaccatgatcatcaagcctggtccagtggttgatttcctaattgctaaccaaaatgctagggacccttattcgattgactggtctaaggttaactacttattatgatatgtggctttttcataatctaaacatgttccttacctcttttgcttggcttgacacattttaacatgttgttttcaacaggctaaacgaacccttaagaacctaagggtaaaggtcagcccctcaggccaagaattcaagataaccggattgagtgacaagccttgcagggaacaaacgtaagatattcactaatttgactttgttgtgagatgcatttgtttctgttttagttttctgacgttgtgatctctttcaaagataaatggttctctgaagtttgctttttacactgtctaggtttgaattgaagaaaaggaacccaaatgaaaatggagagttcgaaactactgaagttacagttgctgactacttccgcgatacaaggcatattgatttgcaatattctgcggatttgccttgcatcaatgttgggaagccaaagcgacccacttacattcctctcgaggtttgcctcttatactcatcaacgttctcatagtcatggtattaatttgttttcaaaaatcatgctaatgtatgtaatgtggtggaattttcgcagctctgcgcgttggttccacttcagaggtacacaaaagcacttaccacgttccaaagatctgcccttgttgagaaatccagacagaaaccccaagagaggatgactgttctgtccaaagtaaagtatcctgaccgcttcataactgttctgttttgtcagtgaactggaatttacatatctttggtttcatgctttcaggctctgaaagttagcaactatgatgcggaaccactcctgcgatcctgtggcatttcgatcagctccaactttactcaggtggagggtcgtgttctaccagctcccaaggtatggtgcgatcgcttactttttgacatgatgaattgtttttagcttttgcatacatgtaatattctcttgttttctttgactgacagctgaaaatgggatgtggatctgaaacctttcccagaaatggtcgctggaacttcaacaacaaggtgctgtttctctctgcctttctttgtattttacctgttcagagagtctgattccctttgttgtacaggaatttgttgagcccaccaaaattcaacgatgggttgttgtcaatttctctgctcgctgtaatgtacgtcaagttgttgatgatctgataaaaattggaggatcaaaaggaattgtaagcaggattctcttcttttgtttttagtattcttgaaaacttgtttgtgattatcaacaatttagatactgcttctttctgtattctgtcccaggaaattgcttctccctttcaagtgtttgaggagggtaatcaattccgccgtgctcctcctatgattcgtgttgagaacatgtttaaggacatccaatcgaaactccctggtgtcccacaattcatactatgtgtgctccctgacaaaaagaacagtgatctctatggttagatatctcttaaatccagtcttcaatcatctttttgttttatataatagaagtttccttggataaatactttgaatccttcatcaggtccatggaagaaaaaaaacttaactgaatttggcattgttactcaatgcatggctccaacgcggcaacctaatgatcagtatcttactaacttacttctgaagattaatgcaaaggtgatctctctccttttttctcttttggaaatggtttttgcttcttgtgtgcaatctctgataacatataactacagcttggaggcctgaactcaatgttaagtgtagagcgtacacctgcgttcactgtgatttctaaggttccaaccattatccttgggatggatgtttcacatggatctcctggacagtctgatgtcccgtccatcgctgctgtaaaatgtttactcactgctgttgtttgctttttagtttggctagttcttcaagactgatatttagttgtctcttttgttatgattaacttaggtggtgagttctagggagtggccactgatatccaaatatagagcatctgttcggacacagccttctaaggctgagatgattgagtcccttgtcaagaaaaatggaactgaagacgatggcattatcaagtgtgcacttacactaactcttgatgtggcttttgtttaatctttgcatgaagtctggtttaagtatctatgtaactttatttgttgattgcagggagttgctggtagatttctacaccagctcgaataagagaaaaccagagcatatcataattttcaggtatgttacatcagagcttttgtctcttcatttttcccatctttattttctcatattggttgtttcgatgtttaatgcttctagggatggtgtgagtgaatctcaattcaatcaggttctgaatattgaacttgatcagatcatcgaggtagttgaaacttcaaaataaaagtttctcagtgtaattttcttcttctgttagtacttaattgcatttctctttcctcaggcttgcaagctcttagacgcaaattggaacccaaagttccttttgttggtggctcaaaagaatcatcataccaagttcttccagccaacgtctcctgaaaatgttcctccaggtgattgacaaatctatattataaccttttttgacacatagctgatctctatctcatgggggttttggttattttgcagggacaatcattgacaacaaaatatgtcacccaaagaacaatgatttctacctctgtgctcacgctggaatgattgtaagtttcatctatcaactcaaaactttatttgttaatgtttgctcctctgaatcgttttaatactctttatgttctgaattagggaactacccgcccaactcactaccacgtcctgtatgatgagattggtttttcagctgacgaacttcaggaacttgtccactcgctctcctatgtgtatgtagtctcttattcaaccttcattacattttttgtgacaacttcgattgtgatgataacagaaattatctgatttctttctttggcaaaattccaggtaccaaagaagcaccagtgccatttctgttggtaattaccataactgttttctctactccatcgatttaaagtcgtcttcatttgttctcttaataactgacattttaattttttgtgcagttgcgccgatctgctatgctcacttggcagctgctcagcttgggacgttcatgaagtttgaagatcagtctgagacatcatcaagccatggtggtatcacagctccaggaccaatctctgttgcacagctcccaagactcaaagacaacgtcgccaactccatgttcttctgttaaatgagcagccctacttggctcagtaagtaagtagtagttcaataggctatctgactttcagcttaggatctctctcggccttgaagccaggcatcgacactaaggcttggaatgttttttgtgactattatcgccagccttgtttgcctgttggggtttgaatatgcttttgtcccccttaacaattcggttgtttaattaaagacttattgtagtgaatatctaagttcaggaagttacccttttgtctaaatcgttctt

SEQ ID NO: 35 - DNA, 7324 bp, Arabidopsis thaliana; identical to SEQ ID NO: 34
  source 1..7324: mol_type = genomic DNA

SEQ ID NO: 36 - DNA, 7586 bp, Arabidopsis thaliana
  source 1..7586: mol_type = genomic DNA
aatagaaaaggatacaagatgacaaaaacatccactgcacatctcagaaactcgccctcgttatttcatgctacacaactgcagcatttactattttgtttttatacgtttggtatttgcaggacacagagacattacgtacaaccagttttcttttatcttttgtggtaaatagttttgtaatcttttcactttttcaataactaatttcaaaattcaaaccagtgatcaaatttgaggtgatgacaaaaaaaaaattagtcaaacggtcaaactgagatatttatatctatcaattgtgaaaatgtgattagttcttttaacctatagtatactttagttcttttcaaagttgttgatatttgaagacgttaaacttgcgatttttcttcattttcacttccatgtatataggattgtcactgcatgcctaataataatatatgtgtgaaaccattttgccacaatcacaattgtttattggaacacttgtaatacatatatgttgcaaaaaaaggatatatacatttgctcttaatacaaagataggtacgtaattaagtagtatatcatgttactaatttgttcatatagctctttttgtgtatttgaatatatggatctgattcaagaattaataatcattgcatatcatagttcgtttattgtaacatatagcatgtgttatacagttttatagacttgggtcatgtagccacatcgatgcatcatggcttaaagatattcataaatgaaactaacactttcaagttttaactgatatcatccacaatggttctggtactcatttaagagagttattacctccaaatctatattataccatagagtaattccgctaatgtttttgtaaaactgttagaattcgaacaaaaaattatctggaagaggagaaagatataccagtcatttaatactataataaagaacaacatctttagcaccaaaattgataaagaacgacataaataggaatggtgaagaaaaagatgatcccaaaggtagaaaacagtaagtggagaagaagagcttttttgttactagtatattcaacaactcattcactgttgcaagattctaatttatagatgtgttaacttgaaccagatcataacaaataagatgaataaccggtttaagtacctgaatatttgcactagtaatccaccaaacaatgaaattccatatactatttacttgtaaacgatttgattctatatatactcttaagattccatataacatcgaatcacctaacattattttgtccaaatccaaattgtttctaaattctctaacaataataaaaaaaacgtaacgagagaagtaaattgataagacattgaaacgaaaagaaaggaatatggagcgaaaaaataattaagaaaagaaagaaaacagtgggacctacctataaaacctcttgcgtcttgcgtctgcggctttctttataagcgacacacctatattttagtgaatcaccaaaacaaacaaaccctttcttcttcctctcataatccctctctctcttcttctctctcgctcgctgctctgtttagggtttttctcgttcgtctcttctataagtactaggtttgttttttactcaaaaatcgttcaatgtatgttcgattttgaagctttcatgcatgattcctgttcatttcgtcgattttggtggtttttttctcttttttttagcgatttctgcgctgttagtgttcatctgtatttttcgtcgtcgtcgtttggtgttaaacaagtgatttttgttgtttcatgagtttctctggattttttggtcatggtagtgtttgtttatgttgaatctcactgttttttttctctttgaagctgcgttcgttgttacatgattttcgtcttcttcttcctctgagtaatcgctgtttatttttctactctggattttttgtttttttggtcttctctttgacctctgttaagaaatctggaaaaataaatgttggcgtgtgttttttactaaaaaatttgtttgcattttcccgagaaaaatcttctgggtttcttttgctgctttgtgttctttgtctctaccttcatttttttattcgctttatccaacagatctctctctctctctctccctctcgctttttaggtgaccattttttttttgtcatatatgatcatgtcacgtacatctcttcttcaccattttttttttctgtcatagatcttccttatgcggctttgaagcatgacgcgaatgattttgtttgcttttgagtaatctgagtctagtttgtgatggtgacgaatctgttctttagatctgtagatttcatctctagtacttgttcaagtgtgggttgatcagtgtttttgcgtgaatgcttttgtttatgccatctttctgtttgttcctgaatcatgttttatatgctgtgatttaatggttttaagtaactgtgtgaagatcgctttgcttttatcaagatgacacctgactccatgagtttttctatgtgacgtttgctttgtcctgtgatttaatagttctcagctctactggcttagattttcgggtcagaattattttcatactaaaaatttgtgataaatctggcttcaacaatggtttctttgtagcgtttatgctttcccattgctttaaacagattatattttggtgctgttcttttctgaccttctgatatttgtatcccagagatggattctgatgaaccgaatgggagtggattaccacctccaccacctttcgttccagcaaatcttgtccctgaagtggagcctgtaaaaaagaacattcttctcccaatggctcggcctcgaggcagcggctccaaaggacagaagattcctcttcttactaatcactttggagtcaagttcaacaaaccaagcggttacttctttcattacagtgtatgtatactgtgacctctaataatcctctatttgtatcagtgcgtttcctgttttatctctatgatacatgatggatttgtttctttaaaatttgctacaggttgctatcaattatgaagatggccgtccagtggaggctaaaggtatcggccgaaagattcttgacaaagttcaggagacctatcaaagtgatttgggtgccaaatactttgcttatgatggcgagaagactctcttcactgttggtgctcttcccagcaacaaacttgacttctctgttgttcttgaagaaataccttctagcaggtgtgattatgacttcttttgatttttttttccctgtgaaatttctcgactgtttccttttcttcaaagtctaatatgctttgatatcctctttatctgcagaaatcacgctggaaatgatacaaatgatgctgatagaaaaagatcaaggcgtcccaaccaaactaagaaattcatggttgagataagttatgctgcaaagatccccatgcaggctattgcaagcgctcttcaagggaaggagacagagaatcttcaagacgctctgagagtgctggatattattttgcgccagagtgcagctaggcagtaagttaaatattctgggtatttgtatttcaaataaattctctgcttgatctttaatgtcatgttctcatatctgttcgcagaggttgcctccttgttcgccagtcctttttccacaatgacgtaaagaactttgtacctattggtggaggtgtcagtggttgcagagggttccattcaagtttcagaactactcagggaggcttatccctgaatattggtaattcttttccagatctaatgtgtattagattcttccttgacattcggctgctaaactttgatttttttgctttggcatttcttcagacacttcaactacgatgatagtacaacctggacctgtagttgatttcctgcttgctaaccagaacaagaaagatccatacggaatggactggaacaaggtacatcattttcttttatgttgtactatttcactgatgtattttatctgattttatctcatcaggctcgacgtgtcctcaagaatctgagagttcaaattactctttccaatagagaatacaagataagtggactaagtgaacacagctgcaaagatcaactgtatgtcaaatttctttgatcacaagtttatatgcttttgagtttattctaagatattggtctttgattgatagatttacatggaggaaacctaacgacaagggagaatttgaggaggttgagatcacagtgctcaattactataaagagcgtaacattgaagtgcgttattcaggtgacttcccttgcatcaatgttggtaagccgaagcgtcccacttacttccccattgaggtaaataaaatgaattgttgtttttctgttttccacatatttttttgtaacggattatgacaatcgttttggttttcatgtttgcagttctgtaatcttgtgtctctacagcgatacacaaaatcgcttaccaattttcagagggctgccctagttgaaaagtctaggcagaagccacctgaaaggatggcctcgctaaccaaagtagttcttgtttccatagttcttcttcccattatccttgacgctttttctgtttcttatgttttatgttctgatttatcttgcagggtctgaaggacagcaattacaatgccgacccggtattgcaagatagtggtgttagcattatcaccaattttacccaagttgaaggccgtatcttaccaacaccaatggtgactttcgttgattctcttgctttccttgctgtattttttcctttttgcttgtggatgttttattgttgattatctttgtccttgtttacagctgaaagtgggcaagggagaaaacctttccccaatcaaaggaaaatggaactttatgcgtaaggtgcttagattttctatcttttgccctagtttgaatattgtaacctcgactagtactgattgaattctaatgcagacactcgctgagccaacgacggttactagatgggctgttgtgaacttctctgctcgctgtgatacaaatacacttattcgtgacttgattaaatgtggacgggagaaaggaattgtaagccttctttaggttcattggttactatacaaacgaatcatatgcacaactccttttaattcgtcccttttgtttttcccttttatcccagaatgtagagcctccattcaaggatgtcatcaacgagaatcctcagtttaggaatgcaccagctactgtgagagtagagaatatgtttgagcagataaaatccaaactcccaaagccgcctctgttccttctttgcatactcgctgaaaggaaaaactctgatgtttatggtacatcacatcacactttacattcttgaatatggcctgttttcccccttgaatgtaaatgtttaacttttcatgtgtctgaaattttttaggcccttggaaaaaaaagaatcttgttgatcttggaattgtgactcagtgcattgctcccaccagactgaacgatcagtatctcaccaatgttctcctgaagataaatgccaaggtagctggaggttgtaaattcattcaattcgaatttcaagactgattgtaaagactttacaagcttacaagcttacagctgaaatgatttataattcgtatatgtagcttggtggattgaattcgttgttagctatggagcgctcaccagcaatgccaaaagtaacgcaagttcctaccatcattgttgggatggatgtatcccatggttcccctggccagtctgatataccatcaattgctgctgtaatactgattttgttttgttaatttttcgtgtgatctcatttagtgttgtgtgttcattcttggcaacaactctggtaacttggtgtttgttggaaatcgtaggttgtgagctcaagacaatggccactcatctcaaaatataaggcatgtgtacgcacacaatcacgcaaaatggaaatgattgataatctcttcaaacccgtcaatggcaaagacgaaggaatgttcaggtaaaattcataggcagcgtttttgtcatcttaattctattttagggccttgtgaatggtacaatattcttttatacttgtacaaaaaggtatgtcagcatcagtgtaattagagatttcctactgtttacagggaactcttgttagacttttactacagttcagagaataggaaaccagagcacatcattattttcaggtatacttaaatctattaaggtatcatgtaaaataatatactccaatttgttaactcactgttactaatatacatgtagggatggtgtaagcgagtctcagttcaatcaagttcttaatattgaattggatcagatgatgcaggtatggattatagttctagagcttcagagcttttagtgacacaaagacgttttatttagtatatcttggatatctttgggcctgcctgatctctttttttgttactttattaggcatgcaagtttcttgatgatacgtggcatccgaagtttacagtgatagttgcccagaagaaccaccacacaaagttcttccagtctcgaggccctgataatgttcctccaggtaaaatccatttgacaaatgcatgattttctgttggtcattattttgtgtttaaaatgacctgaaacctggcttttgcctgcaggaacaatcattgacagccagatctgtcacccacgcaactttgatttctatctctgcgcccatgctggcatgattgtaagttatagctcctgcagaaatactttgaccacttagttactatataaatccaacttaacagttttctatattgattttggatgtgttagggaactacaaggccaacacattaccatgttctgtatgacgagattgggtttgccacagacgacctccaagaacttgtgcattctctgtcctatgtgtaagaattatatcacttttaactcttaatctgataggtatctttgtggaattatatcacttttgacaataatcttcaaattgtttgctttgattcttgtagctaccagaggagcaccactgcgatctcagtcggttagtctcacatcttttatgcgttgctgctgatagctacaacattatgtgcaatatctcaattctcaagtttctttatgtttgtttgcagttgcacctgtatgttacgctcatttggcagctgcacagatgggaactgtgatgaagtatgaagagttgtctgagacttcttcgagccatggaggaatcaccacacctggagcagtccctgtgccacctatgccgcagctgcacaataatgtttcaacctccatgttcttctgttgatggaacatggtccagtccacacgatagctgagtttatatgcttttgatggagaaccaacgaacttttgtttactcttctctgggtttggttcctcttttgtttttcgtcgaccctttaacattgaggagatactctttatattctgtcggtttttgtgggcgctgttggttgatactttattatgcttaatcagatttggtattttaaggc

SEQ ID NO: 37 - DNA, 6980 bp, Arabidopsis thaliana
  source 1..6980: mol_type = genomic DNA
agtatctgcatgttcctctcagcttcttcctgttccatttttctcttcctttccgcaagaagtgtcagaagattatcaacctccttaattgacacatcacaaccctgtctaagtatgaacgcaggaagtcaatatttgatcaaaagaaatgacttagaattgctttttactccaataataattctgagaaagcaaacttaaagaggaaaaaatgaaacataaaaagcttgttaagaaccgaccctttgtagtgcttcccgaaactgatccaagggcgatgcagtttttgacacatgccgagctgaagttttcttcaatagctacacaattgatacataaacgtcatataataagctgcattccagtgataaatagtttcaatacactatcattcctataaacatgcttctatttagctgtaataagcagaatcctaccacaatactacacatcaaaaacaaaacaaaaccttcctaagaaaatctaatggcaaggttcattggaatcgattaaagactaagctagcttacttgtttccacaaaaaccacgacaaaaaccaaacttgattacaagctaagactcaaacaagcaacacccgaacttgaactgaaaagctaaggaccaaacacaaattacgagtaaaattagaaaaagaaaccttatcgagcaagaaattagggtaaagctgattattggtgaggtgttggctacaacagggacaatcactcttgttcctaagatgtgtgatgatacacatatagcagaaactatgaccacaagccgtgaggaaagcatctttaataatctgcatacaaatcggacaaagcaagtctttatccagatccggtgctccaatctcagaaccgccgcttcctccgtcgtcattttcatgacgattagcaccttcaccaactgaagatgttctcgggtcaggtttcaccgctggaacaaccggatccgtcgaaatctcttccattttgctttcaaaagatttcttcgattgtgattttggtttttgagaaaatcggaattgtgagaaaagagtggtttgggtatgacgtcggagatgaaggaggagtgaggctgaggtgtggtgggatccaccgtggttcttttctgaggtgacaaatcctacacgttctggtctacgcgcttcttttcgcgcgtgtgtctggcgtttctccaagcgctggtacggtttaattatccggcttctaatttatagtccggttcaatgaaatttcttacaattaccacgacggtctaatttaatttcttacaaccattcattttatttcttactatttgaaatgaataagttgggaatttcaatccattcaaccggagcataaccctagaaatagaataagttttgaaggattcggtttaataattttggaataaaccatttttatttcagttcttaaattttgttactgtaaaaaatgactgaaaagtgaaatatattttaattttcccatcactggaaacgttccctccattcttttgcttgtctgggaaacccaaagagactgtgacggagaagagaaatgagctaaataaattcctctctttgattcaccggaaccctagaaatcctcttcttaattctttcaaaggtgcgctgttttcactagatatcgctgttgtaattgttgttgattcggagctaggttttgtttttgtctctctttcggagaatttgcatgaagctaggatttgtctgttgatagttgtatggttttggctgcgttgtttctctcttgaaagtcttgttatgctactgtatgacacactcgaatgagtttttgtttgtgtaatgtttctcaattttgaaggcgaccaacagttaaaggtgccattttttttccagattaagtttgttcctcatctgaaatttataccatttctcgcgatttagcaggatatgcccagaaattaaaatcttagaacgacaatggtggtaaagtttttagctttttaccttttggagttgtcttcttaatttggtgtttttcttttctttcttagtctcctgagcattgtgttttggactggtttttgcacactgtaaccaacctccacttttctctcttgcagattattttcccctggaaggatggagacatcttcatctctgccactgtcacccataagtatagaaccagaacagcccagccatcgagattatgacatcacaactagacgtggggttggaaccacaggcaacccaatagaattgtgcaccaatcactttaatgtttctgtgagacagccggatgtagtattttaccagtacactgtaagattcattagtcacttttctgcattctttcatcagtgtctgtgcgtgtgtgagatgtttgacatatcggtaccttttttgcaggttagtatcaccacagaaaacggtgatgctgttgatgggacaggaataagcagaaagcttatggaccaactattcaagacttactcttctgatcttgatggtaaaaggttggcatatgatggagagaagactttatatactgttggtcctctaccacagaacgaatttgactttctagtcatcgtggaagggtcattttcaaaacggtatgtccctcttatctggattgatatttaatcgtttcaaggtgtcaagatagatcttgttgatcttctaactaacgcagtcttgttaagtttatagtgattgtggtgtctctgatggtggtagttcttccggtacttgcaagcgatcaaaacgttctttcttgccaagaagttacaaggttcagatacattatgctgcagaaataccgttgaagactgttcttggcactcagagaggagcttatacaccagataagagtgctcaggatgcacttagagtgcttgacattgtactgaggcagcaagcagctgaaaggtaaatctttctatctgtttgcttttgtgcagtttatatttttattaaaatagatactctacgttctaatggaccaatttttattatcatattttcactttgttggtgaaatttaatcaatgtacaactatttgcattttgtgaccatgctcgatgcttactatagaaaactgttgataatgcaggggatgccttttggtcagacaggcatttttccatagcgatgggcaccccatgaaagttggaggaggtgttataggtattcgaggtttacattcgagctttcgtccaactcatggaggactctcgcttaacattggtatttttcagtatacctttctcatctccagctttcataaacttgtcttaattgtggatagttttattaataagcaaaactgttttcgttttgtgatggtttgcagatgtgtcaacaacaatgatcttagaacctggtccagttattgaattcctgaaagccaatcagagtgttgagacaccacggcaaatcgactggattaaggtagttctggcttttaaatgcaataactgagaacatgactggctgcttttgttttgagcttgtgaagttttcattgaaacttggcaggctgcgaaaatgcttaaacatatgagggttaaggcaacacaccgtaacatggaatttaaaattataggtctaagttcgaaaccgtgcaatcagcaactgtaggttccccatgattgtactatcaatatatattttgtcctctttttcagcctttgcttgactttcttcaccgttttccaggttttcaatgaagattaaagatggtgaacgtgaggtacctattagagagattactgtgtatgactatttcaagcaaacctacacagagcctatttcttctgcgtactttccatgccttgatgttggcaagccagatcggcccaactatcttccactggaggtatccatctccagcagtgtttccttcgttaatttttttgtagtctcttatcccacttctggaggtgtgtatgtttgaacttctaattcttttcttgcagttttgtaatcttgtatctctgcaacgttatacaaaaccattgtcagggaggcaaagagttttacttgttgaaagttcaagacaaaaacctctagagagaattaaaacactcaatgatgtgagcttcgttttctgacctcggatgatgcttgatctatcttggatggcaaatactgttactgactagaattgtaggcaatgcatacctactgctatgacaaggacccatttttggctggatgtggcatctccattgaaaaagaaatgactcaagttgaaggccgtgttctcaagcccccaatggtaaacctgtttatgttttgtttgcagatagaaagatatgatctaccatggaaattatagtcccatattgacccatttgtaatatacagctgaagtttggcaagaatgaagattttcaaccttgcaacggacggtggaactttaacaacaaggtaattgtctgcaaagatttccgggcatcactatttcccttttatttttaccctttgtttcttgctttacagatgcttctagaaccaagagctattaaaagctgggctatcgtcaacttttcttttccatgcgacagtagtcacatttcccgtgagcttataagctgtggcatgaggaaaggcattgtaggttttgtagatactgtctcaattttcttatatggtttgtagtgttgttctatggttattgacagagtctgaatatggtttgttaatttgcaggaaattgatcgaccttttgcactagttgaagaggatccacagtacaaaaaagcaggtcctgttgaaagggtagaaaaaatgattgcaacgatgaagttaaaatttccagatcctcctcattttatcctctgtattctgccagaacggaaaacttctgatatctatggtattatctcacctttttcctgcggatattaaagtttgaactctctcattcaactggtcgttgcatactataaaggtccctggaagaagatatgcctcactgaagaagggatccacacacaatgcatctgcccaatcaagatcagtgaccaatatctcaccaatgtacttctgaagataaattcgaaggtatatcaccaaccacgctaacacttgagatatcttcttttgatgtgttattctctgtgaattgacttcttttcttccgtcttaatatagcttggaggcatcaattctctgttgggaatagagtactcttacaacattccattgataaacaaaattcccaccttgattttgggtatggatgtatctcatgggcctccaggtcgggcagatgttccttcagtagcagcggtattgattacatgtcttttcctttgtatgttcattgtatctggttatcttaggatctgattatttatctgtttactttctcgatctctgctgcaaggttgttggttcaaaatgctggcccttaatctcaaggtatagggcagctgtaagaactcagtcaccacgtctggagatgattgattcgctcttccaacctatcgagaacactgagaaaggagataacggtatcatgaagtatgtgaaccctagttttaatcaatttcaacaactcaagatgtttaagtctcttcttcatgtttaattattcgtttcaacagcgaattatttgtagagttctatcggacaagcagggcacggaaacctaagcagattatcattttcaggtattagcaaaacatttactgtttatctttgttgtctaacctccaatatctaaaagtctatccttacacaaaccttgggcatttgatagggatggtgtgagtgaatcacagttcgagcaagtcttgaagatcgaagtggaccaaattataaaggtcttgtttcaaagtcccatggctggttctggtttcaatctattagtcaaattgtagtgaagatattatttaacagttttgcttcttttttacatggcgcaggcgtatcaacgtcttggtgaatctgatgtgccaaaattcactgtcattgtggctcagaagaaccaccacaccaagttgtttcaagctaagggtcctgaaaatgttcctgcaggtaaaaaatactttttattcttcacccgtcactaggattccatttctttccgtaactatttcatcataaaaaaaacaatgtcgtttgtcaggaactgtcgtggacaccaagatcgtacacccgacaaactacgatttttacatgtgtgctcatgcaggaaaaatagtaagtgtagacaaaagtttagcttcactcctcgcacctttattaaaatcaacgctatataatgtttccctctatgatctctcagggaacttcaagaccggctcattaccatgtattacttgatgagattggtttctcccccgatgacttgcagaatctcatccattctctctcctatgtgtaagttcactccttaacgtcaattacaaaaaccaacttagctttaccatcactaagatctaattgtctcgaatcatcatcattccagcaaccaacgtagcacaactgcaacttcgatcggtaacactccttaatcaaactctcttctataaataaaaatgcgacctcctcttttacactatacagaaactactcaactcaatattcaatgtgtcctctcttttgtgtgtgtttgtgctctcagtggctccagtacgatacgctcatcttgcagcagctcaagttgcgcaattcacaaagtttgaaggtatatcggaggacgggaaagttccagagcttccacgtctgcacgagaatgtcgaaggcaacatgttcttctgctgagtacatataagtagttctgcttcctccctagtctaaacccaaaccctcctctttagaggaagtttatcattttgcatatatgcaatcatcaccgtacagtttcattagaagtaagaagaaagatcctcgcgtagattaagaggctcattggcttattgatagcccaagtttgcttactaaacggcagcgatttttgcgtttagcttttggatttttcaata

SEQ ID NO: 38 - DNA, 5881 bp, Arabidopsis thaliana
  source 1..5881: mol_type = genomic DNA
tgcacctcatgaaaccaccctcgctagcacgtcaggttctgatgtatatatttgggacgttagcagtgagactccattggcgatcatccctgatgctcatgagggtaccacttactctttggcaagaagccatactggggatttcctgtttactggtggagaagatggagggattaaaatgtttgagatcagaagatacggtagtgaaacaagcgttgtacttatatctcaatggatgcctcacactagtcctgtctactctctttcttttgagtttccttggcttgtctcagcatccggtgacggtaaactcgcacttatcgacgttaggaaactgttaaaaactaaccgttgtgcctattccaaaaggatttcttcgagtactgtggaaccgccacaacgaatgctgcacgggttcgggtcaaacttgttctctgtggacgtgggttatgaccgtatagtgtgtggaggtgaagaaggcacagtccggatatggaacttcacacaagcattggagatagagcgaaggacccgagctctgaaaggaatgaggcatgagaataggatgagacgaaggagaatgcaaatggagatgaacgcaaagaatggaaggcctgaccaatgctccattgctgctcataagaaccccatcaatggagaaaggaaccgagcctggcatagtaaacgaagagcaagcgggaaggcgaaggcctaagcgataagattggatttatctttaatacatttagtaaagcaattttataaccttgacacatgttggctttaacttttaagctatcagagttgggtctttatgattggtggaaaatgagaaaattggcttttagttcatatattttggaagcttttagtatgaaaaaatgcaagagattcctcgaaggttcactaacttctaactgaatttcaaaatcttacaatacaacaaacatagtaatatttttcaagttcaaaaacaagaaaacgaaaaatataaacaaaaaaggaagttccaattctctattggcttttctttgaaacttgaagaatttgatatttgatcgaccatgacagaatagcaaagcctcatgagtcttggttctttcgtttgaattcccagatcaattcctagttctctcgtttgaattcctagtctcttcgacttcaatctacccactaaattctattgcagttaatccacaacaaaagccaataattatccacttaattaaaaaagtaatgcatgcaatgtaagtgagaaatcaatgactagtgtaccctctcgaatttcatgtacaagaaaaactctttgtcttccttagcgtaaaacataaaaaggctttaagactctttgcactcaccgcacgcctcttcatctcctcttacataatcctttcttttactatttaagggttattccttattcggggccaaacaccttaggtacgtcaaagccagaaccgaactaaggatcaacgacgcataacatctggaggccgagaaatggatacgactctaccgcctcctcaacacatggaacgtgaacctttgaagagcaagagtagtcttcttccaatgactcgccgtggcaacggttccaaaggacagaagattcttctgctcactaaccacttcagagtcaacttcagaaaaccaaacagtcataatttcttccattacagcgtgcgctttttgtttcccttcctgttcctgtttccatgacttgatttggaaaacatactttatagtgtgctttgtctctttggatacaggttactatcacatatgaagatggtagtccacttttagccaaaggttttggcagaaagattcttgaaaaagttcaacagacttgtcaagctgatttgggttgcaaacattttgcttatgatggcgacaagaatctttatactgttggtcctcttcctagatccagtctagacttctctgttgttcttgaaaccgcgccttctaggagaaacgcagacaaaagactaaagcttcctcaccaatccaagaaattcaatgttgcaatcctttttgcgcctccagaaatcccaatggaagctattgcaaatgctcttcaaggaaagaaaactaaacatcttctagatgctatcagagtgatggactgtattttgagccaaaatgcagctagacagttagtgaaccttttttagtttttttttcttagatatattcttggatatttgatgttcttgatgttcatgttgtgacacatttctattttgcgcagaggttgcctcctagttcggcaatctttcttccacaatgacgcaaagtactttgcgaatatcggtgaaggtgtagattgttgcaaaggatttcattcaagcttcagaactactcagggaggcttgtccctcaatattggtaatttcttttcttttaacatatgttttttcatgtggtattaaaaacattctttgtaacatttcagttttaatttctttcatcagatgtttcgactgctatgatagtaaaacctggtcctgttgttgattttcttattgcaaatcaaggtgtgaacgatccattctctattaactggaaaaaggtatttacaagaatttcaaatggtgttttagcatatctttgaggtgaagtacttcattttctgatttttttttttgtttctctctcgtataggctaaaaatactctgaaaaatcttagagttaaagtcctcccttcaaatcaagaatacaagataaccggactaagtggactacactgcaaagatcaaacgtatgttgtgagttgatatttattttaagttttcttgttttgcttctcgtttatctctttttcttgtgtgatttaggtttacttggaagaaaaggaaccaaaacagggaatttgaggaggttgagattacagtgtccgattacttcactaggatccgtgaaatcgaactgcgttactcgggtggcttaccttgtatcaatgttggtaagccaaatcgtcctacctactttcccattgaggtaatatttgttttttgttttgtttttcttccacataatctcatgtttaatggcttatgatacttatgatactttcccatcttttgttttataaaacattttgcagctctgtgagcttgtatctctacaacgctatactaaagcgctaaccaaattccagaggagtaaccttatcaaagaatcaaggcagaatccacaacaaagaattggtgtgttaaccagagtaaggactttaaattttccatttatcctctttttatttgcatttttatgtatactaagttccatgttttgcaggctctcaagactagtaattataatgatgacccaatgttgcaagaatgtggtgttaggattggctctgacttcactcaagtcgaaggccgcgtgttaccaacaccaaaggtgatttttcttccattacatttttggttatggaaggtttgattttattattatatatctgtggtctcttaatcccttataaacagcttaaagctggcaaagaacaagacatctatcctattaatgggagttggaacttcaagaacaaggtccttaactatcctctgtcttctcaaacaagttttgttttgaaaacttgtgacactgatcatcaaactttcatctacagacattttttaagccagccacagttactagatgggctgttgtgaacttctctgctcgctgtgacccgcaaaagattattgatgatttgaccagatgtggaaagatgaaaggaattgtaagcttacttttcgtcatcaggaccattggttactacaataaagaacactaataacaaaaccctctcttggtttttttgttttgttttcattaccagaacgtagattctccataccatgtcgtctttgaagaaaatcctcagtttaaggatgccactggttctgtaagagttgataagatgtttcaacatttacaatcaatactcggcgaagttcctccaaaattccttctatgcatactcgaaaagaaaaactctgatgtttatggtaacactaagcacttaacctttcctgaatcatatagtatacaccttttttttttttctcatatggaaaattttatcacttaggtccttggaaaaagaaaaatcttgttcaatgtggaattgtgaatgtattgttcctcctcaaaacttaaatgatcagtatctcacaaatcttctactaaagataaatgccaaggtgatgatctcttcttgaatcaatctttgtagtttctgatataataatcttatagttaatctctgccatttctgtatagcttggtggattgaattcagttttggatatggagctgtcaggaacaatgcctctggtaatgagagttcctaccatcattattggaatggatgtatctcatggttctcctggacagtctgatcatataccatccattgccgcggtaacattgtttttttttttctttttcactttcttgtgttgtatttttatgtaagctactgatatctttggaatgcataggttgtgagctccagagagtggccactgatctcaaaatacagggcttgtgtgcgtacacagtcgcctaaagttgaaatgatcgatagcctctttaaacccgtctctgacaaagatgatcaaggtatcatgaggtaatactatatattactggactattttgtaactcgtattaattagccctgcttttatgtaacagtatatgatttttaagattcaatgatgtgtttacagagagctcttgcttgactttcactcaagttctggaaagaaaccgaatcacattatcattttcaggtatgcatgtataatttttaggcatgcatgtagtttaatacaatttttctaactcttaactacaccaatacatgcagggatggtgtcagtgaatctcagtttaaccaagttcttaatattgaactggatcagatgatgcaagtaaggattttggttttaccatttttaagctcttaaatacttagcctatgtttgaccattttggagtttaaggtttaacttttgttacattattaggcatgcaagttcttggatcagaagtaagatcccaagtttacactgatcatagctcagataaaccaccacacgaagttcttccaaaccgaaagccctaataatgttcttccaggtaaacagttgcagatatttttttgtgttttgtttgtttgttagtgttgttgaaatgacttgaaacctgttctctatttacccgcaggaacaataattgacagcaacatctgtcaccaacacaacaacgatttctatctttgtgctcatgctggaaagattgtaagtgataagtatatatattattatgctcgaatcctttatgaatcgaacaaaaacttaaaaacacttttcgatgtgttagggaactacaaggccaacacattaccatgtgctctacgacgagattggatttgacacagatcaactccaagaacttgtgcattcactatcctatgtgtaagcagcacatcacttcaaacttttttttacctgatacattaaatctctgtattgaatttagccattaatctcttaattctttgctttattacttgtagctaccagcggagcacaactgccatctctcttggtaattcttttggcatttgatatctcagctttatgtgtagaatttgaaaaattgacacaacttgattattatgcagttgcgccgatatgttatgctcatttggcggctgcacagatggcaactgcaatgaagtttgaggacatgtctgagacttcatcgagccacggcgggatcaccacagctggagcagtccctgtgcctcccatgccgaagctgaacaccaacgttgctagttcaatgttcttttgctga

SEQ ID NO: 39 - DNA, 6768 bp, Arabidopsis thaliana
  source 1..6768: mol_type = genomic DNA
acatagtggacccatgacaagaaataaggcccaaaagttgggctaatttcagccatcacgacaaaggctacttctcatttcgacatccatattattctattcttgtacacttctctttcattcactcgtcattaatatgccttcaatctaatatatttaaggacacaattatacacacgtccatatataaacttatattgttgccttgttggatatatataaaagttattgtaattagtagttactagttagagtaattttcaggtctaatagtgatgagattaacgtattttcttctttaaatttcagttatttgcaaataatgtcactgctcgatttcctggaataaaggagctaataagagtatcatgttctccttcatgttaccatttcacgtttgcacgttttttttttttttattatgaacaagattacgatcacacgttcggtttgttgtttagtcgttccaagtgtataggagttttatccacacaaaaaaaattttgataggaatgtgtaattccataaagatttccatcgttacacactaaagttttatcttacgcgccacgccgtttgtggagtaaccgagtaactaatttactactagtcttgatgttggtaggattaaataaaagaatcatggagataggatacgattgtgtttgaataattcaatatgtttatatctggaaagatctacaaatttgatatgatcactaagattgtgggaatttattcaaatccaaaacacatagttacaaatcatatacaaatatggaaaataaataatgtctaataacatttgtgtaacatcatctttaatgcgagtcatttagaaatgtaactttttttctttctgatatgtttatttctggaaatatatacaaaattgacctgatcactaagattgtgggaataattccaaaccaatatagaaagtgataatttattaaaaactgaacatttgtgtaatctttttttttttttttttaatgtaatgtcaaattatattcaaaaaaaacatatacttttttacaacttgtgcttcatgtgtaagaaagggagagtgctaaaaaaaattctgaaattgtccaaaaatgattagatctttcgtagagtcgatgttgactaccccgggaatgaacccatttgtgtaatcttttaacatttattaaaaacaaatcatagatagctaagattgtgggaagaattccaaacgaaattaaattcacactaacacatttactaaaatcatagatagatatagaaagaaaaaacttttctactaatttttttgacatttgtgtactcattatagcgagagaaagagatgggcctcaaaacttttattaggcccaaacgttttaaattcattataaaaataaaacaattccacgaaaatttcgaaacccatcactttggcgcttatgtgacgcgcttatttcgccctcaatctcagattatttagtcctcacactcgtcacacccccgcttcctagggtttcatttcgtctctttatcttccttcgtctctttagcttccttcgattctctgactcaatcatggcgccgaagcgaaagagacctgcgacaaaggatgacactaccaaatccattcccaaaccgaagaagagagctcctaagcgagctaagacggtgaaagaagagccggtgacagtggtcgaggaaggggaaaagcatgttgcgaggtttctagacgagccaattccagaatctgaagcgaagagtacctggcctgacagatacaaaccgattgaggtaatttcatacatcggaaactggaattttgggtgtttgtgtatgaaatagttagatctagttgaaatttgctgagatttgttgcagatctgttgatttctgaaggattttttgtttgttttgtttcaggtacagccacctaaggcttcgtcaagaaagaagacgaagtaagttccttgaatcctttggttcttgtgtatagtcagattgagaggctttacttttgtttgattagaaatgttttttgtttcgtaaatagttgattaagtgaattcgttttgtagggatgacgaaaaagttgagatcattcgtgctcgatgccattatagacgtgcgattgttgatgagcgtcagatatatgagctgaatgatgatgcttatgtacaggtatgactctattacgtctaaattgcatttgttacattttaaagcgtagatttatgtggtacattgaagaaaatgagttagagaggagaatgtgcatgacattgtgtttcttggtgtttgagtttgatgactattgaggttttaccacttttttaatgtgccaacatggttttactgtgtagaaaattttgatgtgtagggtaaataattaaccaaagttgatcacattctcctccctcaccactatcaactgtccgcaataaatatttgtgcattgtctctgtttgtcatgctttgtatatctccaagtccttatgatagtagttacctttcgaagctgagttctcatctgtaacaataactagctgattgttatttagactggcattgcatattatgcattggctatatgaacgtttatcatgttgttttatgtttttcgtacagcgtaggtagatgctttaccatatataacttctgtttttaacaactgagttttgtaatttttgtgcagtctggtgagggaaaggatcccttcatttgtaaaatcattgaaatgtttgaaggggctaatgggaaactgtatttcacggctcggtggttttatagaccttctgatactgtaagaataaaaaaaatcttcttcttcactttctctttaatctatgttgaattgtctgaagttttttttctattcttaactttcaggtaatgaaagagttcgagattctgatcaagaaaaagcgtgtgtttttctctgagatacaagatacaaatgaattgggattacttgaaaagaagctgaacattttgatgattcccttgaatgtatgttcttacttcactgttacttgtagtgtatgcttttggtatacagtatcttagtacaatcttccattgatactgaacttatttttgtttctcatgccaggaaaatactaaagagactatccctgcaacagaaaactgtgactttttctgtgacatgaactatttcttgccttacgatacatttgaagctatacaacaaggttagtgcttttaacaattgatcttcaagtttagaaactgccaactggattagataaaatgctgcagtttttgaagataactaagcatttacagatctttcaattgtgcagaaaccatgatggctataagtgaaagttcaacaatatccagtgatactgatataagagaaggagctgctgccatatcagagattggagaatgttctcaagaaacagaaggtcacaaaaaggcaactttgcttgacctttactccggctgtggagctatgtcgacagggttgtgcatgggtgcacaactgtctggtttgaacctcgtcactgtgagtcatttttgcttgctaataatcttctcagatttgtttaatctctcaatgcttaacttttgctttttttttaaaatgattctcaagaaatgggctgttgacatgaatgcacatgcatgtaaaagcttgcagcataaccacccagagacaaacgtaagtttttagttttcctttctcccaattcgattgactacagaaattctcaagagcctaaatcatttcattttaggtgagaaacatgaccgcagaagatttcttgtttctgcttaaggagtgggagaagctatgcattcatttctctttgagaaatagtccaaattcagaagaatatgccaaccttcacggtttgaataatgttgaggacaatgaagatgtcagcgaggagagtgaaaatgaagatgatggagaagtttttactgttgacaagattgttggtatttccttcggagtccctaaaaagttattgaaacgtggactttatttgaaggtattgttgctctgcttgtacaaatttcacattacatctcatggtttagccttgttatatagttaatcatctctggtgttttgatataataggtaaggtggctgaattatgatgattctcatgatacatgggagcctattgaaggactcaggtgagcaaaacattaagaatgtttgcattaaagttatatatgttaatgcgttgttaaaatctctaaatttgtccttgaacagtaattgccggggtaaaattgaagagttcgttaaacttggatataaatctggcatccttccgttaccagtatgtattttttatacctgattcttttgctttccttaaacttctgaagctagtgcataattttcagatatttaatctaaaagccaataatctaagttattgtatgtgataagttctatgggtcttatgttgttctgcgtcagttaattgttgaggggtgatagatttagtcacagaacagttgatgtttagagcaatatcctgacattgtttatatgttgttgatgtttagggaggtgttgatgttgtctgcggtgggccaccatgccaaggaatcagtggtcacaaccgcttcaggaacttattggaccctctagaagatcagaaaaacaagcagcttttggtgtatatgaacattgtagaatatttgaagcctaagttcgttttgatggaaaacgtcgttgacatgctgaagatggctaagggctatcttgcacggtttgctgttggacgccttctacagatgaattaccaagtgaggaatggaatgatggcagctggagcttatgggcttgctcagtttcgtttgaggttctttctatggggtgcactccctagtgaggtaaaattcttaatgttttctctttgttttatattaatgaatagatgctgttcttaatttgtatctttctgtttcagataattccgcagttcccacttccaacacatgatctagttcatagaggaaatattgtcaaggagtttcaggtaaactggtatattagtacctttcaatttgttttagcaaattctcatatttatttgtaactaatgcagggaaacatagtagcctatgatgaaggacatactgtgaagttagcagacaagcttttgttgaaggatgtgatttctgatcttcctgcagtaagtattgatgtttttagcaaattttgactaaaattaggtacagtttgtcttgaatattttcttacttcctatgtttttgtattaggttgccaacagtgaaaaaagagacgagattacatatgacaaagatcccacaacgccatttcaaaagttcatcagattgagaaaggatggtaagattcttattatttttttgggcaaacagtgtaaaaacatatatttgacaactattatggcaactgatgttcattaacaaattgtttctgaattttttcaacagaagcgtcaggttcacaatcaaagtccaagtccaaaaagcatgtcttatatgatcatcaccctcttaatcttaatataaatgactatgaacgggtttgtcaggtccccaagagaaaggtacaactttctttatactcgattgacgatcatatatttttttggctctggtctgttttagtgtctaggaatattctgattatttcaaaacatcttttggtatcagggagcgaattttagggactttcctggtgttattgttggacctggtaatgtagtcaagttggaagagggaaaggaaagggtcaaacttgaatctggaaaaacattggtaagaatgatcatctcttttttttggtctcatatcaagttacttttctcctgattggctggctatgttattcaaacaggttcccgattatgccttaacatatgtcgatgggaaatcatgcaagtgagttttaattctcttttcttcgtctctgaaaattctgtatttgactattgttttctgttatggaaattgacttaagcccttcgctgtttccagaccttttggtcgtctttggtgggacgaaattgtccccactgttgtcacacgggcagaaccccacaaccaggtgagacctctcatgacaatcaagtatttgttctgaattttggctagttgttattctagtgttctaggtttgcatagatttattagtatgcatgttacactggaaccaacttaaagagtataattgtttgatgttgctggtgattgattgcaggtgatcattcatccagagcaaaatcgggttttatccattcgagaaaatgcgagactccaaggctttcctgatgactacaaactctttggcccacccaaacagaagtgagtattgttaagaccttgagtttatgtgtgttcttggtggatttattgctgctatagttcttaagactaatcttacataatttctgtttttcaggtacattcaagtaggtaacgctgtagctgtgccagtagcgaaggcccttggatatgctttgggaacagctttccagggactcgcagttgggaaagatccacttcttactctgcctgaaggttttgcattcatgaagccaactcttccttccgagcttgcatgaacactgttgattcatcgcatttttcgatttatcttctattcattgttttcctaggatttatctttagaccatttgctgcggaatttggatttgttttgtttaagtttcacgactttcaagtttagcaactctgaatttctggtaactttgttttaatcagatgttatggatttgtggg

SEQ ID NO: 40 - DNA, 8783 bp, Arabidopsis thaliana
  source 1..8783: mol_type = genomic DNA
cgtagtttcaacgaaaaatcaatgctagaactgattcgtagtctagatgttccatccggtaagaacgatatttcactgtgtttttgttgtggcgtgttctttgcgttatgtttaaaatcaatttggtctcttcactgttgtaggaaccaaggcatttgtagcgaaatatattcatcctgaaaacgctattgtaaaaattactcatctctttttttttttacttcagtacgtttatgatatggattcgatacactgaaacatgattgtgtctttatatcttagactgcctacaatgatggacttggatgtggattatggacacttctcacatctagcatttctgttatttacgttactccttctacatgggacaaacattttaatcttagtatttggagtttggtgatgaatcttaactctcaaacttttatgatttcatgtctatcctcacatcaattgcaataaaaatatttgcttttctcttcgtaggatggtggcaggaaactcgcactggaaatgtttccatcacttaaattgacaacgaaaattgacgacaatgctcgagctaatgcactactcattgctgcatatggtcatgctacaagtgatacaagatattactcattttctcaaattaagtgacatatctaacatgtaaaaatgagtaatgttttggtgatttcacttatatattgcatctctttctctgctcctttggctttcagaaaattcttcactaattagaaaaaaatattttgtttattctttttccgtattcaaaatctctcaaaatttggtcatttttcgatttctatatttatctaattttcaaggtgagagttgttaatgtagtttggttatgatttaacccgaccgaaatcctcatgacctaacaaattataaataatctctgacaaaacaaggtaaattgtctcgggttgaaagagacattagaattagatgatattaacataagtcagcccctcttctacatttttagctttcttttagtcgaaaatcattccaaactcggaacatacattgtggtgtttatttgggaagaagtccacgctaaagtattttagtacatttctaccagattacccggataaataaaaaaagcgaagttacttacaacatgaaacagcttgcacattgaagaaaagtaatcaatcagcagtatatccaatgaatctatgcatcttgtcaggtccattgggccttagaggcctaaatatttgaagaaagagtaaaatcaaaaataaagtatcgaaaaaaggtaacccaaaaattaatatagtttgactaattttgttgcagtttttttttctagttaaaaattcaacattcgaaactcatgttctgacctcatttatacacttgcccagtggtcagtgcagaaaaagagaaaaagaatcacctttttgttttaatctcaaagtcgaaattcgaaattcctctactcttcccgttaagtgtgttcctttttatccgttcgtcatgcattcgtcgttggagccggagaaaatggaggaaggtgggggaagcaattcgcttaagagaaaattctctgaaatcgatggagatcaaaatcttgattctgtctcttctcctatgatgactgactctaatgggtatcatcatcttcctctctttgtacttgattttgggtcttatgggtttttagtctttttcactaaagtttactttttttttggcagtagttatgaattgaaagtgtacgaggttgctaagaacaggaacataattgctgttttggggacagggattgataagtcagagatcactaagaggcttatcaaagctatgggttcttctgatacagacaaaagattgataattttcttggccccaactgtgaatcttgttaaacaggcaagtctcttgtttgattgtaaaaagaaaaactgtttcatttggattttaatcattttgagttgatgatgttggctaatgagtcgccttgggagcttatttttgaatgttttattggtgtgtgtggttttagcaatgctgtgagatcagagcacttgtgaatttgaaagttgaagagtactttggagctaaaggagttgataaatggacatctcagcgctgggatgaggaatttagcaagcacgatgtaagtttctgtttctttttgtgtatatttggctagttatacgccaacaaagtgacttgcttgtagttttggtgattttatatcaaaatttctttgtgtggttagtgaaactttggcagaatgttgtaatccactttgaccagctcattgttgtattttgagtcatgaatgttctctgagttagttaaaagcccattccaatttgttacttttggggttggttcttcttccaatgctgattatttcttaattattttgtttgaacttgtttgcttgagcccttgacgtagatttgtgactgcattgatctcactaacagaatcacatacttctcttttgttgccgaatccacgtgagtctattatctgcaatgaaattatgttttgtatggttcaggttttagttatgactcctcaaatattattggatgtccttagaagtgcattcctgaaactagagatggtatgtcttctaataatagatgaatgccaccataccactggcaatcatccctatgcgaagttaatgaaggtgtgttttctcagtaatgataagctctattagttttttcataatagagtttccataacttgtcaacgaactagattctttcttgttttcatgaaggaattctatcacgaatccactagcaaaccgaagatatttggattgactgcgtcagccgtcattagaaaaggcatgctatttaaaagtttcttatttcctctgtatgccaaaccaaagatcctgcttcctgtaactactttttaatgtttgaacttcatgtaaggaacataaactcatactacaagtgtttcctctccctctaactatgcagctcaagtatcagaacttgagagactcatggactcaaaggtactttgtttttgtgtaacaaggaaacagatatagtttacaaattaatgctatgcaatcttactttgaattcagatttttaatcctgaagagcgtgaaggagtggaaaagtttgctacaacggttaaagaaggtccaatattgtataacccatcaccatcctgtagtttggaattgaaagaaaagttagaaacttcacacctcaaggtatataatatatgctcactgaatatgatccagaacatgactctttcctattatgtttcagagtgcttgaaaaatattctgttttttttcgtacagtttgatgcttctcttagaaggcttcaagagttgggaaaagacagttttctgaatatggataataagtttgagacatatcaaaagagattgtctatcgactacagagagattttgcattgccttgataatcttggcctgatttgcgcacacttggtatttttctaccagtttagtttttattaccagttcttcatttgcttactcattgttacttttttctcccgctagcatacctgttgtgctgattatttttcttttttttttcatcttgctttcgcgataggcggctgaagtctgcttggagaaaatctcagatacgaaagaggaaagtgaaacttataaagaatgctcaatggtgtgcaaggaatttcttgaggatattttatccaccattggggtgtatttgccgcaaggtaatgtattcaaagctctatattgcattgagtcctcttctagtcactaatttttacactgtttatcatttgtgttatttaacagatgataagagtctggtagatttgcagcaaaaccatctgtcagcagtaatttctgggcatgtatctccaaagctaaaagaactcttccatctattggattcctttaggtaaatttaaattgtttatccaactcccaaaattgcaccaagatctccatctgttctgacaatttcaatttgcttgcagaggtgacaagcaaaagcagtgccttattttagttgagagaattataactgcgaaagtgatcgaaagattcgttaagaaagaagcctctttggcttaccttaatgtcttgtatttaaccgaaaacaacccctccaccaatgtatcggcacagaaaatgcaaattgaaatccctgatttatttcaacatggcaaggttacctgttcttcatcacagtcagatgttttatagattgagaaatgtttttattttgtcttctctgaaagctttttaatgcatgtaggtgaatcttttattcatcacagatgtggttgaagagggatttcaggttccagattgctcatgcatggtttgttttgacctgcccaaaacaatgtgtagttactcgcagtctcaaaaacatgccaaacagagtaattctaagtctatcatgtttcttgaaaggtaggaagcaatatttatttaacacaaaatgtttaccaaattccagtttttgtagcttatttctgaatactaattattgtagagggaacccgaagcaaagagaccatctgcatgaccttatgcgaagagaagtcctaattcaagatccagaagctccaaacttgaaatcgtgtccacctccagtgaaaaatggacacggtgtgaaggagattggatccatggttatcccagattctaacataactgtatctgaggaagcagcttccacacaaactatgagtgatcctcctagcagaaatgagcagttaccaccgtgtaaaaagttacgcttggataacaatctcttacaatccaacggcaaagagaaggttgcctcttctaaaagtaaatcatcttcatcggctgcaggtatgttttctaatttattaattcgtcaattagctggtgtcgctgattttagtctttagttcctctatcagccgctgttgtatcacacacatacacgcacacatcagcagttgcatatcatatgtctatgtctaaggtcatggagcttgtcttaatttgtttatttatgtatacatttctttttcttttcgctgaacaggttcaaaaaaacgtaaggagttgcacggaacaacctgtgcaaacgcattgtcaggaacctggggagaaaatattgatggcgccacctttcaggcttataagtttgacttctgttgtaatatttctggcgaagtatactcgagtttctctcttttgcttgagtcaactctcgccgaggatgttggtaaagttgagatggacctttacttggtcaggaagcttgtcaaggcttctgtctcaccttgtggccagatacgtttgagtcaagaggaggtacataactctgatccctagttataaacagtttcttgtttcatggtttgaacttgatgtcttcttctttgtgttttggatgcagctggtcaaagcaaaatattttcagcagtttttctttaatggcatgtttggaaagttgtttgttggatctaagtcacagggaacaaagagagaatttttgcttcaaactgacactagttctctttggcaccctgcctttatgtttctactgctaccagttgaaacaaatgatctagcttcgagtgcgacaattgattggtcagctatcaactcctgtgcctcaatagttgagttcttgaagaaaaattctcttcttgatcttcgggatagtgatgggaatcagtgcaatacctcatccggtcaggaagtcttactagacgataaaatggaagaaacgaatctgattcattttgccaatgcttcgtctgataaaaatagtctcgaagaacttgtggtcattgcaattcatactggacggatatactctatagttgaagccgtaagcgattcttctgctatgagcccctttgaggtggatgcctcatcaggctatgctacttatgcagaatattttaacaaaaagtaagtgatattctagctttggctgttctttcaatctacttatcataactctctagttaatgttattcccttttaatcaggtatgggattgttttagcgcacccgaaccagccgttgatgaagttgaagcagagtcaccatgcgcacaaccttttagtcgacttcaatgaagagagtaagttgattcttgagaatttctccaacatatggaatcattgtgtatgttctcatgatattgtagtgtgtgagctctaagatgttgtttccaatgtaaatggacagtggttgtgaagacagaaccaaaagctggcaatgttaggaaaagaaaaccgaatatccatgcgcatttgcctccagagcttttggctagaattgatgtaccgcgtgctgtgctaaaatcaatctacttgctgccttcagtgatgcaccgcctagagtctctaatgttggccagccagcttagggaagagattgattgtagcatagataacttcagtatatcaagtacatcggtatggtttttgaaaactatctgtcatttagagatgaaactagatatcttgattgtcattaaactcttgtcttggttcaataaatcagattcttgaagcagttacaacacttacatgccccgaatcattttcaatggagcggttggaactgctcggggattcagtcttgaagtatgttgcgagctgtcatctattccttaagtatcctgacaaagatgaggggcaactatcacggcagagacaatcgattatatctaactcaaatcttcaccgcttgacaaccagtcgcaaactacaggtatcttctaacatttgcaagtaatgtcttacatcagtcagaacaccaaagaaatatctttccatggggattggtttgatagggatacataagaaatggcgcttttgaaccgcgtcgctggactgcacctggtcaattttctctttttcctgttccttgcaagtgtgggattgatactagagaagtaccattggacccaaaattcttcacagaaaacatgactatcaaaataggcaagtcttgcgacatgggtcatagatgggtagtttcaaaatctgtatcagattgcgctgaggccctgattggtgcctattatgtaagcggtggattgtctgcttctctccatatgatgaaatggctcggtattgacgtcgattttgacccaaacctagtcgttgaagccatcaatagagtttctctacggtgttacattcctaaagaagatgagctcatagagttggagagaaagatccaacatgaattctctgcaaagtttcttttaaaagaggctatcacacactcctctcttcgtgaatcctattcatacgaggtatgacttcatcattttcaacccctgcattatttggctgacttattcccaggtttccaacctcatgctatcatttttttcctcaaacagagattagagtttcttggcgattctgtactggattttctaataacccgtcatctttttaacacctacgaacaaactgggcctggagagatgaccgatcttcgttctgcatgtgtaaacaatgaaaattttgcgcaagttgcagtgaaaaataacctgcatacccaccttcaacgctgtgctacggttctcgagactcaaataaacgactatctgatgtcctttcaaaagccagatgagactggtagatcaatcccttcaatacagggccctaaggtaaaaaatatacttgcatgaccatttaaagtccctgcctgagatttcagattataaagagagcaaataggttgacatacttgtctattttggtttaggctcttggagatgttgtggagagtatcgctggagcattgctgatcgatacgaggttagatctcgatcaagtgtggagagtctttgagccgttgctttctccacttgtaactccagataaacttcagcttcctccataccgggagctcaatgagctatgcgactctcttgggtatttctttcgagtgaaatgttcaaatgatggtgtcaaagcacaagccacgatccagttgcagctggatgatgttcttttaactggagatggatctgaacagacaaataaactggccttgggaaaagcagcttcacatctgcttacacaacttgaggtatatatattctgatgtttccacttgcgtgtgtgttggtgtgtgtgctcaaactttctttggttcttcagaagagaaacatttcacgtaaaacctcgctcggggataatcaaagttccatggatgtcaatcttgcttgcaatcatagcgacagagaaactctgacttcagagactactgaaatccagagtatagtgattccatgtaagcactgttatttacctagagagattcttcttttcttcttcagtttttttttttttttgtatcaagggttatgcatttcatggttttatgtgtttcagttattggacctataaacatgaagaaaggcgggcctcgtggaactctacatgagttttgcaagaagcatctgtggccaatgcctactttcgatacctcggaagagaaatccaggtgacttctcattttggttccttttttctctgctctcatgtatcccgagtcctgaccaatctgagactgataactgcacagaactccgtttgaattcatagatggcggtgagaagcggactagcttcagcagtttcacatcgaccataaccctaaggatacccaatcgtgaggctgtgatgtatgctggagaagcaaggcctgacaagaagagttccttcgactctgcagtcgtggaattgctttatgagctcgagcgccgcaagatcgtcataatacaaaagtag

SEQ ID NO: 41 - DNA, 8812 bp, Arabidopsis thaliana
  source 1..8812: mol_type = genomic DNA
cgtagtttcaacgaaaaatcaatgctagaactgattcgtagtctagatgttccatccggtaagaacgatatttcactgtgtttttgttgtggcgtgttctttgcgttatgtttaaaatcaatttggtctcttcactgttgtaggaaccaaggcatttgtagcgaaatatattcatcctgaaaacgctattgtaaaaattactcatctctttttttttttacttcagtacgtttatgatatggattcgatacactgaaacatgattgtgtctttatatcttagactgcctacaatgatggacttggatgtggattatggacacttctcacatctagcatttctgttatttacgttactccttctacatgggacaaacattttaatcttagtatttggagtttggtgatgaatcttaactctcaaacttttatgatttcatgtctatcctcacatcaattgcaataaaaatatttgcttttctcttcgtaggatggtggcaggaaactcgcactggaaatgtttccatcacttaaattgacaacgaaaattgacgacaatgctcgagctaatgcactactcattgctgcatatggtcatgctacaagtgatacaagatattactcattttctcaaattaagtgacatatctaacatgtaaaaatgagtaatgttttggtgatttcacttatatattgcatctctttctctgctcctttggctttcagaaaattcttcactaattagaaaaaaatattttgtttattctttttccgtattcaaaatctctcaaaatttggtcatttttcgatttctatatttatctaattttcaaggtgagagttgttaatgtagtttggttatgatttaacccgaccgaaatcctcatgacctaacaaattataaataatctctgacaaaacaaggtaaattgtctcgggttgaaagagacattagaattagatgatattaacataagtcagcccctcttctacatttttagctttcttttagtcgaaaatcattccaaactcggaacatacattgtggtgtttatttgggaagaagtccacgctaaagtattttagtacatttctaccagattacccggataaataaaaaaagcgaagttacttacaacatgaaacagcttgcacattgaagaaaagtaatcaatcagcagtatatccaatgaatctatgcatcttgtcaggtccattgggccttagaggcctaaatatttgaagaaagagtaaaatcaaaaataaagtatcgaaaaaaggtaacccaaaaattaatatagtttgactaattttgttgcagtttttttttctagttaaaaattcaacattcgaaactcatgttctgacctcatttatacacttgcccagtggtcagtgcagaaaaagagaaaaagaatcacctttttgttttaatctcaaagtcgaaattcgaaattcctctactcttcccgttaagtgtgttcctttttatccgttcgtcatgcattcgtcgttggagccggagaaaatggaggaaggtgggggaagcaattcgcttaagagaaaattctctgaaatcgatggagatcaaaatcttgattctgtctcttctcctatgatgactgactctaatgggtatcatcatcttcctctctttgtacttgattttgggtcttatgggtttttagtctttttcactaaagtttactttttttttggcagtagttatgaattgaaagtgtacgaggttgctaagaacaggaacataattgctgttttggggacagggattgataagtcagagatcactaagaggcttatcaaagctatgggttcttctgatacagacaaaagattgataattttcttggccccaactgtgaatcttgttaaacaggcaagtctcttgtttgattgtaaaaagaaaaactgtttcatttggattttaatcattttgagttgatgatgttggctaatgagtcgccttgggagcttatttttgaatgttttattggtgtgtgtggttttagcaatgctgtgagatcagagcacttgtgaatttgaaagttgaagagtactttggagctaaaggagttgataaatggacatctcagcgctgggatgaggaatttagcaagcacgatgtaagtttctgtttctttttgtgtatatttggctagttatacgccaacaaagtgacttgcttgtagttttggtgattttatatcaaaatttctttgtgtggttagtgaaactttggcagaatgttgtaatccactttgaccagctcattgttgtattttgagtcatgaatgttctctgagttagttaaaagcccattccaatttgttacttttggggttggttcttcttccaatgctgattatttcttaattattttgtttgaacttgtttgcttgagcccttgacgtagatttgtgactgcattgatctcactaacagaatcacatacttctcttttgttgccgaatccacgtgagtctattatctgcaatgaaattatgttttgtatggttcaggttttagttatgactcctcaaatattattggatgtccttagaagtgcattcctgaaactagagatggtatgtcttctaataatagatgaatgccaccataccactggcaatcatccctatgcgaagttaatgaaggtgtgttttctcagtaatgataagctctattagttttttcataatagagtttccataacttgtcaacgaactagattctttcttgttttcatgaaggaattctatcacgaatccactagcaaaccgaagatatttggattgactgcgtcagccgtcattagaaaaggcatgctatttaaaagtttcttatttcctctgtatgccaaaccaaagatcctgcttcctgtaactactttttaatgtttgaacttcatgtaaggaacataaactcatactacaagtgtttcctctccctctaactatgcagctcaagtatcagaacttgagagactcatggactcaaaggtactttgtttttgtgtaacaaggaaacagatatagtttacaaattaatgctatgcaatcttactttgaattcagatttttaatcctgaagagcgtgaaggagtggaaaagtttgctacaacggttaaagaaggtccaatattgtataacccatcaccatcctgtagtttggaattgaaagaaaagttagaaacttcacacctcaaggtatataatatatgctcactgaatatgatccagaacatgactctttcctattatgtttcagagtgcttgaaaaatattctgttttttttcgtacagtttgatgcttctcttagaaggcttcaagagttgggaaaagacagttttctgaatatggataataagtttgagacatatcaaaagagattgtctatcgactacagagagattttgcattgccttgataatcttggcctgatttgcgcacacttggtatttttctaccagtttagtttttattaccagttcttcatttgcttactcattgttacttttttctcccgctagcatacctgttgtgctgattatttttcttttttttttcatcttgctttcgcgataggcggctgaagtctgcttggagaaaatctcagatacgaaagaggaaagtgaaacttataaagaatgctcaatggtgtgcaaggaatttcttgaggatattttatccaccattggggtgtatttgccgcaaggtaatgtattcaaagctctatattgcattgagtcctcttctagtcactaatttttacactgtttatcatttgtgttatttaacagatgataagagtctggtagatttgcagcaaaaccatctgtcagcagtaatttctgggcatgtatctccaaagctaaaagaactcttccatctattggattcctttaggtaaatttaaattgtttatccaactcccaaaattgcaccaagatctccatctgttctgacaatttcaatttgcttgcagaggtgacaagcaaaagcagtgccttattttagttgagagaattataactgcgaaagtgatcgaaagattcgttaagaaagaagcctctttggcttaccttaatgtcttgtatttaaccgaaaacaacccctccaccaatgtatcggcacagaaaatgcaaattgaaatccctgatttatttcaacatggcaaggttacctgttcttcatcacagtcagatgttttatagattgagaaatgtttttattttgtcttctctgaaagctttttaatgcatgtaggtgaatcttttattcatcacagatgtggttgaagagggatttcaggttccagattgctcatgcatggtttgttttgacctgcccaaaacaatgtgtagttactcgcagtctcaaaaacatgccaaacagagtaattctaagtctatcatgtttcttgaaaggtaggaagcaatatttatttaacacaaaatgtttaccaaattccagtttttgtagcttatttctgaatactaattattgtagagggaacccgaagcaaagagaccatctgcatgaccttatgcgaagagaagtcctaattcaagatccagaagctccaaacttgaaatcgtgtccacctccagtgaaaaatggacacggtgtgaaggagattggatccatggttatcccagattctaacataactgtatctgaggaagcagcttccacacaaactatgagtgatcctcctagcagaaatgagcagttaccaccgtgtaaaaagttacgcttggataacaatctcttacaatccaacggcaaagagaaggttgcctcttctaaaagtaaatcatcttcatcggctgcaggtatgttttctaatttattaattcgtcaattagctggtgtcgctgattttagtctttagttcctctatcagccgctgttgtatcacacacatacacgcacacatcagcagttgcatatcatatgtctatgtctaaggtcatggagcttgtcttaatttgtttatttatgtatacatttctttttcttttcgctgaacaggttcaaaaaaacgtaaggagttgcacggaacaacctgtgcaaacgcattgtcaggaacctggggagaaaatattgatggcgccacctttcaggcttataagtttgacttctgttgtaatatttctggcgaagtatactcgagtttctctcttttgcttgagtcaactctcgccgaggatgttggtaaagttgagatggacctttacttggtcaggaagcttgtcaaggcttctgtctcaccttgtggccagatacgtttgagtcaagaggaggtacataactctgatccctagttataaacagtttcttgtttcatggtttgaacttgatgtcttcttctttgtgttttggatgcagctggtcaaagcaaaatattttcagcagtttttctttaatggcatgtttggaaagttgtttgttggatctaagtcacagggaacaaagagagaatttttgcttcaaactgacactagttctctttggcaccctgcctttatgtttctactgctaccagttgaaacaaatgatctagcttcgagtgcgacaattgattggtcagctatcaactcctgtgcctcaatagttgagttcttgaagaaaaattctcttcttgatcttcgggatagtgatgggaatcagtgcaatacctcatccggtcaggaagtcttactagacgataaaatggaagaaacgaatctgattcattttgccaatgcttcgtctgataaaaatagtctcgaagaacttgtggtcattgcaattcatactggacggatatactctatagttgaagccgtaagcgattcttctgctatgagcccctttgaggtggatgcctcatcaggctatgctacttatgcagaatattttaacaaaaagtaagtgatattctagctttggctgttctttcaatctacttatcataactctctagttaatgttattcccttttaatcaggtatgggattgttttagcgcacccgaaccagccgttgatgaagttgaagcagagtcaccatgcgcacaaccttttagtcgacttcaatgaagagagtaagttgattcttgagaatttctccaacatatggaatcattgtgtatgttctcatgatattgtagtgtgtgagctctaagatgttgtttccaatgtaaatggacagtggttgtgaagacagaaccaaaagctggcaatgttaggaaaagaaaaccgaatatccatgcgcatttgcctccagagcttttggctagaattgatgtaccgcgtgctgtgctaaaatcaatctacttgctgccttcagtgatgcaccgcctagagtctctaatgttggccagccagcttagggaagagattgattgtagcatagataacttcagtatatcaagtacatcggtatggtttttgaaaactatctgtcatttagagatgaaactagatatcttgattgtcattaaactcttgtcttggttcaataaatcagattcttgaagcagttacaacacttacatgccccgaatcattttcaatggagcggttggaactgctcggggattcagtcttgaagtatgttgcgagctgtcatctattccttaagtatcctgacaaagatgaggggcaactatcacggcagagacaatcgattatatctaactcaaatcttcaccgcttgacaaccagtcgcaaactacaggtatcttctaacatttgcaagtaatgtcttacatcagtcagaacaccaaagaaatatctttccatggggattggtttgatagggatacataagaaatggcgcttttgaaccgcgtcgctggactgcacctggtcaattttctctttttcctgttccttgcaagtgtgggattgatactagagaagtaccattggacccaaaattcttcacagaaaacatgactatcaaaataggcaagtcttgcgacatgggtcatagatgggtagtttcaaaatctgtatcagattgcgctgaggccctgattggtgcctattatgtaagcggtggattgtctgcttctctccatatgatgaaatggctcggtattgacgtcgattttgacccaaacctagtcgttgaagccatcaatagagtttctctacggtgttacattcctaaagaagatgagctcatagagttggagagaaagatccaacatgaattctctgcaaagtttcttttaaaagaggctatcacacactcctctcttcgtgaatcctattcatacgaggtatgacttcatcattttcaacccctgcattatttggctgacttattcccaggtttccaacctcatgctatcatttttttcctcaaacagagattagagtttcttggcgattctgtactggattttctaataacccgtcatctttttaacacctacgaacaaactgggcctggagagatgaccgatcttcgttctgcatgtgtaaacaatgaaaattttgcgcaagttgcagtgaaaaataacctgcatacccaccttcaacgctgtgctacggttctcgagactcaaataaacgactatctgatgtcctttcaaaagccagatgagactggtagatcaatcccttcaatacagggccctaaggtaaaaaatatacttgcatgaccatttaaagtccctgcctgagatttcagattataaagagagcaaataggttgacatacttgtctattttggtttaggctcttggagatgttgtggagagtatcgctggagcattgctgatcgatacgaggttagatctcgatcaagtgtggagagtctttgagccgttgctttctccacttgtaactccagataaacttcagcttcctccataccgggagctcaatgagctatgcgactctcttgggtatttctttcgagtgaaatgttcaaatgatggtgtcaaagcacaagccacgatccagttgcagctggatgatgttcttttaactggagatggatctgaacagacaaataaactggccttgggaaaagcagcttcacatctgcttacacaacttgaggtatatatattctgatgtttccacttgcgtgtgtgttggtgtgtgtgctcaaactttctttggttcttcagaagagaaacatttcacgtaaaacctcgctcggggataatcaaagttccatggatgtcaatcttgcttgcaatcatagcgacagagaaactctgacttcagagactactgaaatccagagtatagtgattccatgtaagcactgttatttacctagagagattcttcttttcttcttcagtttttttttttttttgtatcaagggttatgcatttcatggttttatgtgtttcagttattggacctataaacatgaagaaaggcgggcctcgtggaactctacatgagttttgcaagaagcatctgtggccaatgcctactttcgatacctcggaagagaaatccaggtgacttctcattttggttccttttttctctgctctcatgtatcccgagtcctgaccaatctgagactgataactgcacagaactccgtttgaattcatagatggcggtgagaagcggactagcttcagcagtttcacatcgaccataaccctaaggatacccaatcgtgaggctgtgatgtatgctggagaagcaaggcctgacaagaagagttccttcgactctgcagtcgtggaattgctttatgagctcgagcgccgcaagatcgtcataatacaaaagtagactaatttagactgtactatatatgattc

SEQ ID NO: 42 - DNA, 8783 bp, Arabidopsis thaliana; identical to SEQ ID NO: 40
  source 1..8783: mol_type = genomic DNA

SEQ ID NO: 43 - DNA, 4952 bp, Arabidopsis thaliana
  source 1..4952: mol_type = genomic DNA
agttatatattaccaatctttggcttgtccaacttttggttagcctctatttccaggtgagagtggagttgaccagctagttgagataataaaggtacttcaatttggttaaacaaacacacataatcctagccattgctatattgaacatagagtggatcattgattatatggaatgaagaggctccatttcctgctattgattgccatcattttgtttactgtgtgtgttacaggttcttggaacaccaacacgggaggaaatcaaatgcatgaatccaaactacacagaattcaaattcccgcaaataaaggctcatccttggcacaaagtaagcaaacacatcatcagtttttccttaacattgatctccatatattcttacgattgaaaaatctgttgttggttcttaagatattccataagcgtacacctccagaagctgtagaccttgtctcaagacttctccagtattctccaaacctcagatcaaccgctgtaagtcaatgaagtgattaccataataacattatgtttgatatatctggttggttgattcaaacttacttgttattgtagatggaggcgatagttcacccgttcttcgatgagctacgtgatcccaatacacgtcttcctaatggtcgtgccttgcctcctctcttcaactttaaacctcaaggtctgtctcctccaaatatgcttttgtttgtttcccaatgctccgttttaacaaagactaaaagtgtgtgcttcttgttaaatatgtagagctaaaaggagcaagtttagagttgttgtccaagcttatacctgaccacgcccgaaaacaatgttccttcctcgctctctaaatctcttcctctctctctatatatatgtgtgtgtgtgtgtatgtacacatgcatataatatgcttatcgtttctaagtaatggagatagcttctcaggattatcattagctttcatctttcatgtatctttgttgtttattgtcttatcacaacctttgtactttattacatacaatgattagtgtaatgtatgtgacggtctttgactcgccggtcgctacagttatgttggatactaaattataaaataaacttctcgctcgtcacgtgtcattgcatgcatccaaagctcatgcttcaaagcttagccaaacttatttttaaaaaagcctatgttctgtgtaaaagtgtcatttacgagagtttcttgtttaagtttaaccaatttcacttcctcaaacgaaatacggtaattggtaatatcctctaaacatgaattatcattgactataaaaattagtttcgcaaattgcctctaagcaccacaagtgtcacgtaacgtgtcatttattcatgtttattgatttagttaattaaaaacattgtagtttaattattgaagtagtacaaagaatagggactaaattgcaatactctgaatttgtttttttcttttttagaatcatccgactttttgtttcacggtttcctcctccagtaaactgacgacgatacaagctctctcaccaacggcgacagtatctttgccggcggcgggagcgcttctgcttaatctgtagctcaaactaaaaattctctgggtattactcatggtgatttggaataacgatgatgatgattttttggagattgataactttcaatcttctccacggtcatctccaatacatgcaatgcagtgtagggtcgaaaatctagctggtgtagccgtggtaagtgatccaatccaacagtcataagtttatgcctaagcagaatcattgcttatgtgaatttttgttttgtttcagacaactagttctttgagctctcctactgagacaactgatttagttcagatgggcttctcagacgaggtttttgctacattgtttgacatgggatttcctgttgagatgatttctagagcgatcaaggaaactggtgaggcttttttctcttgtttgtattcctttctggatatatatgatccgtaacttgataccaataattatacaggaccaaatgtagaaacttcggttataattgatactatctccaaatactcagtgagtttctaatactttgatctcttgggttgcttgtcatttacatgtgcttctgtcatcacagtattcatatcctctcctttgtttatttgtgaagagcgactgtgaagctggttcttccaagtccaaggctattgatcatttccttgctatgggatttgatgaagaaaaagttgtcaaagccattcaagaacatggtacttacagatttctctcctccttaagtaagaagtaacactttatcactttgctgatatttgctttataaatcgcaggagaagacaatatggaagcaattgcaaatgcattgctctcttgtccagtaagcgatgttacgaaaatatactgtctcttgacattaaaaaaatagtacttaaagttcgttgatggtttgtaggaggctaagaaactgccagcagcagtagaggaagaagatggcattgactggtcatcaagtgatgatgataccaattacaccgatatgttaaactcagatgatgaggtataactctttcatgttggtgataacatatttaagcatcccaggtttgaattgtaaatgtatctcactgctattttgtatatgtatctaattttatgcgttcttaatctattttaaatcatgacagaaagatccaaactcaaatgaaaatggcagcaaaatacggtctttggtgaagatgggtttctcagagcttgaagcttctttagctgtcgagagatgtggtaactttattttaaacgattgccattgtcattaaattttagttccgttttgttcaggtttcttctagacaacgtcgtataaattgcttggtttagcctctgatttagtggtgtaggccttagatgtgtttgctgagcattttgattgtatttcactaatcgaaagttgtcattagttctgtcttagcttctggttctgtgatgtacgccttagatatgtttgtagagaatgtgatcgtatttcacaaaatgataaaagttgtcagtacttgataaaattgtatgttcactagttcctttttattcaggtttcttctagaggaagtggcataagccaaattgcttagttttagtgtaatgtgatagtcaaattgtggctttagcctctggttctgtgatttaggcttgaaatgtgtttgctgagcattgtgattgtatttcactaaatgatacagttgtcagatgttaatatatatctcttacttactctaagtatgttgctgccttatccagactcatatgattgtaatttcaggagaaaatgtggatattgcagagctcacagacttcctttgtgctgctcaaatggctagggaatttagtgagttttacactgaacatgaagaacaaaaggtactgttaaaaccttttttataatctatcttttgtaagttaattcctttgggaactgattattttgggaaatttggtgtatgcagcctagacataatattaagaaaaggcggtttgagtcaaaaggagagccaagatcatctgttgatgacgagccgattcgtctaccaaatccaatgataggatttggggttccaaacgagcccggactcattacacatagatcgcttccagagttagcccgagggccaccttttttctactatgagaatgtcgccctcacacctaaaggcgtttgggagactatttccaggcacttgttcgagatcccacctgagtttgtggactcaaaatatttctgtgttgcagcgaggaagagaggctacatccacaatctccccatcaacaacagatttcagattcagcctccaccaaaatacaccatccatgatgcatttcctttgagtaagagatggtggccagaatgggataaaaggaccaagcttaattgcattttgacttgtacaggtagtgctcagttgactaacaggattcgtgtagcccttgagccttacaatgaagaaccagaaccgcctaagcatgtacaaagatatgtgattgaccagtgcaaaaaatggaatttggtttgggtgggtaaaaacaaagctgccccactcgagccagatgagatggagagtattctgggatttccaaaaaatcatactcgtggtggaggcatgagtagaactgagcgcttcaagtccttaggaaattcgtttcaggtaattttacatatcatatgcgtaataatactctttgtagttaaagtcttttgcgtatttgattcattggtgggtggcttgaataccttggtttaatggttggttgaacttgttttaggttgatactgtggcgtatcatctgtctgtcctgaagcccattttcccacatggaatcaatgttctctctcttttcacgggtattggtggtggggaagtggcacttcatcgtctccaaatcaaaatgaagcttgttgtgtctgttgagatttcaaaagtcaacagaaatattttgaaggacttttgggagcaaactaaccagactggagaattgatcgagttttcagacatccaacacttgactaatgacacaatcgaagggttgatggagaaatatggtggatttgatcttgtaattggaggaagtccttgtaacaatctggcaggcggtaatagggtaagccgagttggtcttgaaggtgatcaatcttcgttgttctttgagtattgccgtattctagaggtggtacgtgcgaggatgagaggatcttgatcattcacattacctgaagtagattgaagtagatatgactccatgaaatctagttgaactttatttttctatatctgttatgtaatatggccatgaaggtacatttttgaataatataagtcaacctaactctcttttgctttttgcgacaatatatctgcaactgcatttgcact

SEQ ID NO: 44 - DNA, 4785 bp, Arabidopsis thaliana
  source 1..4785: mol_type = genomic DNA
acttagtctatatcaaaattatagaacaaatttcgagaaacagaagaagagaagaagccatgaagctaactagtacagtcacaaaaggacgacaccgtttcgaaattgggccagagacaaaactaaactggatcttaaatcagcccaagccgttaactataaatttgttacattagtcacggactcacgtgtcacgtccttcgaaaacaacgtatccgcacgtgacatcgccaccggcctttttttttttttttcacaccgcacgaggaagtttaggtttcttcaaaatcacaaaaccaaacaacaacaaccaaaaaaaaaaaactcaaaccattttctctctaacttctctgtcatttctctctctagtggcaaagtatggcggattggggacctgttgtagtcgctgtgatactgttcgtgcttttgactccgggacttctctttcagattccggcgagaggtcgtgttgttgaatttggtaatatgcagactagtggagcgtcgattctcgtccacaccatcattttcttcggtcttataaccatcttcaccatcgccattcgtctccatatctataccggttaatttcaccgtaccggattcgtaacttcccccggttgtctagttttatggtttgttttggattttgtttcttctctgtgtcttgtcaaaacgttatgaatttgtgaatctgaatatgcattaagttaatttcaaaattcgctatgtttgattctcggtttggtttaaatctggttatggcgttgatttgaatttgatggtaggcactaggcagttagccttagtttggtttattggtattcgagttcaaattggaattgagtactaaaatgctctgttactcatttctgcatcttgagttcttatggatttgcttacgaaatgttcaattttgtttggtctggttcggttcgttctgaaacgaatgtcgagagtcttttgcttgactcgaaacttgccttgtgtcagcgtgtaggggtttgtaagaataaaatgggctttaaaattaagttattaatgggccaacacatgatccaccaagaagaagtgatccggttgcatcttagattctcatgtgatgtgattgaacgttgaaagtgcacagaagtagacctgtttaaagatgtttcacactttcactgcgtactatgtaactagtggagtcagtcccgtcatgcgtatgagtaaagcgcgtcgataccacgggaacacacaaaaacatgtcaccctagtaaaaactgtgttcgttagctcattgtaaattgcagtatatggcataaacaattgtttctacaaattccaagaatgtaagaatcaagacaataaaatgtgactatatcaagaacttaactaaagtttcatccacttaaatgaaaaagttgatttggatagaacaaaagacgtaatattcgatgtgttctctctctctcccatctttacttttattgactttttattttcactttaatgtgtgatgtaaaaataaaaagtaattatttgttcaaccctaggtgaaataaaggacgacccaaaacaagtgacgagagagcagagagagcttcttcttccggacactgaacagtgagagcacccatctccaacctcttcctgtaagtttccccaactactctgtttcttaaatgttctgcgttctttaaaacaaagtatagaagatttaggttgtaagatcgatctcgtttgatttcaaactcactatctgaaactctttgattacaaacccatcttcataatctctgtaaaaatcaaacatgcaattcacttaatggtgcaaaaaccccagaagagggaaaaaggaatcaaatttagtttataaaagcagtggaattgagttgcattgttgaaatattcaaaagcaagatcagatttttgataaagaatttcacttttgattgcaacttataatcaaggaacaagatgggaagcactgtgattttaagctcagatgatgaagattcagatattagtgaatctgaaatggatgagtatggagacaaaatgtacctaaaccttaaaggtgggaagctgaaagtgagactctctcctcaagcttttatctgtccttattgtccaaacaagaagaaaactagttttcaatacaaagatcttcttcaacatgcttctggagttggtaatagcaattctgataaaagaagtgcaaaggagaaagcaagtcaccttgctcttgtcaaataccttcaacaagatcttgctgattcagcttcagaagcagagccttcatcaaagcgtcagaaaaacggaaaccctattcaagattgtgatcatgacgagaagcttgtgtatccttggaaaggtacacactttaaaggttcttacttttctccttaagattgtactgcaatgtgtgtttagtgtttgtgtatatgtggttgaaacaggtattgtggtgaatattccaactacaaaggcacaagatggtcgatctgcgggcgagagtggatcgaagctaagggatgagtatattctaagaggatttaacccgactagagttcgtcctttatggaactacttgggacattcaggaacagctattgtggagtttaacaaagattggaatggacttcacaatggtcttttgtttgacaaggcttatacagtagatggtcatgggaagaaggactggttgaagaaagacggtcccaagttaggtctttacggttggattgctcgtgctgatgattataacggtaataatattattggagaaaacttgaggaagacgggtgatctgaaaactatagctgagcttacggaagaagaggcgaggaaacaggaattgcttgtgcagaacctgagacaacttgtagaagagaagaaaaaagacatgaaggagattgaggagctttgttcagttaagtcagaggaacttaatcagttgatggaagagaaggagaagaatcagcaaaagcattaccgtgagctgaatgctatacaagaaagaacaatgagtcacattcaaaagatagttgatgatcatgagaaattgaagaggctgttggagtcagagaggaagaaactcgaaatcaaatgtaatgagttggcaaagcgcgaagtgcacaatggaaccgagagaatgaaattgtctgaagatcttgaacaggtatccatttactctctgtatctctcttttcaagatatatgttcaagaaataattggtttttttctcttatcagaatgcatctaagaatagctctcttgaactagctgccatggaacaacaaaaggcagacgaggaagttaaaaaacttgctgaagaccaaagggttagtgactttcttcttctttgtaaaaatggttgggcttattttcgtgattactgagaaaattctgtacctaacagaggcaaaaggaggagcttcatgagaaaatcataagactagaaagacagagagatcagaaacaagcgattgagctagaagttgagcagttgaaaggacagctcaatgtgatgaagcacatggcatcagatggcgatgctgaagttgtgaaagaggtggacatcatcttcaaagatttaggtgagaaggaagcacaactcgcagatctcgataaatttaaccaaactcttatccttagagagcgcaggaccaacgatgagcttcaagaagctcataaagaattggtaaacgtatgtatcattcaaagtgttgttcttttcaatcacatcgaaaagctatgagaaagcttgacattttactaaaatcttggttttgtttgtttcatgtgccttcatagattatgaaagaatggaacacaaatatcggtgttaagagaatgggagagctcgtgacgaaaccattcgtggatgcaatgcagcagaagtattgtcagcaagatgtggaggaccgagcagttgaagttctccaactttgggaacactatctcaaagattcagattggcatccattcaagcgggtcaagctcgaaaatgaagatagagaagtggtaagaccgccttcttgactctgtttgttatgttgaatctctctgaaagattaaaaagcttttttggtgttgttgttaattgtgtttaggaagtgatagatgatagagacgaaaagctgagggagctaaaggcagatttgggagatggtccttacaatgcggtcacgaaagctttgttggagataaacgagtataacccgagtggaaggtatattacaacagagctatggaacttcaaagcagataagaaggctacacttgaagaaggtgtcacttgtttacttgatcaatgggaaaaggcgaaacgcaagcgtggaatggcttagaggtttaaccatttttgataaccgaacaaaaatatgttttcatttgcaattgttatttgctaatataggatttcgattgatggtttgcagctgcaagatgatggacatgggactgaataaaaagccgatgcggtttttagttgcagagaaatgtgtttggtttgaccaaactttggtggattctgtttgtttttcttctcagaacttagtgaataattgacacaactttgatgtcttgcatcggttcttttcattgtaacatttgtaggagtttggccgctttggacaataagaaataaaaatatcattgtaatataattcacatgtaaaacaactagatttggcctctcttctgtctcatatcttaagcatgtcatttagaaccttttattgtaaaaacaaactttgtcatgagttactttttgtagtcaaatttgatattgacccctt

SEQ ID NO: 45 - DNA, 3482 bp, Arabidopsis thaliana
  source 1..3482: mol_type = genomic DNA
agatttttataagctcttgattccactttgtaatataaaattaggtcgggttttaggtctctctgacgtgattgattttaatcaatctaattttaattaatcggtgtaattgtcattatttagtattaaagataattgtctgtgtttagacttcaaatatattcaaatatagaggaaaacagtttgtaattgtttagtagatttgtgtatcccatccacacatacagtatagcgtaaggtgtatatatatgtatgtatgacattaatttgtgtagatatgtatgtatgacattaatttgtgtagatatgtatgtatgtatccacataatcaattttctatctgcaacgtataaaattgtaaattttattttagttttaatgtgttctatttaaattccagttaaaaaatcgaacacaaataatgtttttgtgtaatatcatgtttaagtataatatcatgtttatgtgttctttcataatcaagtgaataatgtttttttatatctataaatacgaattagaaaacaaaattcgtaagttaatcaagaatattataccaaataaatatgtgttcaaatataaccctgtacaaacgttttaagtacgggtacggatattcaatctaaattcattttccgttctctcatacgttgaactaaattttaaccattctcagataggtaattaatttaaatgaaataattatgtgatgagaaatttcaagataggcaaagagacgggacatgactaatctactcactcattttatctacactcaattgaaaccaaataaaacaccaaaatgatatgaattcaaattatgagtattataccaaataaatatctacacatattatcctacacatacgtaagatctaaatttatatatacgaccaaaacaacaaaataatctatatcattttaaaaaaatatgaaatatgcacgtatgtgcggggcagaagctagtgtgttatataaaaaagtagcatattgacaaagagagatttccaattatcacgtgtaattcgaaaaagtagcgtggtataaaagaaaataaaacaaatttaaaaaaaaaaacataacgacggagattccaaaaaagaatcaaaatcgaataaaataaaatgacaaatcttctgcaaattgagggagagatgatttatcaatataaataacatttggcagcctagatttatcgaaaaagagatcgggtggatgagatggtggaagatgtggtggttgtggtggtggaataaagagagatgagatgattctaagtgttctgtaaatttttggaaaataacatgtaatatatataaaatacgaaaatgggtaaaaaggtaattgcaagtgaagaaagagggtgtactctgacaccgtagctattttgttaattcttttacaattcatagttatctagtacatattctctaatttttatgtcaacattttgggttataatttttaaaaaaattcttaaaaagttttctcccttttttctctcttaaaaaattcttaatggcatggagtcttcagttactaagagccggcgaatactgtggaagaagcacatggtgttgatttgaccaagcccgaccgccggagcaaggtggatcgtggatcaaccggcgccgttgtgtttcaacatctcttcatctcacgttagacatgtgtctgctacgtggcactttattttcttaaccttatctttaaatttgggtgggttaagctggaccttagatttaaatcaaagttgtaaatggtaagagatcggactttttcaccagcatatgtaataccctttattgggctttaataattaatacgaaacttggccgacaaaaagaaaaaaaaactaaaaaaaaattcctaatattttcattgtaaatagaaaaaatacatacataatacaatttatatatgtatataagaagaaagtaaatattagaagttttagaacttgagaagaaagttcacttttttttatataacataaccgtgtttatgtttgtcacaatagtacatataaaataataggtgaaaaaggttatataaataaaaaaatattaagaaggatttttagaaggtacatatcaatttttttataagaaaatcagaaatgttgaaaggtaagagtaataactaaaccaagatcattaagcatgacatcagacagaaattggagatggagattcaagagctaaaaggcaaattccaagtgataaaacatttaggagatgatgatgatagcatttgataacaatgttccctcatgtttacacacttgcatttttcttttaacaaaaaaaaaaacacttgcatttttccattatatagcatttgataacaaagttcctaagaagttattctctttttcgcatctgaagtgctgtaaacatgatcaaacactctagtttgttgaatacttcagttgacaataaatttatttgatggggatggagtgaagatgaattctcatttgataaggttaagaggactatgactgttgtggatactaataaaattcacaaaaacttaccgcaataggttttctaagataatacatactgtctttaacaagaaccaaagttggaattatctatgtgtgattaattttggcctatgttagttttaatttgaatatttaagtactttttttccgagtttgactggattgttgagtatccatacaatatcaataacatgataaaaaaatttggagaaaattgattttaaacctcttcatgaatgtttgcaagttgagacattctgaaaatgaagctctggttaaagctaccatcctttgctttacatagaaggagaatctcaaggattcatcatggcatccattcaaacataaaggaaccaaggacaaatcaaatatgtgtctttcctgctgtctcatcccattttaagagtgtttatatccctgatttatgatttacgttgacgtcattttgactttgaaaagtgtttggtcattcatacactttctagaccactgttttaggtaaatatgtaggagtagtaacctgtgattatgtgaatgttgatacttgtatccatattccatatgttggtgcaactggttgtgagttagcagtaatattgtaatagtttgagatgattatggttataggatctggttaacgaagagtatgagcccctgaagaagcttaaagaaaaatggggagaagatgtgcataatactttaaaaataacaatcaaggatatggatgagtataatgcatgtggtaagtacccaactccagaactatggaactttaagaaaaaacttaaatcaacactgaaggaagtgattaaattccttttgaatgacatcaagagtctaaaacgccaacgaatctgtaggtgtgttatatcttttttggttgacataggtctccttatagagtttatatatctaatgtgctagtttaaaccaacataaaccccatatagttttagtgtataaggtttag

SEQ ID NO: 46 - DNA, 3608 bp, Arabidopsis thaliana
  source 1..3608: mol_type = genomic DNA
aatgtctaccgattaaatttttcaggctcgttcaaaagcaatagcacaaagtcgatgaagacggcttctagttctcctgatagatcttctgtagcaatgtattcatgctctcccgatagaggtaacaatgtaactttttaatctaattaatcatagtacttaacaaaaattacaatttttataaacttattgtcttactaacagattcagtcgaaaacgaaatgtcaatgactatacaatcagtgacaagcaatagcgcaagctcagaaacaaatatattagccacaacactcagtgacctctttcacaataggtaaagcattatcctactcctatataacaacattgctagaaatttcacatcaaaaaaaatatatatatatatctaacttttcttgtttcagctcaaatatcaattttgggatgaagattccagcgagggcacggcgagtgacgagagaaaccggagaagaagaatggtacaatgttgttttgtatatagggatagtagacacatttcaagactatggtatgaagaaacgcatagaacattgttacaaatccattcaatataactcaaactcaatctcaaccgtccatcctaagatctactcttctagattccaagactttgtctccaacatcttcctacctcacgacgatgatctctcttcgaaatattgagttgtttgttatttttgatttccaagtggaattattagagtgttaagaggtacacttcttacgacccaagttggtgttggtgtttgttgtccaaaaaatcctctcttttctgacttcattgttgatcgatcaacaaaatgtagagaaaaacatgaactattaatacacatatatcaaaaatataaaatacagaaaaagacaaaacccaaaataaaaaaaacccaacattgttcttggttcaacacaaaagaaaaaaccaatcaaaccaagtcaaccctttaattaaaactttcagttggaacatatatatctctgtttactttgttttgttaatcacaaagcagcatttagaacacttacagagattagtcttgtatgtctacattgttactctctttagatctcttagagattaggtttagccagttcaacgtttttctccttaatctctaaataattcttctgttacaacattacaacatatttaatatcttattatccttaacctaacaacttttatactaaacaaaacaaagccatttctatttgggctttacttatcttatggcccaattgacttttcttctttcttctttttcacgacgcttcttcttcctcctcgtacaacgggcttcttcttcctccattacttactcaagtatcttttctcttcatcatcttctcatctttctcttcaagtttctcttgtatgatattaagcaattaatagattccaacatagtcatgtttctgcgtttgattattgttcttggaagtataatctgaattggaaatctcttttattgcaggtttaagatgaagaagaaacaacaaaagcaggaatttgtagctgagacatcagagatgaacaacaacaacgagtgttctggacaagaccaacaaaaacgatatgtgtggccatgggttggtctagtagccaacgtaccaactgaggtggaaccatctggtcggagagtaggcaaaagcggttcaacgttacgtgatgagttcactctgaaagggtttaatccaacaagagtcaaacccatttggaataccaagggacatactggttttgctttggttgaattcgctaaagactttaaaggattcgaaagcgccatgcaattcgaaaagagttttgatttagaccgtcatgggaagagagattggaaaaaaggtaaaacattgtttttaaaagtcatttgcttttattgacattgatagagttcactttctttgtttggaaaaggtcatcgcttgagagatgataagctttatggatggcttgcgagagaggatgattataatcgaagtgatactgttgggaagaatgtcaagaagaagagggatttgaaaagtatctctcagattgtagaggaagaccagaggaaactgtatcatctatttgagaatatgtgtcaaaccattgagaagaataagcaacgtaaacaacagcttgaacagaaagttgatgagactttggagagtttggaatttcataaccttatgttaaacaatagctaccaagaaggtaaaacagaaacactttaataagctttctgtttgtgttttcatgctgacatgtgtattcttttggtttgtttgtttgttattttgatgagaagagattcagaagatggagaagaatatgcaagagttttatcaacaggttcttggtggacatgaaaagtcttttgcagaactggaggcaaagagggagaagcttgacgagcgtgcaagattgattgagcaacgggctatcaaaaacgaagaagagatggaaaagaccaggcttgaaagagaaatggtgattatgctttccttacaaattaggagaaaaatatcacaaggcaataaaatctttcttgttgttgttgttgtagattcaaaaggctatgtgtgagcagaatgaagcgaatgaggaagctatgaaacttgcagaaaagcaccaggcaagtacttctttagtgtttctttagttatgaacaagtaataactaacaacttttgcagaaagagaaggagaagcttcataaaaggataatggaaatggaagctaagctaaatgaaacgcaagagcttgagttggagatagagaagctgaaaggtactacaaatgtgatgaagcatatggtgggttgtgatggagataaagatattgtggagaagatagccaaaactcagatagagcttgacgctcgagaaacagctctccatgaaaaaatgatgactctcgcacgaaaagaacgtgcgaccaacgatgagtatcaagacgctcgtaaagagatgattaaggttcgaaaacgttctaaatatatctgttccaaactctttggcttgtccttttaacttgtggaattacttttgatgatgagcaggtatggaaggcgaatgaagagttgatgaagcaagagaagattagagtgaagataatgggggagttgaaccctgcacccttcttgcctgcagtgatgaacaaacataaggctatgatgctgtgttcagtgtgggcagcagagataggagatgtgcaatggactccatttagggtcgatgagtctgatggaacaccaaaggttaggactttaacttaggagtctacactttcataaatctcaaaagatgggtttgtagcaaaaattacatatatctcaacattccaaatgtgaaatgcagagagtggtggatgaaaatgatgagaagcttcgtatgctgaagaaccagtacggtgaagaagtttatagtgaagtggtaagagcaaagctagagatggaggaacataacgctagtggcagctatgagactgaagagctttggaactatgaggagaaccgaaaggcgactatcgaggaaataacagatgtgatgttgaagataaggtccaaacttgctgctatgaagaacaaacgaaagaggccttga

SEQ ID NO: 47 - DNA, 4488 bp, Arabidopsis thaliana
  source 1..4488: mol_type = genomic DNA
gtaaaaaaacttaaatgattttggcgtaacaacattgtggctcttgtggatgtttataattgaatacctagctttacttttgttggtgttttcaggaaactgaatgtccagtggaggtgatggagaagtttgaactcgtaaatgtgcctcggtgtttcgtatcgactcttgaacatgttgagataaaaggattgtttgactggggggaacaggatatgaaaatagcgagttactttctcgaaaactcagcagtcctcaagaaactgattctgagtttcatgggttgtcctcaacattattcggaatcagatatctacgaggaacttaataaactcacaaaacgttctccgagatgtcaaattatcattagatgctgaatgaggccatgagtatcatgtgtagaaagtctgttttctcatgaaacactgattttttaaagatcattttgttcttcttcttagttttggttggattccttgaccataaaactcggtcatagaacgaaaacattgttgtttttttaattttttcttaatctcaatctcagtttcttatgatctattggattctctgaagaaagtgatattattacactggacactggtagtaggaacattggactaaaggatctactctcatctgaaactctttgcgcttcctcctagtatattgaaaatttcggttaactcggtaatgaaaaatccaaaccaatcaaagctactgtataaacaaaatttcaattgaattccggttaaattaataattttgattggtttaattcggtttaaaatgaattgaagacgccaatcgatcgtcgtcatcttcactctttctttccagtcacggtttacgcgtctctctatctcccacctgcgattcttctccattatctttgctaattcagaaggtttcgcttcagcttcctcatctacattcttcgcttgtttcttatttacagacattttacgacatttttctgatactgtttcggtgaaattctctaatttcgtttagttttgctttacaatgttcttcattttgtgtctctcttcgttcggtttttgctctgtagagacgcaatttccattttattcttctgatcttctcttttttttttttccggttggccatatacagttagggttttcagttttcactggttttgttctcatcttcctctttaacggaaatttgtcttcttgtaattactgggtcttgttcttactcatcttcttcgtctagtttttgaaaagttgtgatttttagtaggtttctgcaattgggttagtcaatcttcaggtttagggtttaagaataagggtttatgctatgatgatcattgggactagatgaatataactcaaattttgcaatgccactctgcataactatgaaaactatctcattctctcttatttgtcctgttttttttaagctgattggatttctaaccagcttctttttgttttactatgggatgtttatgtgttgtaggttgcaatgtattccagaagagagctggaagatttggagtacagatactacagtgaaatgaaagatggtacaaggaaagtcaaaatctcagagtctctgttcaggtgtcccttttgttacatagatcgaaagcgtgattaccagtttgatgacttgcttcgacatgcttctggtattggcggtagttcccgcactaaggatgggagagataaagctagacatcttgctctggagagatatatgaggaagtatctccgccctcgagaaagaccacgtccttctccaacttcagatgtctcttctcttcctaaagaggagtttactggaaagtggaaatctactttgtcaactactgaagaaggagaattcataactactgaaaattctagttcacctcatattgtcaaagctgaaccaaagtttgtctccggagatgattctggacgtagtggtgaggaaagactaaagttttctgataaacccgaccccttttttagcaacgaagacaaatcataccctgccaaaagaccttgcctagtttctggtgcgaaagagggagatgaacctgttcaacggattggtctcagccatggtgctagctttgctccaacatatccccagaagctagtttctttgggtgctggtaatggggatcagatgtatgtgcatccctggaaaggtatcctggcgaatatgaaaagaacgtttaatgaaaaaacaaggaagtatgctggtgagagtggaagcaagataagagaagatttgatcaagaaagggtttaatccccataaagtcacgccactgtggaacggaagacttgggtttactggttttgctattgttgactttggtaaagagtgggaaggattcagaaacgcgaccatgtttgataaacactttgaagtgagtcagtgtgggaaaagagaccatgatctcacacgtgatccaggtgataagctttatggttgggtagcaaaacaagatgactactattcaagaactgctattggtgaccacctcagaaagcaaggggacttgaagagtgtttctggtaaagaggcagaagatcaaagaaagacattcacgcttgtctccaacttggaaaacacactggtaaccaaatctgataatcttcaacaaatggagagcatctacaaacaaaccagttcagtgcttgagaaaagaatgaaagagaaggatgaaatgatcaacacacataatgaaagtatgttctcttactacgaaactaatttttgcttgattgaggtgcttggtctagtatttggaaactgataagtttgcttttccatgtttagaaatgagtattatgcagcaaactgcacgtgattatttggccagtatttatgaagaacatgaaaaggcctctcagcatctggaagctcaaaggaaagaatatgaagaccgggagaattatctagataagtgtcaagctaagaataagactgagcggagaaagcttcaatggcaaaagcataaggtaacattcacatgcttcgtacaaccttacccttaaactatcttgttcttagcaatgattcgtggaatcttataatatctgccagaacttaatggcaacgcaagagcaaaacaaagctgatgaagacatgatgagattggcagaacagcaacaggtaagctttattgttaaaaaaaaacaaaacactttgaaagttaatgttcaagttgctgtttgatttttggtcgtacttagaaaactggctattgttttacagagggaaaaagatgaattacgtaagcaagttcgtgagctcgaggagaagatcgatgctgagcaggcattagagctagagatagagcgtatgagaggtgacttgcaggtcatgggacacatgcaagaaggtgaaggtgaagattcaaaaatcaaggagatgatagaaaagacaaaggaagaactgaaggagaaagaagaggattgggaatatcaagagtcgctctatcaaactcttgttgtaaaacatggctacactaacgatgagctacaggatgcgcgcaaggctttgattcgtgtaagcaattctcagcctctctccatctcgtcccttcttcctttgatgggttgttatttggattttctgattgatgaacatttatggtgttgacctagtgagactccatgttcttacctggtaactcatggtagaaatctcagatggtagtggaagtgatttgccatttgtgttctgatatttgcaactaaccatgcttaagctatgtgcagtcaatgcgagagttgaccacacgagcttacattggtgtgaagagaatgggagcattggatgagacaccattcaaaaaagtagctaaagagaaatatccagcagtagaagctgataaaaaagccgaagagctctgttccttgtgggaagagcacctgggagactcggcttggcatccgattaaggtcgtcgaaaaagatggaatcgcaaaggtaaacacgcttttctctcaaacaatgtttctagatgatatcttagctcctgtaatataagaacatgagagtgactataacgattttgcaggaagaactgaatgaagaagatgagaagctacaagagctgaggaaagagttgggtgaggaagtgtatgcagctgtgacacaagcgcttaaagaaaggaacgagtataatggcagtggaaggtacatagtgcctgagctttggaatttcaaacaaaacagaaaagcgagcatcaaggaaggagttgtttatctggtcaactcgtggaaacagaagaaaccaaagccgaagcgtagataaaaattaattctagaaacctctattgttgataattattaagactagatgagatttcatgattatccccactaagaatagttataaacttgagaaaaaaataaaaatagttatgaacttatgatgctgaaatcttggactgggttattcgttttgaaaagaggatttgggttttgttatttatgaatatgtttcattg

SEQ ID NO: 48 - DNA, 4698 bp, Arabidopsis thaliana
  source 1..4698: mol_type = genomic DNA
gacgacaccgtttcgaaattgggccagagacaaaactaaactggatcttaaatcagcccaagccgttaactataaatttgttacattagtcacggactcacgtgtcacgtccttcgaaaacaacgtatccgcacgtgacatcgccaccggcctttttttttttttttcacaccgcacgaggaagtttaggtttcttcaaaatcacaaaaccaaacaacaacaaccaaaaaaaaaaaactcaaaccattttctctctaacttctctgtcatttctctctctagtggcaaagtatggcggattggggacctgttgtagtcgctgtgatactgttcgtgcttttgactccgggacttctctttcagattccggcgagaggtcgtgttgttgaatttggtaatatgcagactagtggagcgtcgattctcgtccacaccatcattttcttcggtcttataaccatcttcaccatcgccattcgtctccatatctataccggttaatttcaccgtaccggattcgtaacttcccccggttgtctagttttatggtttgttttggattttgtttcttctctgtgtcttgtcaaaacgttatgaatttgtgaatctgaatatgcattaagttaatttcaaaattcgctatgtttgattctcggtttggtttaaatctggttatggcgttgatttgaatttgatggtaggcactaggcagttagccttagtttggtttattggtattcgagttcaaattggaattgagtactaaaatgctctgttactcatttctgcatcttgagttcttatggatttgcttacgaaatgttcaattttgtttggtctggttcggttcgttctgaaacgaatgtcgagagtcttttgcttgactcgaaacttgccttgtgtcagcgtgtaggggtttgtaagaataaaatgggctttaaaattaagttattaatgggccaacacatgatccaccaagaagaagtgatccggttgcatcttagattctcatgtgatgtgattgaacgttgaaagtgcacagaagtagacctgtttaaagatgtttcacactttcactgcgtactatgtaactagtggagtcagtcccgtcatgcgtatgagtaaagcgcgtcgataccacgggaacacacaaaaacatgtcaccctagtaaaaactgtgttcgttagctcattgtaaattgcagtatatggcataaacaattgtttctacaaattccaagaatgtaagaatcaagacaataaaatgtgactatatcaagaacttaactaaagtttcatccacttaaatgaaaaagttgatttggatagaacaaaagacgtaatattcgatgtgttctctctctctcccatctttacttttattgactttttattttcactttaatgtgtgatgtaaaaataaaaagtaattatttgttcaaccctaggtgaaataaaggacgacccaaaacaagtgacgagagagcagagagagcttcttcttccggacactgaacagtgagagcacccatctccaacctcttcctgtaagtttccccaactactctgtttcttaaatgttctgcgttctttaaaacaaagtatagaagatttaggttgtaagatcgatctcgtttgatttcaaactcactatctgaaactctttgattacaaacccatcttcataatctctgtaaaaatcaaacatgcaattcacttaatggtgcaaaaaccccagaagagggaaaaaggaatcaaatttagtttataaaagcagtggaattgagttgcattgttgaaatattcaaaagcaagatcagatttttgataaagaatttcacttttgattgcaacttataatcaaggaacaagatgggaagcactgtgattttaagctcagatgatgaagattcagatattagtgaatctgaaatggatgagtatggagacaaaatgtacctaaaccttaaaggtgggaagctgaaagtgagactctctcctcaagcttttatctgtccttattgtccaaacaagaagaaaactagttttcaatacaaagatcttcttcaacatgcttctggagttggtaatagcaattctgataaaagaagtgcaaaggagaaagcaagtcaccttgctcttgtcaaataccttcaacaagatcttgctgattcagcttcagaagcagagccttcatcaaagcgtcagaaaaacggaaaccctattcaagattgtgatcatgacgagaagcttgtgtatccttggaaaggtacacactttaaaggttcttacttttctccttaagattgtactgcaatgtgtgtttagtgtttgtgtatatgtggttgaaacaggtattgtggtgaatattccaactacaaaggcacaagatggtcgatctgcgggcgagagtggatcgaagctaagggatgagtatattctaagaggatttaacccgactagagttcgtcctttatggaactacttgggacattcaggaacagctattgtggagtttaacaaagattggaatggacttcacaatggtcttttgtttgacaaggcttatacagtagatggtcatgggaagaaggactggttgaagaaagacggtcccaagttaggtctttacggttggattgctcgtgctgatgattataacggtaataatattattggagaaaacttgaggaagacgggtgatctgaaaactatagctgagcttacggaagaagaggcgaggaaacaggaattgcttgtgcagaacctgagacaacttgtagaagagaagaaaaaagacatgaaggagattgaggagctttgttcagttaagtcagaggaacttaatcagttgatggaagagaaggagaagaatcagcaaaagcattaccgtgagctgaatgctatacaagaaagaacaatgagtcacattcaaaagatagttgatgatcatgagaaattgaagaggctgttggagtcagagaggaagaaactcgaaatcaaatgtaatgagttggcaaagcgcgaagtgcacaatggaaccgagagaatgaaattgtctgaagatcttgaacaggtatccatttactctctgtatctctcttttcaagatatatgttcaagaaataattggtttttttctcttatcagaatgcatctaagaatagctctcttgaactagctgccatggaacaacaaaaggcagacgaggaagttaaaaaacttgctgaagaccaaagggttagtgactttcttcttctttgtaaaaatggttgggcttattttcgtgattactgagaaaattctgtacctaacagaggcaaaaggaggagcttcatgagaaaatcataagactagaaagacagagagatcagaaacaagcgattgagctagaagttgagcagttgaaaggacagctcaatgtgatgaagcacatggcatcagatggcgatgctgaagttgtgaaagaggtggacatcatcttcaaagatttaggtgagaaggaagcacaactcgcagatctcgataaatttaaccaaactcttatccttagagagcgcaggaccaacgatgagcttcaagaagctcataaagaattggtaaacgtatgtatcattcaaagtgttgttcttttcaatcacatcgaaaagctatgagaaagcttgacattttactaaaatcttggttttgtttgtttcatgtgccttcatagattatgaaagaatggaacacaaatatcggtgttaagagaatgggagagctcgtgacgaaaccattcgtggatgcaatgcagcagaagtattgtcagcaagatgtggaggaccgagcagttgaagttctccaactttgggaacactatctcaaagattcagattggcatccattcaagcgggtcaagctcgaaaatgaagatagagaagtggtaagaccgccttcttgactctgtttgttatgttgaatctctctgaaagattaaaaagcttttttggtgttgttgttaattgtgtttaggaagtgatagatgatagagacgaaaagctgagggagctaaaggcagatttgggagatggtccttacaatgcggtcacgaaagctttgttggagataaacgagtataacccgagtggaaggtatattacaacagagctatggaacttcaaagcagataagaaggctacacttgaagaaggtgtcacttgtttacttgatcaatgggaaaaggcgaaacgcaagcgtggaatggcttagaggtttaaccatttttgataaccgaacaaaaatatgttttcatttgcaattgttatttgctaatataggatttcgattgatggtttgcagctgcaagatgatggacatgggactgaataaaaagccgatgcggtttttagttgcagagaaatgtgtttggtttgaccaaactttggtggattctgtttgtttttcttctcagaacttagtgaataattgacacaactttgatgtcttgcatcggttcttttcattgtaacatttgtaggagtttggccgctttggacaataagaaataaaaatatcattgtaatataattcacatgtaaaacaactagatttggcctctcttctgtctcatatcttaagcatgtcatttagaaccttttattgtaaaaacaaactttgtcatgagttactttttgtagtcaaatttgatattgacccctt

SEQ ID NO: 49 - DNA, 5258 bp, Arabidopsis thaliana
  source 1..5258: mol_type = genomic DNA
aacatctttaaacttcgcatacttaagttaatgaacaaaattgacttgtgttgtaggcaacaattgacgtgggaggtacacaactgtctgctctagatatcgaaggatccatcttgcagagtccatgcgaacctagggaatctgtaagtactcatatatatcatcctgtgaagttgtaataactgatctttaaaatgtttcttttatccgaataaaaaggtttcagccggtgaaagcgaagtgagaatacagacacgctacggattcagatgcgtagagccaaacctaatgttcgtgctttgtcgtggagattggtcttcacctgcagtaagttcactcaatttcttcaaatatgataagtgttgcttcaacggtagtaactaacaaagcatctttgttcatgatcacctatatacatgatacagttgagagtttatacagcagaagatgtggtgaacgaactaatcaaagcaagaacagagtatctagaagcttccatcggtgtctcgggaaggaaaaagattgtgattccgcgattcttgcataaacgtctacgggatttcgctgaggatgaaggctcgttaattgaatggatatgcagccaattaccaccagcccaacgttgctttcagctcaaggaaacagcgatggaggggttgaacaagaaaagtgaatctcaattgaaaaaactgatagaagtgaggtctcacgaatacgagtttcgttatctcttggcattgtaaaatctaatccttcaaatttctagtatttggagccttgaaaagacgattgtcctatatatgtgtgtgtgttttaagagaatgaagttacacagtgaattttgattaataatggaaacaaacaaaatagtaactacaaagtgtacaatacattcatattgtgatacatataaaagtgcttcatttaactatataaaaccttgatttaaatctagattggattcaaatcagtagattacaaatcccgatcaaaataattaagtatgctatattattgttgtaaatgtataatctgtagatattaactaacacttaggatgaggaacacgacaagcaattagaagtctgggcaagagcacagggttcttgataaaatacttgcaggcacatggttgtggctttaccattcttccacaacagtaactcggcaatttggtgcctttatcaatggcaactaaacaatttgcaatctcatgcatgcatctgcccatcatctcatcaccattaactttgatcggagccgccgacaagagtatgacgacgaaggcaatgagcatcaatggaacaatcttcatgtctaattattttagtaactagtgaacaaaaagataaataattttgcagaaaattaaactggttcatgccttctttgttttgttctaggtaaattttaaataggaattggaagcactgcttgaacaattgactttttcagaagtcacccatcataaaagcctttcctaaaccgaaccgaataatcacaattttttatctccggttaacaaattctttctcgcgacgacttcaacgcgcgacaatggcgcgtgtaagacaaacagaggtttcttggaatatctctccaagtacttttgctgcttctctatcaaaatgggaacaaacttagaaaaaaccaaaagaaatcgaaattacttggaaacaaaacatctgacgatctccagactcagctgaagtttcgagctgaatctcttcttctctacacgcgatttctctggtacagttcttaaacgtctgctttgctttgacattcatcgtttctctcccaatttgcttcttggttttggggatgcgcgttttgatgccgacttttttcttcagttttgaaatttcgtaagacattagaccccaattattcataattttttcagaaatcagacatgcatgtttcatacaacatagagagtgtgttaagtagaggagtcaacattttttccggatctatctaatcaagctgaatcatagacttactattcagaatgtttcatactcactttgtcttagatccaagtatgtaaggtttcaagtgttttttgtttcctgtggagataatgatggctaaattcatttacttacaatgtagttagattatgcagctcgtagatgtaaaacaataacgcgaggcggtgatgaacaacaaattgagtgattttgagaaaaatctgtacaaaaaactcaagagtggaaagctcgaggtgaaagtctcataccggactttcctgtgtccttattgtcccgataataagaagaaggttggtttgtatgttgacattcttcagcatgcttctggagttggtaatagccaatccaagaaaagaagtttgactgagaaggctagtcaccgtgctcttgccaaataccttattaaagatcttgctcattacgctacttctactatatctaagcgcttaaaagccagaacatcattcattcctgctgaaaccggcgatgctcctataatttatgatgatgctcagttcgagaaacttgtgtggccttggaaaggtaatgatgatgacgcatactcctatgtcattacaagtatcgtagtattagcactatttggatttatagcctctctactaaccgaagttgtatctgtggtgtggctgggataggagttttggttaatattcccacgacgagtacagaagatggtcggtcttgtactggagagagtggaccaaaacttaaggatgaattaatccgaagaggattcaacccaattagagttcgtactgtgtgggaccgtttcggtcattcgggaaccggaatagtggaatttaacagagactggaatggacttcaagatgctttggtgtttaagaaggcttatgaaggagatgggcatgggaaaaaggattggctttgtggtgctactgactcgagcctttatgcatggcttgccaatgctgatgattactacagggctaacattttaggagaaaacttgcggaagatgggtgacctcaaaagtatttataggtttgcagaagaagaggcaaggaaagaccaaaagcttttgcagcgtctgaactttatggttgagaacaaacaatatcggttgaagaaattacagataaaatattcacaggattcagttaaacttaagtatgagactgaagaaaaagaaaagattctccgtgcttacagtgaaggtgagatttgtccttctagtttcaagattcatatccccttagaaaaagtattgttgcatcacccagctatacatatttctgtagattgtgtttatatccgcgttacattttccgttttgcatctgaagatctgacaggaagacaacaaaaatcgactgatcatttcaataggatctttgctgatcatgaaaagcaaaaggtgcagctggagtctcagataaaggaacttgaaattagaaagttggagttggcaaaacgtgaggcagagaatgaaacgcagaggaaaatagtggcaaaagaacttgaacaggtatatgctaacaagctcatttcttaaactgatttctggattgcctctttcgtcttctaaaattcaatgacattattttcagaatgctgctataaatagttatgttcaactatctgccttggaacaacaaaagaccagagagaaagcgcaaagattggctgtagatcacaaggtctgggaatgcttccttctttaaaaaggttggctctttaactttatgtgacagggtcctaccgtgtttttaaccttagatgcaaaaggaaaagcttcataagagaattgctgcactagaaaggcagcttgatcagaagcaggagcttgaactggaggtccagcaactgaaaagtcagctgagcgtgatgagactcgtggaattggacagtggttctgaaattgtgaacaaggtggagaccttcctcagagaccttagtgagacagaaggagagcttgcacacttaaatcaattcaatcaagatcttgttgttcaagagcggaagagcaatgatgaacttcaagaagctcgaagagcattgataagcgtacgtatattcaaacaattttctttgaactttcgtctcatagaggagctaggtgactctttgcatgtactgagtgataaactcgaatataactgacatggtaggctagagtggttggatgcattaacaacagaaaagacactacttgaattttcctctaatttttttcttaactttgattgcatgtatagaatttgagagacatgggattgcatattggtgttaagagaatgggggagcttgacaccaaaccgtttatgaaagcaatgagaataaagtactgtcaagaagatctagaggattgggcagttgaagttatccagctttgggaggaatatcttaaggacccagattggcatccttttaaacggataaagcttgagactgcagaaacaatagtggtattccttctcctgtatatcactaattcaatgttttttatttctcatcctaaataatatgtttcgtaagtgttactagcagaagacctccattcaagtgcatgcgtacaactaccagctgcatatgcagatttgtttatgcatgttatggtgtttgatatgtagaaccctgaagctgttgatatctatgtcaggaagtaattgatgaggatgacgagaagttaagaaccctgaagaatgaactgggggatgatgcgtaccaagcagtggcaaatgcattgctggagataaacgagtataatccgagtggaaggtacatctcctcagagctatggaacttcagagaagacaggaaggctacgcttgaggaaggtgttaattctctactggagcaatggaatcaagcgaagcatctcaagtcataaaggtttatatttgcatttacccggtacactcaaaaatcccagctctttggaagtttgcctctttgcttacatagttgtattttcgaattttgctaatctgaggtctgtactttgcaagttgcaggagatggaaaataagtttagcgtgtaaaggatgtcaaaatgcaaggttcaacaattgtctctcgtctttgatgcaatatatgggtcttagaattgcgaagtaggtgtaaattagaggaggatggcgtcacattgggactcgaagttgaaactatgtttctacacttgacggttcaacattgtaggaaactaagtaacaaacattgttagatgattctaaaccttagagaagtttatgaatttgtgaagaaatgaacactttggctt

SEQ ID NO: 50 - DNA, 5257 bp, Arabidopsis thaliana
  source 1..5257: mol_type = genomic DNA
aacatctttaaacttcgcatacttaagttaatgaacaaaattgacttgtgttgtaggcaacaattgacgtgggaggtacacaactgtctgctctagatatcgaaggatccatcttgcagagtccatgcgaacctagggaatctgtaagtactcatatatatcatcctgtgaagttgtaataactgatctttaaaatgtttcttttatccgaataaaaaggtttcagccggtgaaagcgaagtgagaatacagacacgctacggattcagatgcgtagagccaaacctaatgttcgtgctttgtcgtggagattggtcttcacctgcagtaagttcactcaatttcttcaaatatgataagtgttgcttcaacggtagtaactaacaaagcatctttgttcatgatcacctatatacatgatacagttgagagtttatacagcagaagatgtggtgaacgaactaatcaaagcaagaacagagtatctagaagcttccatcggtgtctcgggaaggaaaaagattgtgattccgcgattcttgcataaacgtctacgggatttcgctgaggatgaaggctcgttaattgaatggatatgcagccaattaccaccagcccaacgttgctttcagctcaaggaaacagcgatggaggggttgaacaagaaaagtgaatctcaattgaaaaaactgatagaagtgaggtctcacgaatacgagtttcgttatctcttggcattgtaaaatctaatccttcaaatttctagtatttggagccttgaaaagacgattgtcctatatatgtgtgtgtgttttaagagaatgaagttacacagtgaattttgattaataatggaaacaaacaaaatagtaactacaaagtgtacaatacattcatattgtgatacatataaaagtgcttcatttaactatataaaaccttgatttaaatctagattggattcaaatcagtagattacaaatcccgatcaaaataattaagtatgctatattattgttgtaaatgtataatctgtagatattaactaacacttaggatgaggaacacgacaagcaattagaagtctgggcaagagcacagggttcttgataaaatacttgcaggcacatggttgtggctttaccattcttccacaacagtaactcggcaatttggtgcctttatcaatggcaactaaacaatttgcaatctcatgcatgcatctgcccatcatctcatcaccattaactttgatcggagccgccgacaagagtatgacgacgaaggcaatgagcatcaatggaacaatcttcatgtctaattattttagtaactagtgaacaaaaagataaataattttgcagaaaattaaactggttcatgccttctttgttttgttctaggtaaattttaaataggaattggaagcactgcttgaacaattgactttttcagaagtcacccatcataaaagcctttcctaaaccgaaccgaataatcacaattttttatctccggttaacaaattctttctcgcgacgacttcaacgcgcgacaatggcgcgtgtaagacaaacagaggtttcttggaatatctctccaagtacttttgctgcttctctatcaaaatgggaacaaacttagaaaaaaccaaaagaaatcgaaattacttggaaacaaaacatctgacgatctccagactcagctgaagtttcgagctgaatctcttcttctctacacgcgatttctctggtacagttcttaaacgtctgctttgctttgacattcatcgtttctctcccaatttgcttcttggttttggggatgcgcgttttgatgccgacttttttcttcagttttgaaatttcgtaagacattagaccccaattattcataattttttcagaaatcagacatgcatgtttcatacaacatagagagtgtgttaagtagaggagtcaacattttttccggatctatctaatcaagctgaatcatagacttactattcagaatgtttcatactcactttgtcttagatccaagtatgtaaggtttcaagtgttttttgtttcctgtggagataatgatggctaaattcatttacttacaatgtagttagattatgcagctcgtagatgtaaaacaataacgcgaggcggtgatgaacaacaaattgagtgattttgagaaaaatctgtacaaaaaactcaagagtggaaagctcgaggtgaaagtctcataccggactttcctgtgtccttattgtcccgataataagaagaaggttggtttgtatgttgacattcttcagcatgcttctggagttggtaatagccaatccaagaaaagaagtttgactgagaaggctagtcaccgtgctcttgccaaataccttattaaagatcttgctcattacgctacttctactatatctaagcgcttaaaagccagaacatcattcattcctgctgaaaccggcgatgctcctataatttatgatgatgctcagttcgagaaacttgtgtggccttggaaaggtaatgatgatgacgcatactcctatgtcattacaagtatcgtagtattagcactatttggatttatagcctctctactaaccgaagttgtatctgtggtgtggctgggataggagttttggttaatattcccacgacgagtacagaagatggtcggtcttgtactggagagagtggaccaaaacttaaggatgaattaatccgaagaggattcaacccaattagagttcgtactgtgtgggaccgtttcggtcattcgggaaccggaatagtggaatttaacagagactggaatggacttcaagatgctttggtgtttaagaaggcttatgaaggagatgggcatgggaaaaaggattggctttgtggtgctactgactcgagcctttatgcatggcttgccaatgctgatgattactacagggctaacattttaggagaaaacttgcggaagatgggtgacctcaaaagtatttataggtttgcagaagaagaggcaaggaaagaccaaaagcttttgcagcgtctgaactttatggttgagaacaaacaatatcggttgaagaaattacagataaaatattcacaggattcagttaaacttaagtatgagactgaagaaaaagaaaagattctccgtgcttacagtgaaggtgagatttgtccttctagtttcaagattcatatccccttagaaaaagtattgttgcatcacccagctatacatatttctgtagattgtgtttatatccgcgttacattttccgttttgcatctgaagatctgacaggaagacaacaaaaatcgactgatcatttcaataggatctttgctgatcatgaaaagcaaaaggtgcagctggagtctcagataaaggaacttgaaattagaaagttggagttggcaaaacgtgaggcagagaatgaaacgcagaggaaaatagtggcaaaagaacttgaacaggtatatgctaacaagctcatttcttaaactgatttctggattgcctctttcgtcttctaaaattcaatgacattattttcagaatgctgctataaatagttatgttcaactatctgccttggaacaacaaaagaccagagagaaagcgcaaagattggctgtagatcacaaggtctgggaatgcttccttctttaaaaaggttggctctttaactttatgtgacagggtcctaccgtgtttttaaccttagatgcaaaaggaaaagcttcataagagaattgctgcactagaaaggcagcttgatcagaagcaggagcttgaactggaggtccagcaactgaaaagtcagctgagcgtgatgagactcgtggaattggacagtggttctgaaattgtgaacaaggtggagaccttcctcagagaccttagtgagacagaaggagagcttgcacacttaaatcaattcaatcaagatcttgttgttcaagagcggaagagcaatgatgaacttcaagaagctcgaagagcattgataagcgtacgtatattcaaacaattttctttgaactttcgtctcatagaggagctaggtgactctttgcatgtactgagtgataaactcgaatataactgacatggtaggctagagtggttggatgcattaacaacagaaaagacactacttgaattttcctctaatttttttcttaactttgattgcatgtatagaatttgagagacatgggattgcatattggtgttaagagaatgggggagcttgacaccaaaccgtttatgaaagcaatgagaataaagtactgtcaagaagatctagaggattgggcagttgaagttatccagctttgggaggaatatcttaaggacccagattggcatccttttaaacggataaagcttgagactgcagaaacaatagtggtattccttctcctgtatatcactaattcaatgttttttatttctcatcctaaataatatgtttcgtaagtgttactagcagaagacctccattcaagtgcatgcgtacaactaccagctgcatatgcagatttgtttatgcatgttatggtgtttgatatgtagaaccctgaagctgttgatatctatgtcaggaagtaattgatgaggatgacgagaagttaagaaccctgaagaatgaactgggggatgatgcgtaccaagcagtggcaaatgcattgctggagataaacgagtataatccgagtggaaggtacatctcctcagagctatggaacttcagagaagacaggaaggctacgcttgaggaaggtgttaattctctactggagcaatggaatcaagcgaagcatctcaagtcataaaggtttatatttgcatttacccggtacactcaaaaatcccagctctttggaagtttgcctctttgcttacatagttgtattttcgaattttgctaatctgaggtctgtactttgcaagttgcaggagatggaaaataagtttagcgtgtaaaggatgtcaaaatgcaaggttcaacaattgtctctcgtctttgatgcaatatatgggtcttagaattgcgaagtaggtgtaaattagaggaggatggcgtcacattgggactcgaagttgaaactatgtttctacacttgacggttcaacattgtaggaaactaagtaacaaacattgttagatgattctaaaccttagagaagtttatgaatttgtgaagaaatgaacactttggct

SEQ ID NO: 51 - DNA, 3718 bp, Arabidopsis thaliana
  source 1..3718: mol_type = genomic DNA
cactgcgtttacctttatcacaagccgaaaccctagtaaagtgtcggcttgaagactatgatgacctggtggcgatttttgggttgttgcatctatggtaagatacacagatatgttagggttacttaattggataattcttgtttagtcttcattcatcaatcatcaagttatgtgtactataatttttgtagcggtttttggaagaatatgataaggggatatgcatctttgtgtttgcttttggaacgtgataaccattcgacttttgactgatgaaattgaagacactgtcgtagtaacaaagctattcttcttagacattttgatactgaactattctgtgttccaaagtcttttactttgtgtttaggaaaagatcttgttctttgtgaaaccagtgtcgtaattcaagaactaatgcttgacatgtctcacctgctcaggttatctaaatctaatggataagaagaaacatcaacaatactgcactgatacaagacaagaagcgtctgtagtccaacggttaggataattgccttccaagcaatagacccgggttcgactcccggcagacgcaattatatttttcccaaacataattttagattttgttaaccaaacaatttgtggggttcgaatgtaactggttgtagcacatttaatatctgcaataaattatcaaaaaggccattggaactctcccaacccatcgtctaatttagtaatttttggtcttgtaaccttctaggtgtaccagaggcttccttattagtcttgtatcccaagcttttgaaaaaaagtgaaacgaaaaggttttaagttttgttggcttttgactatcatttcccctctctgtttattaaaatttacagtattgccactgagtttgctgcgacggtctgtctcttcaaaaagcaattttggggaggaagagaaaaccttaagagtcaaacggaaaaaaaacacacactatttttgtgattcaccaagcagaagaaaattgagaaaaaaaaaaggtctctgctttttattttccatggcttagactctcatttttattgggaatttggatggtctaaagtcaggatttgctttattttgcttgcaaggttttgtaaaagaacactttttctcggttcttcatccgtacacgtaacaaatccatttcttatgtgttttttcgatttctagaatctgtaaaacccacaaaaaagaggtttttttttttgtttctgggttctttgaagaagcagagagaagataagctctttacagttttcttcataacaagtgatttccttttgttttcttattcgatttccagtttctatatgttacataaatttgatttttaactctgaatcatatacattactcaaaaccttaaaaaggtttcttttttgtttgtctaggttgttcaaaacttgatctttcagtagctaaatatatggatcctctataatctcatttgtaaagctcttttattgcagctttaagatggagaaaaatcaacaaaagcaggaatttctagctgagacctcagagatgaagaacaccaaaaacaacgacgactgttctgtacaacaacaacaacgatttgtgtggccatgggttggtctagtagccaacataccaacggaggtggaaccatcgggtcggagagtaggcaaaagcggttcaacgttacgtgatgagttcactatgaaagggtttaatccaacaagagtccaacccatttgggatttcaagggtcattctggttttgctttggttgaattcgctaaagactttgaaggattcgaaagcgccatgaatttcgaaaggagttttaatttagaccgtcatgggaagagagattgggaaaaaggtaaaacattgtttcagagtttttaaagtcatttgctttcttgacattgatgagttcactttctttgtaaaaggtcatcgcttgagagacaataagctctatggatgggttgccagagaggatgattataatcgaagtgatactgttgggaagaacgtcaagaagaagagagatttgaaaagtatctctcagattgtggaggaagacgagaggaaaatggttcatcttgttgagaatatgtctcaaaccattgagaagaagaagcaaagtaaacaagagcttgaacagaaagttgatgagacttctcgtttcttggagagtttggaattgcataacgttctgttaaacaaaaactaccaagaaggtaaaatagaagcacttgaataagctttaaaaacataatctgttttgtgtttcatgctgacatgtatagtccttttggtttgtttgtgtgttattgtgatgagaagggtttcagaagatgcagatgaagatggaagagttgtatcaacaggttctggatggacatgaaaagtctttggcagaactggaggcaaagagggagaagcttgacgagcgtgcaagactgatcgagcaacgggctatcataaacgaagaagagatggaaaagtccagacttgaaagagaaatggtgattatgctttccttacaaagtaggagaaaaagatcacaaggcaataaaatctttgttgttgttgttgttgtagaatcaaaaggctatgtgtgagcagaatgaagcgaatgaggaagctatgaagcttgcagaaaagcaccaggcaagtagttcgttagtgtttctgtatatattcatgaacaagtaataactaagcttccatttccaacttttgagttcctgaactatgacaacttttgcagaaagagaaggagaagcttcataaaaggataatggaaatggaagctaagctaaatgaaacgcaagagctggagttggagatagagaagctgaaaggtactacaaatgtgatgaagcatatggtggggagtgatggagataaagatattgtggagaagatagccaaaactcagattcagcttgacgctcaagaaacggctctccatgaaaaaatgatgactctggcacgaaaagaacgtgcaaccaacgacgagtatcaagacgttcttaaagagatgattcaggttcgaaaacgttctaaatctatctgttccaaactctttggcttgtccttttaacttgtgtaattactttgatgaacaggtatggaacgccaatgaagagttgatgaagcaagagaagattagagtgaagagaatggggcaattaaaccctgcacccttcttgcctgcagtgatgaagaaacataaagttacacaatcaaaggcagagaataaggctatgaagctgtgttcagtgtgggaagcaaacataggagatgtgcaatggactccatttagagtcgatgagtctgatggaacaccaaaggttaggactttaatttaggagtctactttcaattctcaaaagatggggttttagcaaaaaaagacctctgcttttacatattatatcatccacattccaaatgtgaaatgcagagagttgtggatgaaaacgacgagaagcttcgtacgctgaagaaccagtacggtgaagaagtttataatgaagtggtaagaacaaaactagagattgaggaacataacgctagtggcagctatgtgattttagagctttggaactatgaggaaaaccgaaaggcgacgatggaggaagcaacagatgtgatgttgaagataaggtccaaacttgctgctatgaagaacaaacgaaagaggcttgaggtctaa

SEQ ID NO: 52 - DNA, 7640 bp, Arabidopsis thaliana
  source 1..7640: mol_type = genomic DNA
ctaaaaagagtattcaaaaacccaaacattaatttaatatccaaaatattaattatatgatattattttatttgattttaaatatatagtaaactgcgagttgtatatgttttcttgatattatttatattgtttagtgtttaaaattatacacttgtattttgattgttaattttagagtttcacctgtagtataccatcttatattaatatcgatttaaacccgtcaattctaggattttccagcttgtattaaaaattgaatcacatcatacacataaaaaaatctaatatgttattaattattgttgtatataagattataaattcttaaaataatatgcatgaaattgaatataaatatttaaattatgacccagtacttagtaataaatttttttaaatctatttttgacccgttataatatttttttatgtattgaacagtttatattcgtttttaaaagtttaaattatggcatatgcgaaaaaactctaattatttttttataacgatgatattattttttcgcaaaaatagaatcatataaagatgagaggtgaactataataattaataaaaaattaatatgataatttagatattaaatctaatttgttgattttaattggttaattttttggaaattaataatgtatttcattttttaatgaaatttaattaattaaattagtatttgactttttaatttttaaagagatgaattactttactctttaaattttatttctaatggcatacatatgtaattacttacaaaaagtaaggttacatttaaaatgtacttcccaaataatatagtaggatcatggtaaaatgttagttctcgaaagaaaaaatattgttataaatcataaacctaacgagctaactaaaatagcggcatcctaccaatttgagatttttcgtatatatattaaaattatccatttgataaacacttcatgataaagtattagttttgaaaataaaaatattgttcttgttataagaaaaaacacacacataaaagtattattggaggatctcattgttaagttgttaaccctcaacatttcgtctaaaaatcagacttttttctatcaaaaaaatatctatactttgtagtcaaataaaaatcttaatcaaaataatactcgtatactttgactgttgactgatggaaagatattagaatataaacattagagatagaaacaaatctgtaaaaatcttaaaattaggattatttatacggaatattccccaaaagataaaatcattgaatcataaaaagccatttatggtagccctaaatattcaggcgcggctttttttcttatttcgttttcattttaaaaaagtttttagcgccgtttattgccgcgcgtcgttttcgctcctcgtctcgtctccttttattattaccccctctctctctctcccactcttcctctcaaatcacacatcactgctttcttcaacctctctatctctcagaccaattagggtttcgcaatcttccagtagatttcgcttctcaacgtaagtttttctctataatctgtgtcgatttcagtctaactacagtgattgttaaaccctagactcggaaattttcctgggctttgttattatttgcgtcggtttagtcaatgcgatgtagtgaacgcttcgattacatagatttgtgtgaaaattttatagtccaattgcgttatagtgatgattttgttggtaattttgattttgaaactagggattttgaaaatggtggaaaatggggctaaagctgcgaagcgaaagaagagaccacttccagagattcaagaggtagaagatgtacctaggacgaggagaccaaggcgtgctgcagcgtgtaccagtttcaaggagaaatctattcgagtctgtgagaaatctgctactattgaagtaaagaaacagcagattgtggaggaagagtttctcgcgttacggttaacggctctggaaactgatgttgaagatcgtccaaccaggagactgaatgattttgttttgtttgattcagatggagttccacaacctctggagatgttggagattcatgacatattcgtttcaggtgctatcttaccttcagatgtgtgtactgataaggagaaagagaagggtgtgaggtgtacatcgtttggacgggttgagcattggagtatctctggttatgaagatggttcccctgttatttggatctcaacggaattggcggattatgattgtcgtaaacctgctgctagctacaggaaggtttatgattacttctatgagaaagctcgtgcttcagtggctgtgtataagaaattgtccaagtcatctggtggggatcctgatataggtcttgaggagttacttgcggcggttgtcagatcaatgagcagtggaagcaagtacttttctagtggtgcggcaatcatcgattttgttatatcccagggagattttatatataaccaactcgctggtttggatgagacagccaagaaacatgaatcaagctatgttgagattcctgttcttgtagctctcagagagaagagtagtaagattgacaagcctctgcagagggaaagaaacccatctaatggtgtgaggattaaagaagtttctcaagttgcggagagcgaggccttgacatctgatcaactggttgatggtactgatgatgacagaagatatgctatactcttacaagacgaagagaataggaaatctatgcaacagcccagaaaaaacagcagctcaggttctgcttcaaatatgttctacattaagataaatgaagatgagattgccaatgattatcctctcccatcgtactataagacctccgaagaagaaacagatgaacttatactttatgatgcttcctatgaggttcaatctgaacacctgcctcacaggatgcttcacaactgggctctttataactctgatttacgattcatatcactggaacttctaccgatgaaacaatgtgatgatattgatgtcaacatttttgggtcaggtgtggtgactgatgataatggaagttggatttctttaaacgatcctgacagcggttctcagtcacacgatcctgatgggatgtgcatattcctcagtcaaattaaagaatggatgattgagtttgggagcgatgatattatctccatttctatacgaacagatgtggcctggtaagcttactatcctagtattttgtactcgcatgtttctacgtctgttttttcttctgttgctgatgtataaggtatatacaggtaccgtcttgggaaaccatcaaaactttatgccccttggtggaaacctgttctgaaaacagcaagggttgggataagcattcttacttttcttagggtggaaagtagggttgctaggctttcatttgcagatgtcacaaaaagactgtctgggttacaggcgaatgataaagcttacatttcttctgaccccttggctgttgagagatatttggtcgtccatgggcaaattattttacagctttttgcagtttatccggacgacaatgtcaaaaggtgtccatttgttgttggtcttgcaagcaaattggaggataggcaccacacaaaatggatcatcaagaagaagaaaatttcgctgaaggaactgaatctgaatccaagggcaggcatggcaccagtagcatcgaagaggaaagctatgcaagcaacaacaactcgcctggtcaacagaatttggggagagttttactccaattactctccagaggatccattgcaggcgactgctgcagaaaatggggaggatgaggtggaagaggaaggcggaaatggggaggaagaggttgaagaggaaggtgaaaatggtctcacagaggacactgtaccagaacctgttgaggttcagaagcctcatactcctaagaaaatccgaggcagttctggaaaaagggaaataaaatgggatggtgagagtctaggaaaaacttctgctggcgagcctctctatcaacaagcccttgttggaggggaaatggtggctgtaggtggcgctgtcaccttggaagttgatgatccagatgaaatgccggccatctattttgtggagtacatgttcgaaagtacagatcactgcaaaatgttacatggtagattcttacaaagaggatctatgactgttctggggaatgctgctaacgagagggaactattcctgactaatgaatgcatgactacacagctcaaggacattaaaggagtagccagttttgagattcgatcaaggccatgggggcatcagtataggaaaaagaacatcactgcggataagcttgactgggctagagcattagaaagaaaagtaaaagatttgccaacagagtattactgcaaaagcttgtactcacctgagagagggggattctttagtcttccactaagtgatattggtcgcagttctgggttctgcacttcatgtaagataagggaggatgaagagaagaggtctacaattaaactaaatgtttcaaagacaggctttttcatcaatgggattgagtattctgttgaggattttgtctatgtcaaccctgactctattggtgggttgaaggagggtagtaaaacttcttttaagtctgggcgaaacattgggttaagagcgtatgttgtttgccaattgctggaaattgttccaaaggaatctagaaaggctgatttgggttcctttgatgttaaagtgagaaggttttataggcctgaggatgtttctgcagagaaggcctatgcttcagacatccaagaagtaagaactattttttatatctggtaatgtgttcagtggtgaggtttcttcataagtttatctgacaatcttttttctttctttttgcaatttcttaagttgtatttcagccaggacacagttgttctccctccaggtgctctagagggaaaatgtgaagtaagaaagaaaagtgatatgcccttatcccgtgaatatccaatatcagaccatattttcttctgtgatcttttctttgacacctccaaaggttctctcaagcaggtatatacctctcttcacttcgtatttgtcaattatttgtgtacctagtttcttaaggaattcatatagttgtgtctaggatttatatgttatgattattgttgttctgatacaaagttgaactttttctctatactgtcttgtaacagctgcccgccaatatgaagccaaagttctctactattaaggacgacacacttttaagaaagaaaaagggaaagggagtagagagtgaaattgagtctgagattgtcaagcctgttgagccacctaaagagattcgtctggctactctagatatttttgctggttgtggtggcctgtctcatggactgaaaaaggcgggtatgtattatatccagtcaactcttaatcttccaaaatgcttgaataagttgtattaatattcatgctatatgtaaaaggtgtatctgatgcaaagtgggcgattgagtatgaagagccagctgggcaggcttttaaacaaaaccatcctgagtcaacagtttttgttgacaactgcaatgtgattcttaggtaaatagccaacaagttatcgcttactcttttagtgtggctattttttgcattgtgatcagttgttgtgattaattgcagggctataatggagaaaggtggagatcaagatgattgtgtctctactacagaggcaaatgaattagcagctaaactaactgaggagcagaagagtactctgccactgcctggtcaagtggacttcatcaatggtggacctccatgtcaggtatatatttcagattgtggctatacttgtgtaaatttttcgttgaataagtgaaaagcccttaacctgtgcaatttggcagggattttctggtatgaacaggttcaaccaaagctcttggagtaaagttcagtgtgaaatgatattagcattcttgtcctttgctgactatttccggccaaggtattttcttctggagaacgtgaggacctttgtgtcattcaataaagggcagacatttcagcttactttggcttcccttctcgaaatgggttaccaggtaaagtcctaacgcttttgttaaattgatttctctttagtagaagttggcatgctctgtgaagaatggtttgcgaagtacaaaaattgacttaaatctcttaaatatgatgtttctatgatgtttcccaggtgagatttggaatcctggaggccggtgcatatggagtatcccaatctcgtaaacgagctttcatttgggctgctgcaccagaagaagttctccctgaatggcctgagccgatgcatgtctttggtgttccaaagttgaaaatctcactatctcaaggtttacattatgctgctgttcgtagtactgcacttggtgcccctttccgtccaatcaccgtgagagacacaattggtgatcttccatcagtagaaaacggagactctaggacaaacaaagaggtatgataacacatctggagaaaatatctatacatacatatttgctaaacacaaatgacgtgaacccattaatttattaatttatgtgggggaaattcttgtttcttgcagtataaagaggttgcagtctcgtggttccaaaaggagataagaggaaacacgattgctctcactgatcatatctgcaaggctatgaatgagcttaacctcattcgatgcaaattaatcccaactaggcctggggctgattggcatgacttgccaaagagaaaggtcagtcttatacatcctacctcaggaatacctttgtcaggttgactacggtcaaaagaattgcttttgaaactagaaatcaacccaaatcgctttgttttaatatcacaggttacgttatctgatgggcgcgtagaagaaatgattcctttttgtctcccaaacacagctgagcgccacaacggttggaagggactatatgggagattagattggcaaggaaactttccgacttccgtcacggatcctcagcccatgggtaaggttggaatgtgctttcatcctgaacagcacagaatccttacagtccgtgaatgcgcccgatctcaggtaagaaaaactcttctgttcccagtcagtcctatagcatcagttacagacttagagattgcaaagcactgaatggttttgggagatagagtagtaatgttagctttatcgatatggccttttaagcgaaattgttgttaatgaaaactgcaggggtttccggatagctacgagtttgcagggaacataaatcacaagcacaggcagattgggaatgcagtccctccaccattggcatttgctctaggtcgtaagctcaaagaagccctacatctcaagaagtctcctcaacaccaaccctagataaccacccaaatttggcatttcctttttcaataatattagtcattatgatccttgtcttgaatgaaactcattggtgctgatacttttgataaagaaagcctacgaagagtttttgtatattccgtattcggattgaaaaatctcattatacaagcaagcaatgatgtctatagactatga

SEQ ID NO: 53 - DNA, 9048 bp, Arabidopsis thaliana
  source 1..9048: mol_type = genomic DNA
ttactgggacatttttaagtctagtttattctactacatgtttttcaaaacaaatactcattttgttttaatttaattatcattttagcacttaaatttaatctcacaataattatcgtttttagttttttaatgcaaatgtttaataaaaatgtgagtattaatgtcttgaccaataatttttttagaaactatattgaacaagggtaaagtagaaaatttaattgtttttttttattttcactgcaaaaaatcttaaacgacaaataattttaaacaaaactattttaataactaaccactaaactaactatataactgttttacaaacgaaagcgtgaacttcacgtaaacaaaaattcaatttcacgccgccgacaaaaaaccttaaacgacaactaattttaaatagaaggagtatattttagtaataattatatgttaaactgttttaataaataaccactaaactaactatgtaactgttttacaaacgaaagcgtgaacttcacgtaaacaagaatctaatttcacgtcgccgacaagaaaaactgatttcacttatatatcttgatttattaatggacattcacatactctcaaataagattctagatcttataaattttaatctatttttgtctcaattaatttagttatttatcacatttcgcctcttataaaattatatgataattgtctaagcagctaactaattgtaattgtttttcaaacaaaaaatatattttaattacacataatttttttatcgaacaaaaatatattttaacgaaatataaatgtttcgaatcaaagataacaaatttatagcctcaactatacgtaaaacaaaattttattttacatatcatactttgattgatactaacacaaacttcacaaataaattcgtataattatgtaattttagattatttagagattataactagtatttagaaaaatcgcaaaatcatataagaaaagaaatggaatttgtttttggttcaaattatatttttttttcccgctattcatattatagttatgaaccaaaaatcaagctagaaataaaaaccactaggattttttttttttgctaagatgaaaatttagttatacacttatttttatttatttaaatattacattaaactaataaaaagtattaattattctaataactttttgtcagttttaaaattaggccaaaagtaaaaaactaatacagctaatataatatacttaaggaaggatatttcaactttttcttttcttcccagtttcagagtttatacaaataaggtaaaattcgcagaaacagaaaatcataaagtaattaaaataatacaaccgaggaagtaaaaagatttccaaaaggtaaaaggtgtactcgtaaagtaggtaaatagaggtacaggtcaaggggtagtttcggtatttacactctttcttcttcttttttttttttttttggtgtctcacattccaaagtccccattggacttagagaagagtttttttttcgttttctctgctttctcactttttcccgtttcctttgggaatacaaacggcggcttctcaaaagcctccgatttcgatttttttttcctctctttttttttgttctttctttagagtctcttcttcaacttcttctccggcatcttccgtcggagctaaggatcagaagtttttgtctgtgcactgtttcaattggatcattacatagtgaggattctctgttcgacgaaacgagtaagtaactacattgttgttcttcctcaattctcttctggtttttctttcgtttttttttttaaaacctttttcggtaattttctttttatctctttgaaacaatttgagttctttttttttttgattgatcactgtgtctgattccttatcacggttcttttgtttaaatttgatcgatcgttgtctttgaactccgattttgtttctatgaactttgtttactttggatgattgtgaaaagttaagtactttggtttatgcatgttcttatgagaaatcgatttctttcgtttagagatcatcttaaggcggcgaatgtttttgcactaagggtttgtgtgagtcctttagaagaacatttggaaaatttgtccttttttttttttggtcagtgaatttttttttttttaatccatgaatagtgtatgttcaaagattgaacctttttgtgtgtatgttctgcagttttttttctttcttctttttctgaacatgtattctcttatttttttgggttcatgctagattctattagtaaattcaatttcgaatctataacttgtttttgataggccagtcacagaggaagattgtggtaacacttttgtcccttaacaaaagtgtctgtttctctttggtcaattttttgatcagagagagtttgctttggtttttgtgttctggtcaatgaaatgctaaagattggtttttgtttcatattctgctgcacattagatttgatgatagagggtacagatagaaactgatcttttcgacgatttatccgtgagttttagctctgttttatgttacagaagtaagtgttaattttcaataatgtgtgttcaaagtttgaactattttgtgtgttcgtcaaatatttttgagctagaatcttcttccctgaacatgttctctcttttctttggatatatgctagattctaagtggccactcacagagatagtttgtgaagttgtctgtttctcagtggttagtattggtcagagcgagttttttggttttgtctgtctaaatgctaaatattggttttgtttcatattctgcacattggaattggtcactaaaacttgcttataaaaactgatgtttttacttacgtatctaaattttccttactgatggttttttttcttgtaggaaactcttcaacatggaagacgattgtgaggagcttcaggttcccgtgggaactctaacctcgataggttttagcatttcaaacaacaatgatcgagtaagtgttgtccttatttattcttcttgatttgtttatgagtagatggagcaaatatttaatgtaatggtactttattataggataaaatgtctgtgctagaggttgaagcaccgaatcaggtgactgattctcggctaggattaccgaatccggattctgtctgcagaacctgtggcagcaaagatcgaaaagtttgcgaaggtatcataaagaatctggttttggcaaatattgttccaatcttttagctcattttatgattagttccctgagtttgctacttttctctctgttttagggcatttcggggttataaacttcgcgtactcgataataaacccgtatttcctcaaggaggtagctgcgttgttaaacaaaatctgtccggggtgtaaatacattcgaaaaaagcagtttcaggttcactagtctttccaaatcctttgttggtttgtgtgttttggaactacatatactaatgtcatttttgcttgatatagattaccgaagaccagcctgagagatgtagatactgcactgtaagaatatatgattgcaactaattttctcagtttaaaactttgttccaacactaattttcggtttttgttgttgttatatatcagttgaataccggttatcctctaatgaagtttagggtaactactaaagaagtcttcaggcgatccggaatcgttgttgaagtaaacgaagagagtctgatgaaactcaagaaacggggagtgttaacattgcctcctgactattggagttttttgccgcaagactctaatatcgacgagagctgtttgaaaccaacaaggcgaataataacgcatgcacaggtatagaagagtgaaatgtaccatctccatgacttcttactatatatagttttctgaaaatttcacctttttgcaggtttatgctctgttattagggattgatcagaggctcatcaagaaggatatccctatgttcaactctcttggtctgacatcttttcctgttacaccaaatggttaccgtgtaaccgaaatagttcatcagttcaacggagctcggctaatatttgtaagctaaaaacgcttgtttatataatttgttatcatatactatggtatttctcttatcttttcgagtttctgtcacatttttgaaggatgaacggactcggatctacaagaaactagtcggctttgagggaaacacacttgaattgagttctcgtgtgatggaatgcatgcaatattccagagtaagttagtggttcctgatagatttaaactcttctttctgttctgtgaaggttagtagtatttcttgttttttgcacagctcttttcggaaactgtgtcttcgagtaaagattccgcaaatccgtaccagaagaagtctgatacaccaaaactttgcggtctaaggttcatgaaagacgtgctgctcggtaaaagaagtgatcatacattccggacagtagttgttggtgatccgtccttgaagctcaacgagattggcatacccgagagtatcgcaaaaaggcttcaagtatcagagcatctcaaccagtgcaataaagaaaggcttgtcacttcctttgtccccacactgttggacaataaagagatgcatgtgagaagaggagatagattggtggctattcaagtcaatgacctccaaaccggagacaaaatattccggagtttaatggatggagacactgtgctgatgaacagaccgccttcgattcatcagcattcgcttattgcaatgacagttagaatcctcccaacgacttctgttgtctccttgaacccgatctgctgtttgccgttccgtggtgattttgatggagattgtctccacggttacgttcctcagtccattcaagcaaaggtcgagcttgatgagcttgttgctttggataagcagcttatcaacagacagaatggtcggaacttgctttctttaggacaagatagcttgacggcggcttatctggtcaatgttgagaagaactgttatcttaatcgagctcagatgcagcagcttcaaatgtattgcccatttcagcttcctccgcctgcaattatcaaagcttctccttcgagcactgagcctcaatggacgggaatgcagctattcggaatgctgtttcctcccgggtttgactacacttatcctctgaataatgtagttgtgagtaacggcgagcttttgtctttctctgaaggatctgcttggctcagagatggagaagggaatttcatcgagagattgctcaaacacgacaaagggaaagttcttgatatcatctattccgctcaagaaatgctatctcagtggttgctgatgcgcggtttgagtgtgtccttggcggatttgtacctttcctctgatctgcagtctcgaaaaaacttgactgaagagatatcatacgggttgcgggaagctgagcaagtttgcaacaagcaacagctaatggttgaatcttggagagatttccttgcagttaatggggaggataaggaagaggattcagtatcggatttggcccgattctgctatgagagacaaaaatccgctacattaagcgaacttgcagtcagtgcttttaaggatgcttacagagatgttcaggcactagcatataggtatggtgatcaatccaactcttttttgatcatgtcgaaagccggcagcaaagggaatatcgggaagctggttcagcacagcatgtgtatcggtctgcagaattcagcagtttctttgtcctttgggtttccgcgtgaactgacttgcgctgcttggaatgacccgaacagtccacttcgtggcgcaaagggaaaagacagtaccactactgagtcatatgttccttatggagtcattgagaactcgtttctaacgggtctgaatccattggaatcttttgttcattcagttacaagtcgtgacagttcattcagtggtaatgctgatctcccggggacactgagcagaagattaatgttcttcatgcgggacatatacgctgcttatgatggcactgtgagaaattctttcggaaaccagttagtccagtttacttatgagactgatggtcccgttgaagatatcacaggtgaggcacttggctcactttctgcttgtgcattatctgaggcagcttacagcgcgctggaccagccaatcagccttcttgaaacttcgccgcttctgaatcttaaggtcttcctcttcttattcttcgcttcttgatttattgaatcatttccacttaagtcgtttgcatttctctaactagattttatctctttctacagaatgtattggagtgtggatcaaagaaaggtcaacgagaacagacaatgtctttgtatttgtctgaatacctttcaaagaaaaagcacgggttcgaatacgggtcacttgagatcaagaaccacttggagaaacttagtttctcagagatcgtttcaacatctatgataatgttggtaacttttaactgtctatatgaatctttttggttaagggcttctcttaacaaatgtttattgtcttcttggttcatagattctctccaagttctaacacgaaagtaccgttaagcccgtgggtttgccattttcatatctctgaggtataaactcatacccatataaagccacaaacatatatatatatgtgtacagattctaatgaacctcttctttaatttcacagaaagtactgaagcggaaacaactgagcgcagaatccgttgtttcatctttaaacgagcagtacaagagcaggaacagagaactgaagcttgatatagttgacttagatatacaaaacacgtaagaacattcttgaatttgtagcagacatgttttgtttcgcttttatgtctattagaaactgatttgttatacatttatgtgttgtggattagaaaccactgctcttcagacgatcaggcaatgaaggatgataacgtttgcatcacggtgactgtagttgaagcctcaaagcactcggttttggaactggatgctattcgtctcgttttgatcccttttcttcttgactctcctgtcaaaggtaaaaccggatgaaaaataaagacgagcaagctgaacagatcgttgttttgttattatcgttcttatgagttctatcatctgtttttgcaggtgatcaagggatcaaaaaggtgaatattttgtggactgaccgaccaaaagcgccaaaaaggaatgggaatcatttggcgggtgagctgtacttgaaggttacaatgtatggagatcggggcaaaagaaactgttggaccgctcttttagaaacctgccttcccatcatggatatgattgactggggccgaagccatcctgataatatccgacaatgctgctcagtttatggaatagatgctggacgcagcattttcgtagcagtcagtatcggtttctttaacattttcttggtctctctcgcagcttctaaagtttgaagttttttttttgtgaccgcagaatttggagtccgcggtgtcagatactggtaaggagatactaagagagcatctgcttctcgtagctgatagtctctctgttacgggagagtttgtggcattaaacgccaaaggttggagtaaacaaagacaggtcgagtccacgcctgcaccttttactcaagcatgcttctcagtatgtaacaaaatcccatttcttttggttatacaaagcttatataggatttcatttgatacttagtgcttgcttaatctctgcagagcccaagtcaatgctttctcaaagctgctaaggaaggtgtcagagacgatcttcaagggtctatcgacgctttagcttggggaaaagttcctggtttcggaactggagatcagttcgaaatcatcatttcgccaaaggtaaattaactttacatcttttgatccgtttagaccacataacttcagtggtctaatttgtgtctttatgcatgccatcaggttcacgggtttactacaccggtagatgtgtatgaccttttgagtagtacaaagacgatgcgtagaacaaactctgcgcctaaatcagacaaagccacggtccagccttttggcttgctacattccgcattcctgaaagatatcaaggtactcgatgggaaagggattcctatgtcactgcttagaacgatctttacatggaaaaacatcgagttgctttcccagtcattgaaacgcattctccacaggtaagattctactgttcaaaaaaccgtaaagattctttcttccttttggctgatgcaaattacaatggcttaatctttgttagttacgagatcaatgaactgttgaatgagagggacgaaggacttgtgaagatggttctgcagttgcaccccaacagtgttgagaaaattggaccaggcgtcaaaggaatccgggtaaatcaaggctcatatgtttcagaatccttaaagacataaagatcctgaccatgtttcttttataggtcgctaaatcgaagcacggagattcttgttgcttcgaggttgtaagaatagacgggacattcgaagacttctcataccacaagtgtgtcttgggagcaacaaagataattgccccaaagaaaatgaacttctacaagtcaaagtatcttaaaaatggtacactcgagtccggtggtttctccgaaaacccgtgaacagccaagtaagagtaaaaaaaaagactggctcttctgcggtataatatcgaacaatgtatgaagttgtgtgtaattttgtttaaaaagtgattagatagatataggggaaaagccttttggctttgctctaagcttctttttgctcctttcactatgtaataccttttgccttccacctaaaggcttaaaggttaattacttagtggaagcagcaacgagaagctggcaaaggaggcttctgttctgtttctgtttctgtatgtaaaccatgcaaattccggtttgactatgaaatatccggttatgttt

SEQ ID NO: 54 - DNA, 9303 bp, Arabidopsis thaliana
  source 1..9303: mol_type = genomic DNA
tatcattttagcacttaaatttaatctcacaataattatcgtttttagttttttaatgcaaatgtttaataaaaatgtgagtattaatgtcttgaccaataatttttttagaaactatattgaacaagggtaaagtagaaaatttaattgtttttttttattttcactgcaaaaaatcttaaacgacaaataattttaaacaaaactattttaataactaaccactaaactaactatataactgttttacaaacgaaagcgtgaacttcacgtaaacaaaaattcaatttcacgccgccgacaaaaaaccttaaacgacaactaattttaaatagaaggagtatattttagtaataattatatgttaaactgttttaataaataaccactaaactaactatgtaactgttttacaaacgaaagcgtgaacttcacgtaaacaagaatctaatttcacgtcgccgacaagaaaaactgatttcacttatatatcttgatttattaatggacattcacatactctcaaataagattctagatcttataaattttaatctatttttgtctcaattaatttagttatttatcacatttcgcctcttataaaattatatgataattgtctaagcagctaactaattgtaattgtttttcaaacaaaaaatatattttaattacacataatttttttatcgaacaaaaatatattttaacgaaatataaatgtttcgaatcaaagataacaaatttatagcctcaactatacgtaaaacaaaattttattttacatatcatactttgattgatactaacacaaacttcacaaataaattcgtataattatgtaattttagattatttagagattataactagtatttagaaaaatcgcaaaatcatataagaaaagaaatggaatttgtttttggttcaaattatatttttttttcccgctattcatattatagttatgaaccaaaaatcaagctagaaataaaaaccactaggattttttttttttgctaagatgaaaatttagttatacacttatttttatttatttaaatattacattaaactaataaaaagtattaattattctaataactttttgtcagttttaaaattaggccaaaagtaaaaaactaatacagctaatataatatacttaaggaaggatatttcaactttttcttttcttcccagtttcagagtttatacaaataaggtaaaattcgcagaaacagaaaatcataaagtaattaaaataatacaaccgaggaagtaaaaagatttccaaaaggtaaaaggtgtactcgtaaagtaggtaaatagaggtacaggtcaaggggtagtttcggtatttacactctttcttcttcttttttttttttttttggtgtctcacattccaaagtccccattggacttagagaagagtttttttttcgttttctctgctttctcactttttcccgtttcctttgggaatacaaacggcggcttctcaaaagcctccgatttcgatttttttttcctctctttttttttgttctttctttagagtctcttcttcaacttcttctccggcatcttccgtcggagctaaggatcagaagtttttgtctgtgcactgtttcaattggatcattacatagtgaggattctctgttcgacgaaacgagtaagtaactacattgttgttcttcctcaattctcttctggtttttctttcgtttttttttttaaaacctttttcggtaattttctttttatctctttgaaacaatttgagttctttttttttttgattgatcactgtgtctgattccttatcacggttcttttgtttaaatttgatcgatcgttgtctttgaactccgattttgtttctatgaactttgtttactttggatgattgtgaaaagttaagtactttggtttatgcatgttcttatgagaaatcgatttctttcgtttagagatcatcttaaggcggcgaatgtttttgcactaagggtttgtgtgagtcctttagaagaacatttggaaaatttgtccttttttttttttggtcagtgaatttttttttttttaatccatgaatagtgtatgttcaaagattgaacctttttgtgtgtatgttctgcagttttttttctttcttctttttctgaacatgtattctcttatttttttgggttcatgctagattctattagtaaattcaatttcgaatctataacttgtttttgataggccagtcacagaggaagattgtggtaacacttttgtcccttaacaaaagtgtctgtttctctttggtcaattttttgatcagagagagtttgctttggtttttgtgttctggtcaatgaaatgctaaagattggtttttgtttcatattctgctgcacattagatttgatgatagagggtacagatagaaactgatcttttcgacgatttatccgtgagttttagctctgttttatgttacagaagtaagtgttaattttcaataatgtgtgttcaaagtttgaactattttgtgtgttcgtcaaatatttttgagctagaatcttcttccctgaacatgttctctcttttctttggatatatgctagattctaagtggccactcacagagatagtttgtgaagttgtctgtttctcagtggttagtattggtcagagcgagttttttggttttgtctgtctaaatgctaaatattggttttgtttcatattctgcacattggaattggtcactaaaacttgcttataaaaactgatgtttttacttacgtatctaaattttccttactgatggttttttttcttgtaggaaactcttcaacatggaagacgattgtgaggagcttcaggttcccgtgggaactctaacctcgataggttttagcatttcaaacaacaatgatcgagtaagtgttgtccttatttattcttcttgatttgtttatgagtagatggagcaaatatttaatgtaatggtactttattataggataaaatgtctgtgctagaggttgaagcaccgaatcaggtgactgattctcggctaggattaccgaatccggattctgtctgcagaacctgtggcagcaaagatcgaaaagtttgcgaaggtatcataaagaatctggttttggcaaatattgttccaatcttttagctcattttatgattagttccctgagtttgctacttttctctctgttttagggcatttcggggttataaacttcgcgtactcgataataaacccgtatttcctcaaggaggtagctgcgttgttaaacaaaatctgtccggggtgtaaatacattcgaaaaaagcagtttcaggttcactagtctttccaaatcctttgttggtttgtgtgttttggaactacatatactaatgtcatttttgcttgatatagattaccgaagaccagcctgagagatgtagatactgcactgtaagaatatatgattgcaactaattttctcagtttaaaactttgttccaacactaattttcggtttttgttgttgttatatatcagttgaataccggttatcctctaatgaagtttagggtaactactaaagaagtcttcaggcgatccggaatcgttgttgaagtaaacgaagagagtctgatgaaactcaagaaacggggagtgttaacattgcctcctgactattggagttttttgccgcaagactctaatatcgacgagagctgtttgaaaccaacaaggcgaataataacgcatgcacaggtatagaagagtgaaatgtaccatctccatgacttcttactatatatagttttctgaaaatttcacctttttgcaggtttatgctctgttattagggattgatcagaggctcatcaagaaggatatccctatgttcaactctcttggtctgacatcttttcctgttacaccaaatggttaccgtgtaaccgaaatagttcatcagttcaacggagctcggctaatatttgtaagctaaaaacgcttgtttatataatttgttatcatatactatggtatttctcttatcttttcgagtttctgtcacatttttgaaggatgaacggactcggatctacaagaaactagtcggctttgagggaaacacacttgaattgagttctcgtgtgatggaatgcatgcaatattccagagtaagttagtggttcctgatagatttaaactcttctttctgttctgtgaaggttagtagtatttcttgttttttgcacagctcttttcggaaactgtgtcttcgagtaaagattccgcaaatccgtaccagaagaagtctgatacaccaaaactttgcggtctaaggttcatgaaagacgtgctgctcggtaaaagaagtgatcatacattccggacagtagttgttggtgatccgtccttgaagctcaacgagattggcatacccgagagtatcgcaaaaaggcttcaagtatcagagcatctcaaccagtgcaataaagaaaggcttgtcacttcctttgtccccacactgttggacaataaagagatgcatgtgagaagaggagatagattggtggctattcaagtcaatgacctccaaaccggagacaaaatattccggagtttaatggatggagacactgtgctgatgaacagaccgccttcgattcatcagcattcgcttattgcaatgacagttagaatcctcccaacgacttctgttgtctccttgaacccgatctgctgtttgccgttccgtggtgattttgatggagattgtctccacggttacgttcctcagtccattcaagcaaaggtcgagcttgatgagcttgttgctttggataagcagcttatcaacagacagaatggtcggaacttgctttctttaggacaagatagcttgacggcggcttatctggtcaatgttgagaagaactgttatcttaatcgagctcagatgcagcagcttcaaatgtattgcccatttcagcttcctccgcctgcaattatcaaagcttctccttcgagcactgagcctcaatggacgggaatgcagctattcggaatgctgtttcctcccgggtttgactacacttatcctctgaataatgtagttgtgagtaacggcgagcttttgtctttctctgaaggatctgcttggctcagagatggagaagggaatttcatcgagagattgctcaaacacgacaaagggaaagttcttgatatcatctattccgctcaagaaatgctatctcagtggttgctgatgcgcggtttgagtgtgtccttggcggatttgtacctttcctctgatctgcagtctcgaaaaaacttgactgaagagatatcatacgggttgcgggaagctgagcaagtttgcaacaagcaacagctaatggttgaatcttggagagatttccttgcagttaatggggaggataaggaagaggattcagtatcggatttggcccgattctgctatgagagacaaaaatccgctacattaagcgaacttgcagtcagtgcttttaaggatgcttacagagatgttcaggcactagcatataggtatggtgatcaatccaactcttttttgatcatgtcgaaagccggcagcaaagggaatatcgggaagctggttcagcacagcatgtgtatcggtctgcagaattcagcagtttctttgtcctttgggtttccgcgtgaactgacttgcgctgcttggaatgacccgaacagtccacttcgtggcgcaaagggaaaagacagtaccactactgagtcatatgttccttatggagtcattgagaactcgtttctaacgggtctgaatccattggaatcttttgttcattcagttacaagtcgtgacagttcattcagtggtaatgctgatctcccggggacactgagcagaagattaatgttcttcatgcgggacatatacgctgcttatgatggcactgtgagaaattctttcggaaaccagttagtccagtttacttatgagactgatggtcccgttgaagatatcacaggtgaggcacttggctcactttctgcttgtgcattatctgaggcagcttacagcgcgctggaccagccaatcagccttcttgaaacttcgccgcttctgaatcttaaggtcttcctcttcttattcttcgcttcttgatttattgaatcatttccacttaagtcgtttgcatttctctaactagattttatctctttctacagaatgtattggagtgtggatcaaagaaaggtcaacgagaacagacaatgtctttgtatttgtctgaatacctttcaaagaaaaagcacgggttcgaatacgggtcacttgagatcaagaaccacttggagaaacttagtttctcagagatcgtttcaacatctatgataatgttggtaacttttaactgtctatatgaatctttttggttaagggcttctcttaacaaatgtttattgtcttcttggttcatagattctctccaagttctaacacgaaagtaccgttaagcccgtgggtttgccattttcatatctctgaggtataaactcatacccatataaagccacaaacatatatatatatgtgtacagattctaatgaacctcttctttaatttcacagaaagtactgaagcggaaacaactgagcgcagaatccgttgtttcatctttaaacgagcagtacaagagcaggaacagagaactgaagcttgatatagttgacttagatatacaaaacacgtaagaacattcttgaatttgtagcagacatgttttgtttcgcttttatgtctattagaaactgatttgttatacatttatgtgttgtggattagaaaccactgctcttcagacgatcaggcaatgaaggatgataacgtttgcatcacggtgactgtagttgaagcctcaaagcactcggttttggaactggatgctattcgtctcgttttgatcccttttcttcttgactctcctgtcaaaggtaaaaccggatgaaaaataaagacgagcaagctgaacagatcgttgttttgttattatcgttcttatgagttctatcatctgtttttgcaggtgatcaagggatcaaaaaggtgaatattttgtggactgaccgaccaaaagcgccaaaaaggaatgggaatcatttggcgggtgagctgtacttgaaggttacaatgtatggagatcggggcaaaagaaactgttggaccgctcttttagaaacctgccttcccatcatggatatgattgactggggccgaagccatcctgataatatccgacaatgctgctcagtttatggaatagatgctggacgcagcattttcgtagcagtcagtatcggtttctttaacattttcttggtctctctcgcagcttctaaagtttgaagttttttttttgtgaccgcagaatttggagtccgcggtgtcagatactggtaaggagatactaagagagcatctgcttctcgtagctgatagtctctctgttacgggagagtttgtggcattaaacgccaaaggttggagtaaacaaagacaggtcgagtccacgcctgcaccttttactcaagcatgcttctcagtatgtaacaaaatcccatttcttttggttatacaaagcttatataggatttcatttgatacttagtgcttgcttaatctctgcagagcccaagtcaatgctttctcaaagctgctaaggaaggtgtcagagacgatcttcaagggtctatcgacgctttagcttggggaaaagttcctggtttcggaactggagatcagttcgaaatcatcatttcgccaaaggtaaattaactttacatcttttgatccgtttagaccacataacttcagtggtctaatttgtgtctttatgcatgccatcaggttcacgggtttactacaccggtagatgtgtatgaccttttgagtagtacaaagacgatgcgtagaacaaactctgcgcctaaatcagacaaagccacggtccagccttttggcttgctacattccgcattcctgaaagatatcaaggtactcgatgggaaagggattcctatgtcactgcttagaacgatctttacatggaaaaacatcgagttgctttcccagtcattgaaacgcattctccacaggtaagattctactgttcaaaaaaccgtaaagattctttcttccttttggctgatgcaaattacaatggcttaatctttgttagttacgagatcaatgaactgttgaatgagagggacgaaggacttgtgaagatggttctgcagttgcaccccaacagtgttgagaaaattggaccaggcgtcaaaggaatccgggtaaatcaaggctcatatgtttcagaatccttaaagacataaagatcctgaccatgtttcttttataggtcgctaaatcgaagcacggagattcttgttgcttcgaggttgtaagaatagacgggacattcgaagacttctcataccacaagtgtgtcttgggagcaacaaagataattgccccaaagaaaatgaacttctacaagtcaaagtatcttaaaaatggtacactcgagtccggtggtttctccgaaaacccgtgaacagccaagtaagagtaaaaaaaaagactggctcttctgcggtataatatcgaacaatgtatgaagttgtgtgtaattttgtttaaaaagtgattagatagatataggggaaaagccttttggctttgctctaagcttctttttgctcctttcactatgtaataccttttgccttccacctaaaggcttaaaggttaattacttagtggaagcagcaacgagaagctggcaaaggaggcttctgttctgtttctgtttctgtatgtaaaccatgcaaattccggtttgactatgaaatatccggttatgtttctgttctttaccttgtttatatccgtcttcatgcaattgcaaatgatccttattacatcttcggttttccttatgagaagtgaaacttagttctcttggttatgctctgttttttcctggtttagatcggttctcaatagcatacagtttgttctttctcttaaccggtttagattagttttcttgcaatttgcttatgattcttataagtaaccaaagcctttaagtaatactaatctaaatatctccacatattatcttcaaatgtattgatcagagaaaatccccaacactatcatcacccctcaagaaaatacaggaaacattttcga

SEQ ID NO: 55 - DNA, 10590 bp, Arabidopsis thaliana
  source 1..10590: mol_type = genomic DNA
tgtgatggagtagagaaagcagatagtctttatcagtagttgtatgagtcatacaatagtacccgaacccacttatccaaagatcaatgtcgaaagtggaaaccaaatccctctaaagtaaattgaatagccagtctaaaagttagaccaaatctgaaagtcggtttaattgcaattataccttctaaatgcaagaaccaatatcaaccggtacttcatattcttttgatttttgatttgtacatataaacttttttttgtacatataaacttaaatgcaagtatagcttgacttgtattttacacatcagcggaaaagtttgagagaggaagcatattgtatttcgtttggttacaacttttgctaacttttacaataaatggaatgaaatttttttccacttaattcctcctgaatagaaagaaattgatgcaattttgttccctttttaaatccatgagccaataagtgcatctccaattatattccaaatttcactctaaatactaatttagaaaaaatccttttaataccactatattctcaactctaaaagggagtgatgaatatggtatgatatcatctgtcacttcattttggagttaccctttactttttatttacaaaatattttcctaaatttatactcatgttcttcatttatgtgtaaacaaaattatataaatgaagaaaaagagttattgttaaccttctccatgttttcattataaattgatatgagcattggttaccgttctttcggataaaaacgaagtttatctcttgaaaacattgttcctttcatattcatatcgcatcaatatataattgaaaagttcatttatggtgatcgatcaaatatataacaaaataaaatgaaaaaatactttaacattttatatataatttttgaagacaaaagagctgtttttttgtctttaattgattggtcaactgtttacatattcatttttttggtatgaactatttacaaattcatgaatacaaaaaatatctcaaatttttttttacaagtcgatccacttagttcttaccgtttttttggtataaccattattttataaaacatcgttcccgctagatttttatcgcatcaaacatagcgtactacaaacggaaacggtcatctatggcgatcgatcaaatatacaacaccaaaatcgaatccaaaaaatagtttacttgaagtatttatatgttttgcttcactgctaattctatggttttgaaatcctttattcttctcaaaaaaaaaaaaagtttgtcaatggttgttgacatggtcttgcataatatgtggataaatatttgttttaatcattttcatcatcattgcatattcccaagtgttatcaattgtttgacaaataaagaaaaattaaaattgatacctttttattttagttaattaataacgaaactgaaaatatttctccctttgcatgcaatgtgggttttaaagacggaagctgaagagtgaagaagaacaaaagatttttgagagagaaaagtagagtcactccaaaattgttctctcgcaatcttctttctcggtttcctcttttaagaaaaagtccgccattttcactctcactcagatttcttccctcttctcacctgcaaaaacccttgtttcccgctgtttcgtttcttctccggttgaggaaccaaaacgggtcaaatacgcagctgaatcatcgaattcttaggtattttcgtcttacccaactcttatctttagatgtttttccgggaaaagagctcgatcatgactccgccgtgtttttttttgggggggggggggtttctccgaaatgggtttcaaatgtaggttactctaggtttgaaagttcggattttttggttcactgtgtgttactacagcttcgattttgtgtaaacgagtataaaaattgtatcttttacagatttgagaacttgttcttcaaagacttgatttttctttgtatcaagttagtgagctcaaatgtctttgtttctctgtttgtttacatctgataagagctaactcggtctcgctggtgtgtgattttcgctcgttagggttttttcatggaggaagaatctacatcagagattcttgacggagagattgttggaatcacatttgctcttgctagtcaccatgaaatagtaagttataagagttatactctctggaattgatccatcttgttctgcatcaatgtttatcatgggttttacataactgaaggatttcgaatagctaaaacctctatgttttggttatctttggcactaaattcactataattgtactcaagctctgtgtgatgctaagtgctacacttttgcatataaatgttgttctgcgatatatcctctgtcactattccatttctcactggactgtaattctttcttgcagtgtattcaatcgattagtgaatccgcaattaatcatcccagtcaactcactaacgcattcttggggttacctcttgaatttggtaaatgtgaatcttgcggtgcgacagaaccagataaatgtgaaggtaatccagttccgtagttgctatatttttgttcttacatcatttgttggaatacttcttcagatatcggtatttgtttctacattttcaggtcattttggttatattcagcttccagtgccaatataccatcctgctcatgttaatgagttgaaacaaatgctgagccttctgtgcttgaaatgtctgaagataaagaaggcaaaggtattacctcattgagttttcttaaattccatgtgatccacacataaataaaccatataaaatctcgactaatctttttcacctttctgagtacagggcacaagtggtggtctggcggatcgcttgttgggtgtctgttgtgaggtgagtaatggcatatacattctgattgtttccttttaagttttacctgaaagcaagttgatagatgtttcttatgtgaacctggttcagcatttagttagtttttctaagttttccttcaactagttgcatgttagaaaacttgctaattcaaatctaaatagtatttgtgcttcttttgatccattcagtgaaagtaacattaatcaatgcttgtgaagcagtagctattggtattttcgtggcatcatgaaacattcactgctttatgttattttggatgttattattgctgaacgtcttggatttttaactactatattactttattaggaagcttcgcaaatctcaatcaaagatagagcatcagatggtgcctcatatctagaactgaagctcccatctaggtcaagactgcagcctggttgctggaatttcctggaaagatatggttatcgctatggaagcgattacacgcgtcccctgctggcaagagaggtttttactttcttctgtgtgtttatgtttctgtttatgtaggattttatggtgacgttctttttgttcatttggaatcattctctatctttaagatcttttctttctggaaactgatgattatgtactttccgtgtccttttccatatggtgggaaaacaaataggttaaggaaattctaagacggatccccgaagaatcaagaaagaaactcacggcaaagggacatattcctcaagaaggatacatactagagtatcttcctgtcccgcctaactgtttgtcagtgccagaggcttctgatggtttcagcaccatgtcagtggtaagttgaaactaaattactatgttgagttgaatgctttggcttgtgttgtaacccctggatttgtgtcattcttattttcaggatccttccagaattgagctaaaggacgttctgaagaaagtcatagccataaaaagctctaggtctggcgagacaaactttgagtcgcataaggctgaagccagtgagatgtttagagtggtggatacctatctccaggtgaggggtactgcaaaagcggcaagaaacattgatatgagatacggggtgtctaagatctcggatagttcatcttcaaaagcttggacagaaaaaatgagaacacttttcatccgtaagggttcaggtttctcttcccgtagcgtcatcactggagatgcttaccgacatgtgaatgaggtagggatcccaatagaaattgcgcagagaatcacatttgaggaaagggttagtgtccacaatagaggttatctacaaaagttggtagacgacaagttgtgtttgagttatactcaaggttctacgacctattctttaagggatggatccaaggggcacactgagcttaaacccgggcaggttgttcatcgcagggtcatggatggggatgttgtgtttatcaacagacccccgacaacacataaacattctcttcaagcgcttcgggtgtatgttcatgaagacaacaccgtgaagattaaccctctgatgtgtagccccctcagtgctgattttgatggtgattgtgtccatttgttctaccctcagtctcttagtgctaaggcagaggttatggagctcttctctgtggagaagcaactgcttagctcacatactggacagctgattttgcagatgggtagtgattctttactgtctttgagggtaatgctggagcgggtatttctggacaaggcaactgctcaacagttagctatgtatggctctctgtccctgccaccaccagcactaaggaagtccagtaaatctggcccagcttggacagttttccagattctacagcttgcctttccagaacgtctgagttgcaaaggagacagattcctggttgatggaagtgatttgctgaagtttgatttcggggttgacgcgatggggtccatcatcaatgaaattgtaacttcaatcttcctggagaagggtccaaaggagacacttggattctttgattcgctgcagcctctattgatggaaagtctgtttgctgagggatttagtctaagtttggaagacttatccatgtctagggcagacatggatgtaattcacaacctaataatccgagagatttcacctatggtgtctcgcttgagattatcatatagagatgaattgcagctagagaacagcatccacaaagtgaaggaagtggctgctaactttatgctgaagtcatattccattcggaacttgattgatatcaagagtaactcagcaatcaccaagctggtgcagcagacaggcttcttgggtcttcagctttctgacaagaagaagttttacacgaagactctggtagaggacatggctatcttttgtaagagaaagtatggcaggatttcttcatctggtgattttggaatagtgaagggctgcttctttcatgggctggatccgtatgaagagatggctcattcaattgcagctagggaggtaattgttcgctcttcaaggggattagctgagcctggaaccctctttaagaacctgatggctgttcttcgggatatcgtgattacaaacgatggaactgtaagaaacacctgtagtaactcagtcatccagttcaaatatggagttgattctgaacgtggacatcaaggtctgtttgaagctggagaacctgttggagtattggcagctactgccatgtcaaatcctgcatataaggcagtgcttgattcctctccaaatagtaattcatcatgggagctaatgaaggtatagcaatatcaaatctgccttctgaatacagctttgttcatctgtattgttgtgtaattgttttctgtatttgttcttttcccaggaagttctgctctgcaaagtcaatttccaaaacactactaatgatcggcgcgtaatcctttatttaaacgaatgccattgtggaaaaaggttttgccaggaaaatgctgcttgcacagtcaggaacaagctgaataaagttagtcttaaagatactgcagtggaattcctagtcgagtaagaattgggttttagtaacttcagtcgctctttttagtgtttgtgttattttttttttatggttttactaaacctctttgcaatctgctttctctttacttgcatgaagatatagaaagcaaccaactatatcagaaatttttggaattgattcatgcctacatggccatattcatcttaataaggtttgaatctggttcctttactgttgaatctttctggaagcctctacctgtcatagaaacactttcctattatccttttcttgctgtgtaattggtgtttttggtttactagacattgctgcaagattggaacatcagtatgcaggatatacatcaaaagtgtgaggatgtaattaactcactaggacaaaagaaaaagaagaaagctactgatgatttcaagagaacaagtttgtctgtcaggtttgtacaatgatttgcttttcctctggatgtcgtctctggttgaatgttatgcataatttgtccagaaagcaagtctgatgttgatttctagttttccagttatcttctttccatcatttttgttcttcatagcataatgtctagctttggtttctacctgattatgattgatttattctccaatgaacagtgagtgctgctctttccgagatccttgtgggagcaaaggttcggatatgccttgtttgacgttctcctacaatgccaccgatcccgatctagaacgaactcttgatgttctttgcaatacagtttacccagttctgctggaaatagtgatcaaaggtatttgaataaaacttttcatttttgtatatttcgcttgtttccctacacttcgatttcttctttgatgggggagcagtgtatctgatagagtcttcctttcaaaattttgtagttacatggcttacgaaattttgttttttgccagaagtttaatgaaccaaaatattttctcaactagtctgattgaattttcctccaagttgtgatcgatattctgtgctactataaaagaaagcctatgttttagtaagatttctagatacatgtttttgatgatactcctgtatctaaactgagcaggtgattcacggatttgctcagcaaatataatctggaatagttcagacatgacaacgtggatccggaatcgtcatgcatcccgccgaggggaatgggttttggatgtcactgttgaaaaatctgctgtcaagcaaagtggtgatgcatggagggttgtgatagactcatgtctttcagtgcttcatctaatagacacaaaacggtcaatcccttattctgtaaaacaagtgcaagaattgcttgggttatcctgtgcttttgagcaagcagtacaggtacttactaacttaaaacgtgatccgttcctggatcttacacttaagtcatgatacttcttacatatttcatgtttggtatcacatttgctcattgtttgtgtaaggattttaaacgtaagatgttgatttgatttgcagcgtctatcagcttcagtgagaatggtctccaagggagttttgaaagaacacatcattctcctagcaaacaacatgacttgttcagggactatgttgggtttcaattctggaggttacaaagctttgacccgatccttaaacatcaaggctccattcacagaagcaactctgattgttagtagttcaatcctttagtctaatacaaattattttcttagactatatactggccgtcatgttaacaggaattactttttgtgcctttaggcaccaagaaaatgttttgagaaagcggctgagaaatgtcatacagattcactatcaacagtcgttgggtcttgttcttggggaaaacgcgtggatgttggtacaggctcacagtttgagctcctatggaaccaaaaagaggtagacattctcactggaaatcataccaattgactgaggttttctcatataagtttgttatgtaattttatgtcatttgttgtcaacctatttgcagactggtctagatgataaagaagaaacagatgtgtacagcttccttcaaatggtcatatccacgacaaacgcagatgcatttgtttcttcccctggttttgatgttacagaggaagaaatggctgaatgggctgaatcgcccgagcgagactctgctcttggagagcccaagtttgaggacagtgccgacttccaaaatttacatgacgaaggcaagccatcaggagccaactgggagaaaagctcttcgtgggacaatggttgcagtggtggttcagagtggggagtctcaaaaagtacaggtggtgaggcaaacccggagtctaattgggaaaagactacaaatgttgagaaggaagatgcttggtctagttggaacactagaaaagatgctcaagaatcttccaagtcagattcagggggtgcttggggtataaagacaaaggatgctgatgcagatacaacaccaaactgggaaacaagtccagctccgaaggattccattgtcccagaaaataatgagccgacttctgacgtttggggacacaaatctgtttcagacaaatcgtgggacaaaaagaactggggaactgaatcagctcctgctgcatggggttctacagatgctgctgtttggggttctagtgataaaaagaactcggaaacagaatcagatgctgctgcttggggttccagggacaaaaataattctgacgttgggtcaggtgctggtgttttaggtccctggaacaagaagagctcggaaactgagtcaaatggtgctacttggggttctagtgacaaaaccaaatcaggtgctgctgcatggaattcttgggacaaaaagaacatagaaactgactcagaacctgctgcttggggttctcagggaaaaaagaattctgaaactgagtcaggtcctgctgcttggggtgcttgggacaaaaagaaatcggaaactgaaccaggtcctgctggttggggtatgggggacaaaaagaattctgaaactgaattaggccctgctgctatgggtaattgggacaaaaagaaatcggatacgaaatcaggtccagctgcttggggatctacagatgctgctgcttggggttctagtgacaaaaacaactcggaaactgaatcagatgctgctgcttggggttctaggaacaaaaagacttctgaaattgaatcaggtgctggcgcttggggttcgtggggacagccaagtcccactgcagaagacaaggataccaatgaggatgatagaaatccgtgggtttccttgaaggagaccaaaagtagagagaaggatgataaagagagaagccagtggggaaatccagccaagaaatttccatctagtggtggctggtccaatggtggtggtgcagactggaaaggaaataggaaccatactcctaggccacctagatctgaggataatttggctcccatgtttacagcaacgagacagcgcttggactcattcacctctgaggagcaagagctgctctcagatgttgagccagtcatgaggactctcaggaaaattatgcatccgtctgcgtatgcctttctagttcttacgctctgtttatacaatttccagttctatgtataattaattatgctgtttcacatgccatatacttgttatgcttcatctatctaaaactatcttctttcgatgaaggtaccctgatggagacccaatttctgatgatgacaagacgtttgtcctggagaagattttgaacttccatccccaaaaagagacaaagcttggttctggcgttgacttcatcacggtaaacaacatttctccttaacaaacttagcttctcttctaaagcttacttagccttatgcctgatgtgaaattcttggttgaacaacgatgtaggttgataagcacaccatcttctcagacagcaggtgcttctttgttgtctcaactgatggggccaaacaggacttttcataccgaaaatccctcaacaactatttgatgaagaaataccctgaccgtgctgaagaattcattgacaagtactttacgaaacctcggcctagcggaaacagagacaggaacaaccaagatgccacaccacctggggaagaacagtctcagcctccgaatcagtctataggtaatggaggtgacgactttcagacacagactcagtctcagtctccatctcagactcgggctcagtctccatctcaggctcaggctcagtctccatctcagacgcagtctcagtctcagtctcagtctcagtctcagtctcagtctcagtctcagtctcagtctcagtctcagtctcagtctcagtctcagtctcagtctcagtctccatcccagactcagactcagtctccgtctcagactcaggctcaggctcagtctccatcatctcagtctccgtcccagacgcagacataaactcttgagaaccaaagaagatttggttcgtttaggtaaaccattcagtctccactgttttgttttgatgtacataaagagtggagagaatggcggtttttatcattaaaagactctgatgtgaagtgcaaaacaatgtgtaaatgcagttctctagtttcagatcgtttgtcctaa

SEQ ID NO: 56 - DNA, 7960 bp, Arabidopsis thaliana
  source 1..7960: mol_type = genomic DNA
aatgaaccataaggtaaacttacaagaaccctataaaagcctttcaggatcaagctgtttaaaccctggtcatcagaagcaattcagctttcataagacaagtatcctaaactaataagactcagaagtcagagccactcgttgtctattttggtgcaacagctaaacttgaaccttccccaaagtcaattcatttctttagattacttacttcaaaaatcaaagtgaaaggagcaattttttaagtccacaaaccaaaaaggaactcgccttggattcgcagcgaactcgaaatcccctgcgtgaagttctgcagccaaaagccttgtaaccaaacaccaatctcatcccagaaacttgaaattcaggagctgaggagcagtgagaaacgagaatcgaagctccgagagacgttgaagccatggctgaggagataagaggttatcgtgatgaagttgcttgcatagagagaatatatgagaggagaaagagagaaagatgaagaagcaaagaaaggtagaaagaaagagacgagaaagtaggtcgatgtcatgattacgatttttcacaggaaagatcagttccaagttggttggcaccgctacagaagcatggcttcttcagactctcagagataataaaacaaaaaacagagctcaatacttacacttatataataactttttatttacttatatattatatttctataattagatcagatttaacctaataaatcaaactacccataattatgatgtcccaaatttggtaactatttgatgattatttctaaactgtaggagcaaccccaactttgtatcttagctaatttttaggtataaaagtgattaaatttaatgaaaccaataaactttagctaagataaacatctttattaagcctctccgtcactcaccaaaaaaaaaaacatctttattttattttttttggttaaacaaaaacatctttattaagatattttcttaaaactaagaaaagcatatgtgttgtgttttgagtgggtagacattgtgttgaaatagtttgttgtttcttaaaattctaatcgttcttaaccattgaagtagaaattggttaaacttcttcctaacttttcttaacttagtaaaaacaacattttaatttaaaataagcttaagatccaaaattaaaaattaattgattttaaaccattgggattgctctgagcttttttagtgaattatgtgttgttttttttctttgtgttttggtcaaaattaagttatatatgaaatttattaaaccaaacaaccaaatcgaattagatgtaaaaaccaaaatgtagatgttacaaattttggaaaaaaaaaaagatgttacaaattttatgtcatgtgaacttctaaatatatttccttttcactttaaaataaaaataaaataaaacttaaacataaaaatatagataccaaagagcaaaatttaataatattgtctactagtactagtgacgtcaatttcttcacttctctttgactgcttcgcttaaccactgaaaaagtgtgccaagggttttctacgtcgaatctctccgcattctcagcgattttccggcgacgtttactctgcactcctccgacaccgccgttttactccatcgtgccagctttaagcaatcaaggtacctattttaggtaatacgctttgattctgcttttaagcatcggagaatatgttatggagaatgattcggttctaagggaaagttgttgatttcgtgtttgtattcgcatgattgcattttcgtggttcatgattttcacagctttttaatcaatttctctgtctttgtttagggtttttgttcgtacagtgtgttttgaggtatgccagatatggacattgatgtgaaggatcttgaagagttcgaggctactactggggagatcaatctatctgagctaggagaaggttttctgcagagtttctgcaaaaaagctgcaacttctttctttgataagtatggacttataagtcatcagctcaactcctacaactacttcattgaacacgggcttcagaatgtgtttcaatcctttggtgagatgcttgtggaaccgtcttttgatgttgtaaagaagaaggataatgattggagatacgcaacggtgaagttcggagaagtcactgtggagaagcctactttcttttcggatgacaaggagcttgagtttctcccatggcatgctaggcttcagaacatgacatactctgcaaggatcaaagtcaatgtccaagttgaggtaacagaaattctttgtcgaaattaagtaaccttgtctggatttgatgaatgataaagaacacatggtataagcttatttcttgatgtttctactagactctttctgacacatatatgaagatgttgacatacactgaggttcctgtcatagatttctcaatttaacttgccatcaaataatttactaagggttaaggaacatatttgtctgaaactggtttcactctttttggctttacaagttttctgtaattggatttggttccttatttgcattcgctggatttcttacctgagcaaaatatctagtaaaagagatttattacagttacatgttcgtgtgaagtagaggtgtatttcaagcttggttgtgtttaagattgatgattttgtctgctcccaatctttagatgtttcttgtttaaaatttgaattgtgattacttttccttgtagtggtgggtattcaaacgaaataagctttagtttgtttcattttaaagtttggatgcaataaaagaaaaacatcttcagcttttttttttatttagttcttccccactgcctcactgtgctttagtttgagtgttttatgcttgtgtgcaatgactcttgtactgtcaaacttttgatgatgtttctgttttgctgtccatgtatcttattcttataaatgtagtttattgtctaactgcttcttcactctataaattgactaggtgttcaagaatactgttgttaaaagcgacaaattcaagacaggacaagacaactatgtcgagaagaagatactggatgtcaaaaagcaggacattctaattggtagcattcctgtcatggtgaaatctatcctttgcaaaacaagcgagaaagggaaagaaaactgcaaaaagggggattgtgcctttgatcagggtggatatttcgtgataaagggggctgagaaggtgagtttaactaatacatacatatatgcatattgccattcaatacgtacaataactttattttctatgccaaaacggattttgtttgtcagcaatccataaaacggattatagttacaattttctatcatcagataatagtgtttatcagcaaaaagatgttacaaattagacaataacctatttggttcattttattttcctaatggagatgaagtaagaaattaagaaacttaacttatttatgactttgtatacttcgttagcatcaaagatataaactttttctttcctttctggcttgaccatgaggccatgagtattcaaatcttacaggaagcgttctttgcaatcttaggctctgggacagatgatttgactctaatatattctggaaaaaatattttcaagttgttatacttctccctaacgttattatattgttttgcaggtgtttatagctcaagaacagatgtgcacaaagagactgtggatttctaattcaccatggacagtctccttcaggtccgaaaataaaagaaatagattcattgtgcgcctctcggagaatgagaaagcagaagactataagagaagggagaaagtactgacagtgtacttcttgtcgactgagattccagtctggctcctcttctttgcgctaggtgtttcgtcagacaaagaagccatggatctaattgcttttgatggtgatgatgcaagcattaccaacagtctcatagcttctatccatgtagctgatgcagtttgtgaagcttttcgctgtgggaacaatgctttaacatatgttgaacagcagatcaaaagcaccaaattccctcctgctgaaagtgtggatgagtgcctccatctgtatttgtttccaggcctccaaagtttgaagaagaaagctcgattcctgggctatatggtgaagtgccttctgaactcgtatgcgggaaaaagaaaatgcgaaaacagggacagtttccggaataagcgaattgagctcgctggagaactattggagagggagataagggtgcatctggcacatgctagaagaaagatgaccagggccatgcagaaacacctctcaggcgatggtgatttgaagcctattgagcattatttggatgcttctgttatcacaaatgggcttagtagagccttctctactggagcatggtctcatcctttcaggaagatggaaagggtttcaggtgttgtggctaatttgggtcgtgcaaatccattgcagactctgattgatctgaggagaacgcgacagcaagtcttatataccggcaaggttggagatgctagatatccgtaagtgaattccacctcctctggtatatttaaatatatctcacgtattttaacttactggtctggtctgcatttactccattttacatgtcttcagactgttttaaagatattcgtaataactttaattcaatgtagtatatgatgccgatcactgtttctgcagtctcttgtctgtgtataatacttattttgtatagatgttactgctattaaaaaactctgatactgtctttcttgtttctttctcccttggtcaatctatctgttgaactcttgagattatccattttggttccttttcaatgtgagcggttagacaattaaatcgtgttgggaaactgaactatagctgcattgtttgtaatgttggccacaggcacccctctcactggggcagagtatgctttttgtcaactccagacggtgaaaattgtggtcttgtgaagaacatgtctcttctgggacttgtgagcacccaaagtttggagtctgtggtggaaaagctcttcgcttgtggaatggaagagctgatggatgatacatgcacaccattgtttggcaaacataaagttcttctcaatggagactgggttggattatgtgcagattctgaatcctttgtcgcggagttaaaaagcaggcggcgccaaagtgaattacctcgtgaggtatcttctgtttcagcaaatctcttgctatattttgatattcttgtgttacttggtatttgctttggatttttctgcttcagatgtgtctatgtcgaatattgtttatatatatgaaacgttctctgcagatggaaatcaagcgagataaagatgacaatgaggtaagaattttcactgatgctggtagactactccgacctctcttggttgtggaaaatctccaaaagttgaagcaagaaaaaccttcacagtatccttttgaccatcttcttgaccatgggattctcgagctgatcgggattgaggaagaagaagactgtaatacagcatggggaatcaaacagcttctgaaggaaccaaagatatacacacattgcgaattggacctgtcattcttgttgggtgtgagctgtgcagttgtcccatttgcaaatcacgaccatgggagaagagttctctaccagtcccagaagcactgccaacaagccattggattctcatcaacgaaccctaacatccgctgcgatacgctgtcccagcagctgttctatcctcagaagccactgttcaagacattggcgtcggagtgtcttaaaaaagaagtgctgttcaatggccagaacgcaattgttgctgtgaatgttcatctcgggtacaaccaagaggattccattgtgatgaacaaggcttcattggaacgtggtatgttccgttcagagcagattagaagctacaaagcagaggttgatgctaaagactcagagaagaggaagaagatggatgagcttgttcagtttggaaagacacacagcaaaatcggcaaagtagacagccttgaagatgacgggtttcctttcattggtgctaacatgagtactggcgatattgtcattggcagatgcaccgagtctggggctgatcacagtataaagctcaagcacactgagagaggaattgtgcaaaaagtggtattatcatctaatgatgaagggaagaattttgctgcggtttctctgagacaggtaagttccagatcatactaaatcgagctgttttttcagagaatgcattcctatgtatgaatcgaatgttccattgattggcttttacatcttacaggttcgttctccatgccttggagataagttttccagtatgcatggccagaagggtgttttaggctacctagaggaacagcagaattttcctttcacgatccaaggcatagttcctgatattgtgataaacccgcacgctttcccttctaggcaaacaccaggtcaactcttggaggctgctctctccaaaggaatcgcttgtcctatacaaaaggagggtagctctgctgcatacaccaaattgacacgtcatgccactcctttctccactccgggtgtcactgaaatcaccgagcagcttcacaggtacattcttcacattgtctcttggttttagctcgtaaaacagaatataaaattatatgctataacagatttacatttgcttcctatacaaatagatgatatcattaagggcaggaacatattattgataatatttcctcgttgaagatgtttaaacttggagactttggctacagaatttccaaaagttgattgagctaatatactgcacaaggcactaagctagatttgagcaccttacttgaaacatgtcatagtggatctttattttgttttctaggagtactagaagtgagcatgagttatctgtctctgtaagactaaaaaactaagaagttcaatgttctatggttgattaatttcttgtattgtgcctgaaaaacgtctagagaatacagaaaaataggctcaagagtcatgtaccagtatataattagttagaggattgatgctgtgagccttgtgatctatgtataattcatttaacctttcttagattattgttgattcttgagtcctgattcattaccaatggtaaatatttgtgattagggccggcttttcaagatggggaaacgaaagggtctacaacggtagatcaggtgagatgatgcgttctatgatattcatgggcccaactttctaccagcgacttgtccacatgtcagaggacaaagtcaagttcaggaacactggaccagtccacccgctcacacgccagccagttgcagacaggaagagatttggcgggataaaatttggagaaatggagcgagactgcctaatagctcacggtgcatcagctaatctgcatgagcgtctcttcactctaagtgactcttctcagatgcacatctgcagaaaatgtaagacctatgcgaatgtgatcgagaggactccaagcagtggaagaaagattagagggccatattgtagagtctgcgtatcctcagaccatgtggttagggtctatgttccgtatggagctaagcttctgtgtcaggagctgttcagcatgggcatcactctcaacttcgacaccaagctatgctgattccccctctttattatgtaaatggcttattgccttaagaccatgttatgtgtagtttgcttcagtcccggttctggttagtagtataggttttggtttggttgattcggtaagggttatccgaaccgaagaaatcgtaaaaccgagccactgatgactgaactaacccgtaagtgttgcttttgtgagatttgactctttaaccgttaataattctcggatctaaagtaaagttttagg

SEQ ID NO: 57 - DNA, 7985 bp, Arabidopsis thaliana
  source 1..7985: mol_type = genomic DNA
tgttacatataattcaggaaatgaaccataaggtaaacttacaagaaccctataaaagcctttcaggatcaagctgtttaaaccctggtcatcagaagcaattcagctttcataagacaagtatcctaaactaataagactcagaagtcagagccactcgttgtctattttggtgcaacagctaaacttgaaccttccccaaagtcaattcatttctttagattacttacttcaaaaatcaaagtgaaaggagcaattttttaagtccacaaaccaaaaaggaactcgccttggattcgcagcgaactcgaaatcccctgcgtgaagttctgcagccaaaagccttgtaaccaaacaccaatctcatcccagaaacttgaaattcaggagctgaggagcagtgagaaacgagaatcgaagctccgagagacgttgaagccatggctgaggagataagaggttatcgtgatgaagttgcttgcatagagagaatatatgagaggagaaagagagaaagatgaagaagcaaagaaaggtagaaagaaagagacgagaaagtaggtcgatgtcatgattacgatttttcacaggaaagatcagttccaagttggttggcaccgctacagaagcatggcttcttcagactctcagagataataaaacaaaaaacagagctcaatacttacacttatataataactttttatttacttatatattatatttctataattagatcagatttaacctaataaatcaaactacccataattatgatgtcccaaatttggtaactatttgatgattatttctaaactgtaggagcaaccccaactttgtatcttagctaatttttaggtataaaagtgattaaatttaatgaaaccaataaactttagctaagataaacatctttattaagcctctccgtcactcaccaaaaaaaaaaacatctttattttattttttttggttaaacaaaaacatctttattaagatattttcttaaaactaagaaaagcatatgtgttgtgttttgagtgggtagacattgtgttgaaatagtttgttgtttcttaaaattctaatcgttcttaaccattgaagtagaaattggttaaacttcttcctaacttttcttaacttagtaaaaacaacattttaatttaaaataagcttaagatccaaaattaaaaattaattgattttaaaccattgggattgctctgagcttttttagtgaattatgtgttgttttttttctttgtgttttggtcaaaattaagttatatatgaaatttattaaaccaaacaaccaaatcgaattagatgtaaaaaccaaaatgtagatgttacaaattttggaaaaaaaaaaagatgttacaaattttatgtcatgtgaacttctaaatatatttccttttcactttaaaataaaaataaaataaaacttaaacataaaaatatagataccaaagagcaaaatttaataatattgtctactagtactagtgacgtcaatttcttcacttctctttgactgcttcgcttaaccactgaaaaagtgtgccaagggttttctacgtcgaatctctccgcattctcagcgattttccggcgacgtttactctgcactcctccgacaccgccgttttactccatcgtgccagctttaagcaatcaaggtacctattttaggtaatacgctttgattctgcttttaagcatcggagaatatgttatggagaatgattcggttctaagggaaagttgttgatttcgtgtttgtattcgcatgattgcattttcgtggttcatgattttcacagctttttaatcaatttctctgtctttgtttagggtttttgttcgtacagtgtgttttgaggtatgccagatatggacattgatgtgaaggatcttgaagagttcgaggctactactggggagatcaatctatctgagctaggagaaggttttctgcagagtttctgcaaaaaagctgcaacttctttctttgataagtatggacttataagtcatcagctcaactcctacaactacttcattgaacacgggcttcagaatgtgtttcaatcctttggtgagatgcttgtggaaccgtcttttgatgttgtaaagaagaaggataatgattggagatacgcaacggtgaagttcggagaagtcactgtggagaagcctactttcttttcggatgacaaggagcttgagtttctcccatggcatgctaggcttcagaacatgacatactctgcaaggatcaaagtcaatgtccaagttgaggtaacagaaattctttgtcgaaattaagtaaccttgtctggatttgatgaatgataaagaacacatggtataagcttatttcttgatgtttctactagactctttctgacacatatatgaagatgttgacatacactgaggttcctgtcatagatttctcaatttaacttgccatcaaataatttactaagggttaaggaacatatttgtctgaaactggtttcactctttttggctttacaagttttctgtaattggatttggttccttatttgcattcgctggatttcttacctgagcaaaatatctagtaaaagagatttattacagttacatgttcgtgtgaagtagaggtgtatttcaagcttggttgtgtttaagattgatgattttgtctgctcccaatctttagatgtttcttgtttaaaatttgaattgtgattacttttccttgtagtggtgggtattcaaacgaaataagctttagtttgtttcattttaaagtttggatgcaataaaagaaaaacatcttcagcttttttttttatttagttcttccccactgcctcactgtgctttagtttgagtgttttatgcttgtgtgcaatgactcttgtactgtcaaacttttgatgatgtttctgttttgctgtccatgtatcttattcttataaatgtagtttattgtctaactgcttcttcactctataaattgactaggtgttcaagaatactgttgttaaaagcgacaaattcaagacaggacaagacaactatgtcgagaagaagatactggatgtcaaaaagcaggacattctaattggtagcattcctgtcatggtgaaatctatcctttgcaaaacaagcgagaaagggaaagaaaactgcaaaaagggggattgtgcctttgatcagggtggatatttcgtgataaagggggctgagaaggtgagtttaactaatacatacatatatgcatattgccattcaatacgtacaataactttattttctatgccaaaacggattttgtttgtcagcaatccataaaacggattatagttacaattttctatcatcagataatagtgtttatcagcaaaaagatgttacaaattagacaataacctatttggttcattttattttcctaatggagatgaagtaagaaattaagaaacttaacttatttatgactttgtatacttcgttagcatcaaagatataaactttttctttcctttctggcttgaccatgaggccatgagtattcaaatcttacaggaagcgttctttgcaatcttaggctctgggacagatgatttgactctaatatattctggaaaaaatattttcaagttgttatacttctccctaacgttattatattgttttgcaggtgtttatagctcaagaacagatgtgcacaaagagactgtggatttctaattcaccatggacagtctccttcaggtccgaaaataaaagaaatagattcattgtgcgcctctcggagaatgagaaagcagaagactataagagaagggagaaagtactgacagtgtacttcttgtcgactgagattccagtctggctcctcttctttgcgctaggtgtttcgtcagacaaagaagccatggatctaattgcttttgatggtgatgatgcaagcattaccaacagtctcatagcttctatccatgtagctgatgcagtttgtgaagcttttcgctgtgggaacaatgctttaacatatgttgaacagcagatcaaaagcaccaaattccctcctgctgaaagtgtggatgagtgcctccatctgtatttgtttccaggcctccaaagtttgaagaagaaagctcgattcctgggctatatggtgaagtgccttctgaactcgtatgcgggaaaaagaaaatgcgaaaacagggacagtttccggaataagcgaattgagctcgctggagaactattggagagggagataagggtgcatctggcacatgctagaagaaagatgaccagggccatgcagaaacacctctcaggcgatggtgatttgaagcctattgagcattatttggatgcttctgttatcacaaatgggcttagtagagccttctctactggagcatggtctcatcctttcaggaagatggaaagggtttcaggtgttgtggctaatttgggtcgtgcaaatccattgcagactctgattgatctgaggagaacgcgacagcaagtcttatataccggcaaggttggagatgctagatatccgtaagtgaattccacctcctctggtatatttaaatatatctcacgtattttaacttactggtctggtctgcatttactccattttacatgtcttcagactgttttaaagatattcgtaataactttaattcaatgtagtatatgatgccgatcactgtttctgcagtctcttgtctgtgtataatacttattttgtatagatgttactgctattaaaaaactctgatactgtctttcttgtttctttctcccttggtcaatctatctgttgaactcttgagattatccattttggttccttttcaatgtgagcggttagacaattaaatcgtgttgggaaactgaactatagctgcattgtttgtaatgttggccacaggcacccctctcactggggcagagtatgctttttgtcaactccagacggtgaaaattgtggtcttgtgaagaacatgtctcttctgggacttgtgagcacccaaagtttggagtctgtggtggaaaagctcttcgcttgtggaatggaagagctgatggatgatacatgcacaccattgtttggcaaacataaagttcttctcaatggagactgggttggattatgtgcagattctgaatcctttgtcgcggagttaaaaagcaggcggcgccaaagtgaattacctcgtgaggtatcttctgtttcagcaaatctcttgctatattttgatattcttgtgttacttggtatttgctttggatttttctgcttcagatgtgtctatgtcgaatattgtttatatatatgaaacgttctctgcagatggaaatcaagcgagataaagatgacaatgaggtaagaattttcactgatgctggtagactactccgacctctcttggttgtggaaaatctccaaaagttgaagcaagaaaaaccttcacagtatccttttgaccatcttcttgaccatgggattctcgagctgatcgggattgaggaagaagaagactgtaatacagcatggggaatcaaacagcttctgaaggaaccaaagatatacacacattgcgaattggacctgtcattcttgttgggtgtgagctgtgcagttgtcccatttgcaaatcacgaccatgggagaagagttctctaccagtcccagaagcactgccaacaagccattggattctcatcaacgaaccctaacatccgctgcgatacgctgtcccagcagctgttctatcctcagaagccactgttcaagacattggcgtcggagtgtcttaaaaaagaagtgctgttcaatggccagaacgcaattgttgctgtgaatgttcatctcgggtacaaccaagaggattccattgtgatgaacaaggcttcattggaacgtggtatgttccgttcagagcagattagaagctacaaagcagaggttgatgctaaagactcagagaagaggaagaagatggatgagcttgttcagtttggaaagacacacagcaaaatcggcaaagtagacagccttgaagatgacgggtttcctttcattggtgctaacatgagtactggcgatattgtcattggcagatgcaccgagtctggggctgatcacagtataaagctcaagcacactgagagaggaattgtgcaaaaagtggtattatcatctaatgatgaagggaagaattttgctgcggtttctctgagacaggtaagttccagatcatactaaatcgagctgttttttcagagaatgcattcctatgtatgaatcgaatgttccattgattggcttttacatcttacaggttcgttctccatgccttggagataagttttccagtatgcatggccagaagggtgttttaggctacctagaggaacagcagaattttcctttcacgatccaaggcatagttcctgatattgtgataaacccgcacgctttcccttctaggcaaacaccaggtcaactcttggaggctgctctctccaaaggaatcgcttgtcctatacaaaaggagggtagctctgctgcatacaccaaattgacacgtcatgccactcctttctccactccgggtgtcactgaaatcaccgagcagcttcacaggtacattcttcacattgtctcttggttttagctcgtaaaacagaatataaaattatatgctataacagatttacatttgcttcctatacaaatagatgatatcattaagggcaggaacatattattgataatatttcctcgttgaagatgtttaaacttggagactttggctacagaatttccaaaagttgattgagctaatatactgcacaaggcactaagctagatttgagcaccttacttgaaacatgtcatagtggatctttattttgttttctaggagtactagaagtgagcatgagttatctgtctctgtaagactaaaaaactaagaagttcaatgttctatggttgattaatttcttgtattgtgcctgaaaaacgtctagagaatacagaaaaataggctcaagagtcatgtaccagtatataattagttagaggattgatgctgtgagccttgtgatctatgtataattcatttaacctttcttagattattgttgattcttgagtcctgattcattaccaatggtaaatatttgtgattagggccggcttttcaagatggggaaacgaaagggtctacaacggtagatcaggtgagatgatgcgttctatgatattcatgggcccaactttctaccagcgacttgtccacatgtcagaggacaaagtcaagttcaggaacactggaccagtccacccgctcacacgccagccagttgcagacaggaagagatttggcgggataaaatttggagaaatggagcgagactgcctaatagctcacggtgcatcagctaatctgcatgagcgtctcttcactctaagtgactcttctcagatgcacatctgcagaaaatgtaagacctatgcgaatgtgatcgagaggactccaagcagtggaagaaagattagagggccatattgtagagtctgcgtatcctcagaccatgtggttagggtctatgttccgtatggagctaagcttctgtgtcaggagctgttcagcatgggcatcactctcaacttcgacaccaagctatgctgattccccctctttattatgtaaatggcttattgccttaagaccatgttatgtgtagtttgcttcagtcccggttctggttagtagtataggttttggtttggttgattcggtaagggttatccgaaccgaagaaatcgtaaaaccgagccactgatgactgaactaacccgtaagtgttgcttttgtgagatttgactctttaaccgttaataattctcggatctaaagtaaagttttaggaaaact

SEQ ID NO: 58 - DNA, 7174 bp, Arabidopsis thaliana
  source 1..7174: mol_type = genomic DNA
gtcttggtgagcttatagaatatcttttgttttcgggtcatgcttgaaggtttattcacccattagtatatggagagtatccaaagacaatgcagaacattgtgaaagagaggcttccaaagttcacggagaaagaagtgaaaatggtgaaaggttccatagattttgtgggaataaaccaatacacgacttattacatgtccgaaccacatcccaccaccaaacctaaggatttgggttatcaacaagattggaatgtggaatttggctgtaagttattggaagattcataacgatatgtagattttggattttgtttacagtctttagattttgatcgtgacaattattaacttgcagttgctaagttggggaagccaataggtccaagggtgagatatacacttgattatatgtttttttttttccctaagcaatatatatacaagtgtctaagttattaaataaaccacttatcttataggcttactcgtcttggttatacaacgtaccatggggaatgtacaaggccttgatgtatatgaaggaacgttacggcaaccctactatgatcctctctgaaaacggtattaaagaaacaaattaaaatcttcaatcaagtttctttttgttttgttatatttctataagattattataaattttagagctttttataaatgtttgaacatattttataggtatggatgacccgggaaacgttactctagctcaaggactacatgacaccacgagaatcaagtattacaaagattacttaaccaaccttaagaaagctagggatgatggagccaatgtggttggatattttgcgtggtcattgctagataatttcgaatggttatcaggatatacttcaaggtacttaaaaatttataccaaatgtatgatatgtagaataaatcaaggttataattaatatctgtttttgtttattgtataggtttgggatcgtttatgttgattacaaaacattgaagaggtaccccaagatgtctgctcagtggtttaagcaacttctgaaacgaaacaacaaatgatctcaatgtatcaatgccgggtggatttagtttttaaaaaggttggaattgatgattgaagaaataatggggccggtttagtcactttgtttattataaggggggtgaattgtaacttgaactctctccttcttcagttctttgacttttcaacacaaataaaataaaagtttaagaataaatttgcactatgaaatatgaactcttgtccttttcaattttgtgagtttatatgcatttagaacataacggtctttgaacattatagatttataaagttgcaatttgcaagcataaagttggtaatcgaattgatgtaattacccttctttactttgtactaaacaaagcgcacttagccacttaacgctaaaacatcgtaaggacatacctgtcatttccacaagtgccactcgatttcgccactcctacagtcctactcgtcgactgctcgcttaaccattgaaaaagtgagccaagggttttgattattttcgacgtctacggcgaatctctccgcatcttcatcgatttcccggcgacgtttactaccgccgttttactcaatcgtgccagcttaagcaatcgaggtacccattttaggtgttacgctttgattctgcttttaagcattggacaattccggagaatatgctttagtttcctctcttttggagaatgattcggttctaggggaaagattgttgatttcgtgtttgtattcatcattgattgaaacatgcatgatgcattttcgtggttcatggtttttcacggcttcttatcattttctctgtcttttttttttttttttttttttttttttttgtttcagtgtgtattgaggtataccagagatagacataaatgagatggatgttgacgagatcgagtctgctgggcagatcaatatttctgagctaggagaaagttttctccagactttctgcaaaaaagctgcgacatctttctttgaagagtttggacttataagtcatcagcttaactcctacaacttcttcattgaacacgggcttcagaatgtgtttgagtcctttggtgacattcttgtggaaccgtcttttgatgtaataaagaagaaggatggcgattggagatacgcaacggtgaaatttggaaaagtcactttggagaagcctacattcttttcggatgacaaggagcttgagtttctcccatggcatgcaggcttcagaacatgacatactcagcaaggatcaaagtcaatgcccaagttgaggtaactaaactaacaaaatctttgtcgaaattaagtaagcttgtctggatttgatgaatgatttcccttgcttgaaaactcagaaaggccagttaactatcactttctagttcaacattatgcaatatgtctatgtagtcgagagtggaataccacatggtatgaaatataaaagaaaaacatcttaagctttttatttatttagttcttccccattccctcactgttctttaattgagtgtttcatgcttgtgtgcaatgactcttgtacagtcaaagttttgatgatgtttctgttttgctgtccatgtatcttattcttgtaaatgtagtttattgtctaactgcatcttcactttataaattactaggtgttcaaaaaaattgttattaaacacgacaaattcaagactggacaagatgaatatgtcgagaaggagatactggatgtcaaaaaacaggacattctaattggtagcatacctgtcatggtgaaatctgtcctttgcaaaactagcgagaaaggaaaagaaaactgcaaaaaggggaattgtgcctttgatcagggtggatattttgtgataaagggggctgagaaggtgagttaaaccattttgggatctttttgcatatccactatcatgggatttctattttgaactattttagtgtatagcttagtggaaattagttctctttttctaatatatactggaaaaaatattttcaagttgttatacaacttcctaacgtgattataatctgtcttgcaggtgtttatagctcaagaacagatgtgcacaaagagattgtggatttctaattcaccatggacagtctccttcaggtccgaaactaaaagaaataggttcattgtgcgcctctcggagaatgagaaagcagaagactataagataatggagaaagtactgacagtgtacttcttgtcgactgagattccagtctggctcctgttctttgcgttgggtgtttcatcagacaaagaagccatggatctaattgctttcgatggtgatgatgcaagcattaccaacagtctcatagcttctatccatgaagctgatgcagtgtgtgaagcttttcgctgtgggaacaatgccctaacatatgttgaacatcagatcaaaagcaccaaattccctcctgctgaaagtgtggatgattgcctccgtctgtatttgtttccatgcctccaaggtttgaagaagaaagcccgattcctgggctatatggtgaagtgccttttgagcgcgtatgcgggaaaacgaaaatgtgaaaacagggacagtttccggaataaacgaattgagctcgctggagaactgttggagagggagataagggtgcatcttgcacatgctagaagaaagatgaccagggccatgcagaaacaactctcaggcgatggcgatttgaagcctatagagcattatttggatgcttccgttatcaccaatgggcttaatagagccttctccactggagcatggtctcatcctttcaggaagatggaaagggtctcaggtgttgtagctaatttgggtcgtgcaaatccattgcagactctgattgatctgaggagaacgcgacagcaagtcctttataccggcaaggttggagatgctagacatccgtaagtgaaaatttccacctcccctggtatattgaaatatatcccacgtactttaactaactgatatggttgcatttactcaatgttacatgtcttcagactgttttaaagatattcatattaacctatttagtatacgatggcgatcacagtttctgcagagtctcgtcggtttataatattgagtttgtatagatgttgctgctattaagaaactttgatactgtctttcttgtttctttgtcccttggtcaatctatctgttgtcctgatgcatgtattgagattatccattttggttccttttcaatgtgagcggttacacaattaaatcgtgctgggaaactgaactatggctgcattgtttttaatgttggccacaggcatccttctcactggggcagagtatgctttttgtcaactccagatggtgaaaattgtggtcttgtgaagaacatgtctcttcttggacttgttagcactcaaggtttggagtctgtggtggaaatgctctttacttgcggaatggaagagctgatgaatgataccagcacaccattgtgtggcaaacacaaagttcttctcaatggagactgggttggattatgtgcagattctgaatcctttgtcggggagttaaaaagcaggcggcgccaaagtgaattacctctcgaggtatcttctgtttcagcaaatgttttgctatattttgatattcttgtgctacttgattatttgctttggatttttctgcttcagaaagtatcctatgtcgaatattatttacatatatgtatcacaacgttatctgcagatggaaatcaagcgagataaagatgacaatgaggtgagaattttcactgacgctggtagactactccgacctctcttggttgtggaaaatctccacaagttgaagcaagacaaacctacacagtatccttttaagcatcttcttgaccaagggattctcgagctgatcgggattgaggaagaagaagactgtactacagcatggggaatcaaacagcttctgaaggaaccaaagaattacacgcattgcgaattggacctatcattcctgttgggtgtgagctgtgcaattgtcccatttgcaaatcacgatcatgggaaaagagttctttaccagtctcagaagcattgccaacaagccatcggattctcatcaacgaaccctaacatccgctgcgatacgctgtcccagcagctgttctatccccaaaagccacttttcaagacattggcgtcagagtgtcttgaaaaagaagttctatttaatggccagaacgcaattgttgctgtgaatgttcatctcgggtacaaccaagaggactccattgtgatgaacaaggcttcattggaacgtggtatgttccgttcagagcagattagaagctacaaagcagaggttgatactaaagactcggagaagaggaagaagatggatgagcttgttcagtttggaaagacatacagcaaaatcggcaaagtagacagccttgaagatgacgggtttcctttcattggtgctaacatgagtactggcgatattgtcattggcagatgcaccgagtctggggctgatcacagtataaagctcaagcacactgagagaggaattgtgcaaaaagtggtattatcttctaatgatgaagggaagaattttgcagcggtttctctgagacaggtaagttccagatcatactgaatcgagctgtttttcagagaatgcattcttatgatgaatcaaatgttccattgattggcttttacatcttgcaggttcgttctccatgccttggagataagttttccagtatgcatggccagaagggtgttttaggctatctagaggaacagcagaattttcctttcacgatccaaggcatagttcctgatattgtgataaacccgcacgctttcccttctaggcagacaccaggtcaactcttggaggctgctctctccaaaggaatcgcttgtcctatacaaaagaaggagggtagctctgctgcatacaccaaattgacacgtcatgccactcctttctccactccgggtgtcactgaaatcaccgagcagcttcacaggtacattcttcacattgtcacttggtttttagctcgtaaaacagaatattgaattatatgcaatacagattgacatttggttcctagggagtacagatggatgatatcattaagggtaggaactaattattaataatgttgcctggttggagatgtttgaactttgggactttggctcaaaagctgacatgatatgcataataccagcaaatcgagctaatatactgcacaaggcactaagctagatttgagcaccttacttgaaacatgtcatagtggatctttgttttgtttcctagtaccagaagtgagcatgatttatatgacgggcaaatatctctgtaagaccaaaaaaactaagaagttggatgttctctggttgattaaattgtgcctgcaaaacgtctagaggatacacagaatgggctcaaaagccatgtatcagtatataattagttagaggattgatgctgtgagccttgtgattatgtatgattcgttgaacctttcttagatcattgttgattgccaatggtaaatatttgtggttagggccggcttttcaagatggggaaacgaaagggtctacaatggtagatcgggtgagatgatgcgctctctgatattcatgggcccaactttctaccagcgacttgtccacatgtcagagaacaaagtcaagttcaggaacaccggaccagtccacccgctcacacgccagccagtcgcagaccggaagaggtttggcgggataagatttggagaaatggagcgagactgcctaatagctcacggtgcatccgctaatctgcacgagcggctcttcactctaagtgactcttctcagatgcacatctgcagaaaatgcaagacctatgcgaatgtgatcgagaggactccaagcagtggaagaaagatcagagggccatattgcagagtgtgcgcatcctccgaccatgtggttagggtctatgttccttatggagctaagcttctttgtcaggagctgttcagcatgggcattactctcaacttcgacaccaagctctgctgattccccgtcattattatgtaaatagcttaatgc

SEQ ID NO: 59 - DNA, 5964 bp, Arabidopsis thaliana
  source 1..5964: mol_type = genomic DNA
aaactaaaatcagttttgttcaaaagaaaacctgatgcaagaaacaaacaaaagtattgaaaagtgactaatcttgcagttgaactaaacttggaacataagaagagcacacaagtctgcctggtttccgctgggaattcggacttactccaatgttgacagatttgaagtatccatcatctccaacgatgtaagccatttggtagcgacaggtcttgatctctttactatcaaaaagcacaacaactttcttctcctcgtcaatgaagaagctcttagcttcaaagtacatcgaaaaatgatccggtaaaccattgactagtgacatatccacagtcaaaaaagagctccaggataccgcattgggttcaatcttagtcgaaatcctaatctctataatctcagctgtgacgtagtggttgtataacacagcgagcttctcatctctaacccaagatagagtcacagtttcaaaactaggacagggagggtaaaacagcagaggcaaacacggtccaaatctctctgttgtaaaatcaaaacagagtaaacaagtttcaatctctgttactttcgtcgcttgtgtcacttcttgaccgaagaagtaagtatttcccttcaaagacactccggtctgataaaacggtatatcacagtcaggattgacatcaagaaccctccatgaatcagagctaaaatcgtatacatcaatgtgagttcttcgactgctttcgttgctctcttcatcatagagaaacctcaagattttgtggttacggttgttgtcgtatccaagagcaaacctgtcatatctgtggaatgtgtttcttggtcgaatccatttcgtttgccccaaatacggattccacacaaagacattcgagttctctttggcgatgcataacaataagccatcgcaatgatagacttgagatatctcgacttgatcatcattactaggtatacttattagcttcatagatggatcaacgaagtcttctttgtcttcgttacggattccttgaagatctaatctcaaagaacaaactctagaatctagaatcatgaactctagaaattgattccttgctgctgtttttctaccaaagatctgatttttcgataaagcattccactttttacaagtagatcgcactgagattagagatgtaaatggaaccctagaaagaatatcacctaccaaatcatctgatagatcggaaattgtcgtcattcttcaaaactttctccagaaatttgtgtattgttcttctccttcagtctgttctctgttgctacctttactgtgtcaatgtcggatctctcgattgtattttcttgataacggtttggtttggcccaggttgtttaaatgggcctatgtacaataatggaaacaaataggaatatattttaaaagcccattaattagacaaatagcacgtgagcagcacaagcacttcttctccagtctattttccccctcatcagtctcagactctctttcgtttactcgccgaagtcaaataaaaacgagagatggtttcagctatggcgggttctccctttttcgcatactcactaatcctctctccagtctccgcattgcttctatttctacctcgtatccagtattagattgaaaaagatctcactgtgtaagtctccagaacctcactgtgtaagtgcttttgtatttattcccgcttgattccaaaattattcaatcaacaatgtattaggtgatcgatttcaatagtatttgtagttggaatcatcgatattgtctcttaatttgatatttatggtcttagatcttccaacggagtagcgaattagggcttttcttcaatattttctcttatcagccttatcatgtgggggttatttctgtttagtatgtttctttttcaggagaaatggggtcagagggaaatatgaagaagtcggttgtgacacaagtaagcattggtggatttggggaatccactactgcaaaacaactcacagattaccttgaagatgaagtaggaattgtttggcgttgcagattaaaaacttcgtggactcctcctgggtcttatcctaattttgaaatcgcagacacttcaaatatccccagtattgatgaatataagaaagtggagcctcatgcctttgtccatttcgcagtttttgaatcagctggtcgtgccatggatgctgcagggcaatgcaacctcatcttggatggccagccgttaaaagtcagtttgggtcctaagaatccatattcccttaatcaaagaagaagaacgactgtaccttataagttggctggtattacacttgagattgggacattggtttctcgggatgatttttttgtttcttggagagctgaaggggttgatttcctggtggatccttttgacaacacgtgcaagttttgtttcagaaagagcactgccttctctttcaaggatgcagtgatgcatgctgtgatcaattgtgattataagttggagttattggtgagagatatacaaacagtcaggcagtataaaaccttgcatggctttgtgcttattttgcagctggcttcttcaccccgtgtctggtacagaactgctgatgatgatatttacgatactgtccctggcgatctcttggatgatgatgatccttggatccgtaccactgattttactcaagttggggcaattggtcgatgtcattcatatcgagtgctcatatctccgcggtatgaaaataaactgagaacagccttagattattttaggatgcggagggtgcaagaggaacgtgtgaggtggcctccccgtatccgtaatgagccttgttttggggagcctgtgtcagatcatttcttctgcattcatcacaaggaaggaatctcttttgagatcatgtttctagtaaattcggtattgcacaggggtgtctttaaccagtttcagttgactgagcgattctttgatcttctaagaaaccaacccaaggacgtcaatatagcttctctcaagcatctctgtacctataaacgaccagtttttgatgcgtacaagaggttgaagcttgttcaggaatggattcagaaaaatccaaagcttttagggagtcatgaacaatctgaggatatctctgagatcagaagactagtaattaccccaaccagagcctattgcctacccccagaagttgagctctccaacagggtactcaggagatacaaagctgttgctgaaagatttttgcgggtaactttcatggatgaaagtatgcagaccataaattcgaatgttctctcttactttgttgctcctattgtgaaggatttgacatcaagttctttctcccagaagacctacgtttttaaaagagtgaagagcatattaaccgatgggtttaaactatgtggtagaaaatacagttttctagcattctcagccaatcaactgagagaccgctctgcatggttctttgctgaagacgggaaaacacgtgtgtcagatataaaaacatggatggggaagttcaaagacaagaatgtggcaaaatgtgctgctaggatgggcctgtgcttctcctccacatatgccactgtagatgtcatgcctcacgaggttgacactgaggttccagatattgagagaaatgggtatgttttctctgacggaattggtacaatcacacctgacctcgctgacgaagtaatggagaaacttaagttggatgtgcactacagcccttgtgcttatcagatacgttacgcaggtttcaaaggggttgttgctcgttggccatcaaaaagtgatggaatcaggctagcccttcgagacagtatgaagaagttcttttccaaacatacgatcttggagatctgttcctggacgaggtttcaacctgggttcttaaatcggcagataattacccttctatccgtactaggtgttccggatgaaatattctgggatatgcaggaatccatgctctataaactgaaccgcatccttgatgatacagatgtggcatttgaagttctcacggcatcatgtgctgaacagggaaacactgcagctatcatgcttagtgcaggtttcaaaccaaaaaccgagccgcatctacgcgggatgttgtcttcagtcagaattgcacaactctggggtctcagagaaaaatctcgtatttttgttacttcaggaaggtggctaatgggttgcctagacgaagcagggatacttgaacatggccaatgctttattcaagtctctaaaccgtctatagaaaattgtttctccaaacatgggtctcgttttaaggagacaaagacagatctggaagtagttaaaggctatgtagccattgctaagaatccttgtcttcacccaggggatgtaaggattttagaagctgttgatgtaccccagctgcatcacatgtatgactgccttattttccctcagaaaggtgataggccgcatacaaacgaagcttctggcagtgaccttgacggggacctgtactttgtggcttgggatcagaaactcatccctcccaacaggaaaagctatccggccatgcattatgatgcagctgaagagaagagtttaggccgtgctgtcaaccaccaggtcaatatctacttccccactttttttctgttagctgagatgatgacgcttaagataaaatggacaagtgattccagtataactctctgatatttctggaagtggtggaaactttgtttttggatgcttgtagtgattacttttgcttgcttctgagttcatagattgcgtggcataggttgttaacagcatactgtgttcatcctgtaggagctaagatgatgacatttaagaaaactttgtcatatattgttgattctgatttgtatttttcgcatgccttactgtgactgtgactgtttagttactatcaagggcagtatcatgatgctagtagcttctgccaatgtagttatgaattctttgttattttttcttgctgtgcttgccaagtcttgggtaattgattgcttttgttacaggacataatcgatttctttgcaagaaacttggcgaatgagcagttgggcacaatttgcaatgcacacgtcgttcatgctgatagaagtgagtatggagccatggacgaagaatgtttgctactggcagaactagctgccactgcagttgatttcccaaagacagggaaaattgtgtcaatgcccttccacctaaaaccaaaactctacccagatttcatgggaaaagaagactaccaaacttacaagtcgaacaaaatcttgggtcggctttacagacgggtaaaagaggtttatgatgaagatgcagaagcttcctcagaagaaagcacagacccaagtgccatcccttatgacgctgttcttgaaataccgggatttgaagatttgatccctgaggcatggggtcacaaatgtttgtacgacgggcaactcattggtcttcttgggcaatacaaggtgcagaaagaggaagagattgtgacgggtcacatctggtccatgcccaaatacacaagcaagaaacaaggcgaactgaaagaaagactgaagcattcttataattcccttaaaaaggagttcaggaaagtatttgaggaaacaatccctgaccatgaaaatctcagcgaggaggaaaaaaacatcttgtatgagaagaaggcttcagcttggtatcatgtaacttaccatcccgagtgggtgaagaagtctttagagctgcaagatccagatgagtccagtcatgcggcgatgctgagttttgcttggattgcagctgattatcttgcaagaatcaaaatccggtcacgggaaatgggaagtatcgactcagccaagcctgttgattctttggctaagtttcttgctcagcgtctctaaaaggttatgtttaatgccgtaaggccactctg

SEQ ID NO: 60 - DNA, 4427 bp, Arabidopsis thaliana
  source 1..4427: mol_type = genomic DNA
actccacttcctaaactctcattcatgttttggttagccattcgaaaccgtctagctacgggggacagattattaaagtggaatggcgacgcttacagggggttgtgtgctctgtcaaacggaagtagaaacaagggatcatcttttttttctcttgctcttactcctctcatgcttggtcagctcttacgagggatatgttgggttcacgttatacgactcgttgggactctcttgttgatctatctacaagttcggccttgacgcaaattcacatgtttgttttccgatatgtgtttcagctcactactcacagtctttggaaagagagaaatgggagaaggcatggcgagtcacccattccagctccttctcttgccaaaatgatcgataagaatatgcggaatcggttgagtactttggctacttcaggttcacccatctacaagagcgggctacgatattggtttagcactcattgtcgttagatcttctattcagtttgtacttgttcagtttttaaattttttggctaaacgatgcatttattgtaaaaccgtcttttttttgtgaataaattttaaatttataaagaaaagaaaaaaaaatgtgtggtagcacaaatgcacgatgttgatcttcttactcaaatgtcttctataaaattgtggacgcaaagtctcccgcccattactctgcatatagcaaaaacctgactattgtttcttaattattttatgaaaaaatgtctatgcacgttatcgtttcaagataaagatgaagatgaaaatattaagttaaaaaggatatgaagaaaggaagtgtgtatgtaaatgatatgtataaaaagataaaatggacattcttataaaagttacacaccatatttttgttagattagtttgtgaattaaaatatttttattgattatttatgcctactttcctaaaattttctcctttttttacaatttctatatcacgactttttctaataaatactttcgtaatatttatcctgaatgtgttgcgacacacttacgatataaagatattttattgtttcaaaaaaaaaagaaattagatattaaaaaaaagttattcaaggttcaataaatagaaaaaaatccgatatccagaatataccaaaagaaatttattcaaagttaaaatacagaaagatattagatatcaagaaaaattattcaagtttaaaaaatagaaagaaattatataatatatagaaagaaatttttattcaaattttaaaaaaataaaaaacttagatatttggaaaaccttatttccatattataaaattataattttactaaatatattaaaaaaattatgtttcctaaatttattaatttttttttaataatctctatactgcaatcttttctaataaaaatattttataatatttatcctgaacgtgttacgacacgtcatcgctacaaaccaaaataaacgggtgtggtgtgtttggtctggccttatacaccaaatcaaacacaccaccatttttacccagaaatttgagtaccaagagagctctttttcatcctaaagagatcttcaaatttagatttcaacacataaaaggtatgaaatttttcattttttttccggctatttttttttggaataatcgtatcataatttctcaatatcacaactttatattaaaagcaaatctaaagaaaaaacacattagattctgtaggaaaatatttgtgtaagagcttcttctccgccatggatttagcttgaaaggtgttctccaaacaaaacccatttcttcgatttctctgataaactcgtcaaacccatttcgcttctcgttgcaaaaaatgggttcttctcacattcctcttgatccgtctctaaatccgtcaccttcactgatcccaaagcttgaaccagtcactgaatcaacccaaaacttggcctttcaacttccaaacacaaacccacaagccctaatttcatcagccgtctccgatttcaacgaagccacagacttttcctcagattacaacaccgtcgccgagtcagcccggtctgctttcgctcaacggcttcaacgtcacgatgatgttgcggttcttgattccttaaccggagcaatcgtaccggttgaggagaatccggaaccggaaccgaatccttactcaaccagtgactcttcaccgtcggttgctactcaacgacctagaccgcagccacgttcgtcggagctagtgaggatcactgatgttggacctgaaagtgagagacagtttcgtgaacatgtgaggaagacgagaatgatttatgattctcttaggatgtttttgatgatggaagaagctaaacgtaatggggttggtggaagaagagctagagctgatggtaaagctggtaaagctggttcaatgatgagagattgtatgttgtggatgaatcgtgataaacgaatcgtcggttcgattcccggtgttcaagttggggatatcttcttctttaggtttgagttatgtgtcatgggcttacatggacaccctcaatctgggatcgattttcttacagggagtcttagttctaatggggagccaatagctactagtgtgattgtttctggtgggtatgaggatgatgatgatcaaggagatgtgattatgtatacaggtcagggtggacaagataggcttggaaggcaagctgaacatcagaggctggaaggtggaaaccttgcgatggaacggagtatgtattatgggattgaagtgagagttattagagggttgaagtatgagaatgaggtttctagtagagtttatgtttatgatgggttgtttaggattgttgattcttggtttgatgttgggaagtctggtttcggtgtgtttaaatatcggttggagaggattgaaggacaggctgagatgggtagttcggtgttgaagtttgctaggactcttaagactaatccattgtctgtgagaccgagaggttacatcaatttcgatatctcgaatgggaaggagaatgttcctgtctatttgtttaacgacattgacagcgatcaagaacctttgtattatgagtatcttgcgcaaacttcgtttcctcctggcttatttgttcagcaaagtggtaatgcaagtggatgtgactgtgtcaatggttgtggcagtggctgcctttgtgaagccaagaattcaggtgagattgcttatgattataatgggacgctaataagacagaaaccgttgatacatgaatgtggatcagcgtgtcagtgccctccaagctgtcgaaaccgtgtgactcaaaagggtttgaggaataggctagaagtgtttaggtcactggaaacgggttggggagttcggtctttggatgtattacatgctggtgcttttatttgtgagtatgctggggttgctttgacaagggaacaagccaacattctgaccatgaacggtgatacattggtatatcctgctcgtttctcttctgcgagatgggaagattggggagatctgtctcaggtccttgctgatttcgagcggccttcttatcctgatattcctccggttgatttcgcaatggatgtgtccaagatgaggaatgttgcttgttacataagccacagtactgatccgaatgtcattgtccagtttgtactccatgatcacaacagtctcatgttccctagagtcatgcttttcgctgctgaaaacatccctcccatgactgagctcagccttgattacggagtagttgatgattggaacgccaagcttgccatttgtaattaaaattcaaccgttaaaatcgtggttcttggccatattttccaggtaaattctaagtgaatggttaataagtttcacagtataaccctttagtatcatgttagttaactttgggaaatgcactagcaggaaatgattgcaaatctgtcttgcataggcttgtgacttgtttacaagttgtattatggtatcaatgtttaataagatagatgttaggggtcctattttggtaatttgaattagatatatattgggttcttgcagattgtaataagcacaagctgagactgaatcgtttgctgttttgttttgttttgttttgctagttggtgacatgaagaatgaaggaaaggaagtgtgcagaagctaaggtttaagagaccccactcctcccatttcgagtttttgggtatctttgaacatttgggagtgtgtgtttttgggggtaataggatacaaaacttaaaagctgtttgttttgtttgtactgttttgttcttgggtttgtctcgtactaatcaagtaaaacaaatgtctcgtactctatgactctctctttctaaattggtattagatgaaattacaccatatattttgatgaaaaacatttgcgttcaatcgt

SEQ ID NO: 61 - DNA, 4471 bp, Arabidopsis thaliana
  source 1..4471: mol_type = genomic DNA
gtccactccaacgtgtgaatggttcaagggagtatggtttcaaaactccacttcctaaactctcattcatgttttggttagccattcgaaaccgtctagctacgggggacagattattaaagtggaatggcgacgcttacagggggttgtgtgctctgtcaaacggaagtagaaacaagggatcatcttttttttctcttgctcttactcctctcatgcttggtcagctcttacgagggatatgttgggttcacgttatacgactcgttgggactctcttgttgatctatctacaagttcggccttgacgcaaattcacatgtttgttttccgatatgtgtttcagctcactactcacagtctttggaaagagagaaatgggagaaggcatggcgagtcacccattccagctccttctcttgccaaaatgatcgataagaatatgcggaatcggttgagtactttggctacttcaggttcacccatctacaagagcgggctacgatattggtttagcactcattgtcgttagatcttctattcagtttgtacttgttcagtttttaaattttttggctaaacgatgcatttattgtaaaaccgtcttttttttgtgaataaattttaaatttataaagaaaagaaaaaaaaatgtgtggtagcacaaatgcacgatgttgatcttcttactcaaatgtcttctataaaattgtggacgcaaagtctcccgcccattactctgcatatagcaaaaacctgactattgtttcttaattattttatgaaaaaatgtctatgcacgttatcgtttcaagataaagatgaagatgaaaatattaagttaaaaaggatatgaagaaaggaagtgtgtatgtaaatgatatgtataaaaagataaaatggacattcttataaaagttacacaccatatttttgttagattagtttgtgaattaaaatatttttattgattatttatgcctactttcctaaaattttctcctttttttacaatttctatatcacgactttttctaataaatactttcgtaatatttatcctgaatgtgttgcgacacacttacgatataaagatattttattgtttcaaaaaaaaaagaaattagatattaaaaaaaagttattcaaggttcaataaatagaaaaaaatccgatatccagaatataccaaaagaaatttattcaaagttaaaatacagaaagatattagatatcaagaaaaattattcaagtttaaaaaatagaaagaaattatataatatatagaaagaaatttttattcaaattttaaaaaaataaaaaacttagatatttggaaaaccttatttccatattataaaattataattttactaaatatattaaaaaaattatgtttcctaaatttattaatttttttttaataatctctatactgcaatcttttctaataaaaatattttataatatttatcctgaacgtgttacgacacgtcatcgctacaaaccaaaataaacgggtgtggtgtgtttggtctggccttatacaccaaatcaaacacaccaccatttttacccagaaatttgagtaccaagagagctctttttcatcctaaagagatcttcaaatttagatttcaacacataaaaggtatgaaatttttcattttttttccggctatttttttttggaataatcgtatcataatttctcaatatcacaactttatattaaaagcaaatctaaagaaaaaacacattagattctgtaggaaaatatttgtgtaagagcttcttctccgccatggatttagcttgaaaggtgttctccaaacaaaacccatttcttcgatttctctgataaactcgtcaaacccatttcgcttctcgttgcaaaaaatgggttcttctcacattcctcttgatccgtctctaaatccgtcaccttcactgatcccaaagcttgaaccagtcactgaatcaacccaaaacttggcctttcaacttccaaacacaaacccacaagccctaatttcatcagccgtctccgatttcaacgaagccacagacttttcctcagattacaacaccgtcgccgagtcagcccggtctgctttcgctcaacggcttcaacgtcacgatgatgttgcggttcttgattccttaaccggagcaatcgtaccggttgaggagaatccggaaccggaaccgaatccttactcaaccagtgactcttcaccgtcggttgctactcaacgacctagaccgcagccacgttcgtcggagctagtgaggatcactgatgttggacctgaaagtgagagacagtttcgtgaacatgtgaggaagacgagaatgatttatgattctcttaggatgtttttgatgatggaagaagctaaacgtaatggggttggtggaagaagagctagagctgatggtaaagctggtaaagctggttcaatgatgagagattgtatgttgtggatgaatcgtgataaacgaatcgtcggttcgattcccggtgttcaagttggggatatcttcttctttaggtttgagttatgtgtcatgggcttacatggacaccctcaatctgggatcgattttcttacagggagtcttagttctaatggggagccaatagctactagtgtgattgtttctggtgggtatgaggatgatgatgatcaaggagatgtgattatgtatacaggtcagggtggacaagataggcttggaaggcaagctgaacatcagaggctggaaggtggaaaccttgcgatggaacggagtatgtattatgggattgaagtgagagttattagagggttgaagtatgagaatgaggtttctagtagagtttatgtttatgatgggttgtttaggattgttgattcttggtttgatgttgggaagtctggtttcggtgtgtttaaatatcggttggagaggattgaaggacaggctgagatgggtagttcggtgttgaagtttgctaggactcttaagactaatccattgtctgtgagaccgagaggttacatcaatttcgatatctcgaatgggaaggagaatgttcctgtctatttgtttaacgacattgacagcgatcaagaacctttgtattatgagtatcttgcgcaaacttcgtttcctcctggcttatttgttcagcaaagtggtaatgcaagtggatgtgactgtgtcaatggttgtggcagtggctgcctttgtgaagccaagaattcaggtgagattgcttatgattataatgggacgctaataagacagaaaccgttgatacatgaatgtggatcagcgtgtcagtgccctccaagctgtcgaaaccgtgtgactcaaaagggtttgaggaataggctagaagtgtttaggtcactggaaacgggttggggagttcggtctttggatgtattacatgctggtgcttttatttgtgagtatgctggggttgctttgacaagggaacaagccaacattctgaccatgaacggtgatacattggtatatcctgctcgtttctcttctgcgagatgggaagattggggagatctgtctcaggtccttgctgatttcgagcggccttcttatcctgatattcctccggttgatttcgcaatggatgtgtccaagatgaggaatgttgcttgttacataagccacagtactgatccgaatgtcattgtccagtttgtactccatgatcacaacagtctcatgttccctagagtcatgcttttcgctgctgaaaacatccctcccatgactgagctcagccttgattacggagtagttgatgattggaacgccaagcttgccatttgtaattaaaattcaaccgttaaaatcgtggttcttggccatattttccaggtaaattctaagtgaatggttaataagtttcacagtataaccctttagtatcatgttagttaactttgggaaatgcactagcaggaaatgattgcaaatctgtcttgcataggcttgtgacttgtttacaagttgtattatggtatcaatgtttaataagatagatgttaggggtcctattttggtaatttgaattagatatatattgggttcttgcagattgtaataagcacaagctgagactgaatcgtttgctgttttgttttgttttgttttgctagttggtgacatgaagaatgaaggaaaggaagtgtgcagaagctaaggtttaagagaccccactcctcccatttcgagtttttgggtatctttgaacatttgggagtgtgtgtttttgggggtaataggatacaaaacttaaaagctgtttgttttgtttgtactgttttgttcttgggtttgtctcgtactaatcaagtaaaacaaatgtctcgtactctatgactctctctttctaaattggtattagatgaaattacaccatatattttgatgaaaaacatttgcgttcaatcgt

SEQ ID NO: 62 - DNA, 6907 bp, Arabidopsis thaliana
  source 1..6907: mol_type = genomic DNA
ttggcacgttatgttatggactgttcatatacgtaccacgttccaaactcgtttgtatctaaaaaggaaaaattatctcacattagtgatttttttttacttgcatcaactctattactatatactaatatatattaccattaccattttgaacgcgttacatagacattatttagtcattagtcaaatccctttactatataatcccatttgaaatgtaagaattttgaatgttgacagatgcaaataaggattagcatacaaaattactttgtaacccttatttacgtgataaaaaagtttagcctatcgttccactattaaaaacatgaacatgtaaaagttgaattttctatcttttcttgtatcaactatcaagtaatttgcaagtacctaagtaaaagaaaacaaataaacacaacgatctttattactatatttaaaacaaataaaagatagacaactattaatttgtttatatgcatatcagtcctttgcaacgtagataaaagcggtattatgcaaataaacttttcttttgtcaattgtcgtcatcatgcaaataaattttcaaatatcactgtcattattcaaatttcaaaccctaataaaaaagcaaattaaaaaaatggtttcgtacgacaaagggcttaacgaaagatgataagaacaaacattaataccgtagcttttgtatttctaacatcagtaaaaataaaaaaatcagacctcgtaaccaatgaagctgccataaaacctgagatggtgtagttaaagagggaattatgatttgtgtcagctatcaatatcatcataattagctgaaattatatttattctttggagtttttatttatttatatttgaacatttattatacaaacaaattatatacaaatagtcgtaactcattttatttttctcttcttcttttgttattatttgtcaaaataaatagtcctttatattcgtaattcgtaaatcagtataaattaaagcagaagtgaaaacataagccaatagtggtaaaaactgttattctatctctattctggttctgcaaaaagcatatatcaatttataaaaaagtgaacagactaatactagtagagttaaaatagactgtagttaagttaagaaaatgtacgatcaacagcccacaccgccacagatgaaattacgtggaacgtggtaaaaaagccacgacggtaaaatagtaatttaattaactcttcgattttccttttaactctgaagagggcaaaatggtcaatgataatttcgtttatttagtcataaaaaaaccgggaatgcaaagagatgagggcaaaatagtcaaattaaaaaaccgacgatcttttagattccttttaaaacctagacgtcccactctcacacaatacacacaagtaaccagttttctctctcattttctcagtttttctctctctccgtttttgaaaagatttttgtttctactttgggaagctttccgctacaatgtcaaatcgtggtggtggtggtcacggcggcgctagtcgtggtcgaggaggtggacgaaggtctgaccagagacaagatcagtcttctggtcaagttgcttggccgggtttacaacaaagctacggtggtcgtggtggttctgtttccgccggtagaggtcgtggaaacgtcggaagaggtgaaaatactggagatctgacggcgacgcaagttccggttgcttctgctgtttctggcgggagaggtcgtggtaacatcggagatccgacgttttctgttgcgtcttcgtctaagacggtgtctgttgcttcttcatctaaagaggaaagtaagaatacggaggtttctgagaccatgtcgaaccttcagattacttcgacggagacgaaacctgaaatgacgtcacttcctccggcgtcatctaaagcggttacgtttccggtacggccaggacgtggtactttggggaagaaagtcatggttcgtgcgaatcatttccttgttcaagttgctgatcgtgatctctaccattacgatgtaagtttccggccattttttctcgacgaatctgtacttgtttgtcgtttttatgtgtcgatttcaaatattgtcgtttctatttcatcaagttatagtgttttttgctttttgttgttgttcagtttttgtaaaccttgtacgtcaaaagatgaacttttttttgtcgtttgtgttcatctgaagttgttctttcagtgagatttctgactgaaaatttgttagtttctgcatcattggtttttttttttttttgctttcattcgacgaatatactgttgtttgttcctttttattgttgatctgatgtatttcacaaagttcctagagagagttttgacatgatgaatctgcggttgtgacttgttttagtcatatagagattttttggctaaaagttattgttattgtgttataggtttcgatcaatcctgaggttatatcaaagacagtgaacagaaacgtgatgaaacttctggttaagaattataaagactctcacttgggagggaagtcaccagcgtatgatggaaggaaaagcctctatactgctggtccattaccttttgactcgaaagagtttgttgtgaatctggcggagaaaagagctgacggttcctctgggtaatgtcttgttttaactctttgtgaatgtgtttgtatcgccttgtttttcatagttttttttggcattgtgactccttttggcaggaaggacagaccgtttaaagttgctgtaaagaatgtgacaagcactgatctttatcagttgcaacagttccttgatcgtaagcaaagagaggctccatatgatactatccaagtgcttgatgttgttcttagggataagccctctaatgagtaagaaatctgaaatttgcataaacttcagtattgtcaaaagctatgcataaacttaacatttccctgttttgctttctgttcagttatgtctctgttgggaggtcttttttccacactagtttgggaaaggacgcaagagatggtaggggtgagcttggagatggtattgagtactggagaggttatttccaaagtctaaggctgactcagatgggtttgtctctgaacattggtaagaatatgcttaatgttatctggattggtgatgttgattaattcttatatttttatttgatttagatttgaataattctactttatggttttaactgcagatgattttgattcattatagccgtgttgttttcttatgatgcagacgtttcagcaagatcattttatgaaccgattgttgtcactgactttattagcaagtttctgaatataagggacttaaacaggccacttagagactcagatcgacttaaggtatatatctgacttatattccaccattttaattattaatattattcaagatgatgtcttatatatgattcttatcttgaaaatcatatgttggtatttaggtgaagaaagttttgaggacactgaaagttaagttgcttcactggaacggcacaaaaagtgccaaaattagtgggatttctagtctacccatcagggagctaaggtgaagatgcttactttagcagggtgcataatcgttgaactttgttttcttgcttttcttggaagaggtttctgatctttggttataaatttgctgatgttgcctatgttctaatcatttcaggttcactctggaggacaaatcagagaagacggttgttcaatattttgctgaaaaatataattatagagtgaaataccaggctctacctgctattcaaacagggagtgacacaagacccgtctacctaccaatggaggtatatttttaataacatctacttttttacctccatcgttttcttggattcattttgtatccttaaagatctggttattcctggttcttgcagctctgccaaattgacgaagggcaaagatacaccaaaaggctcaatgagaagcaagtgactgcattgctaaaagctacctgccaacgaccccctgatagagagaactcgatcaaaaacgtaggtttagtcctctttacattacatatacagtagttcctccatcggaaaaatagtctttaattttgcacctctgttttgactaacatcacgtttgttgtttatattattagttggttgtgaaaaataattacaatgatgatctgagcaaggagtttgggatgtcagtgactacccaactagcctcgattgaagctcgtgtacttcccccaccgatggtgattttctttctccatttttgttattaatttgctttattatcatgcattttcttgtcaatgttgctcatcacgatgttctttctgttaacagttgaagtaccatgacagtggtaaagagaaaatggtaaatccaaggctaggacagtggaacatgattgacaaggtaaaactgtaattgactatcataatctttttgctctctgtaggcacttgaaactaaataagaaatatgcttctatttctcttataatgataaattatactatactttactgctttgcgtgtggatgcggaagaaatagttagtgatgaagatttgtgtttaatgcttctattgtggtttaatgtgtgttaccaaattttggggctcttacctccttttggctgtgatatggtccagaaaatggttaatggagcaaaagtcacttcttggacttgcgtaagtttctctactcggattgaccgtggtttaccccaagagttctgcaaacagttgattgggatgtgtgtcagcaaaggaatggtctgtcttgtctcatgcttattgatacttgtcacaatttcataccaaaaaatttactaactcttttttttgttttaattctttgtgccaggaatttaagcctcaacctgctattccgttcatctcttgtccccctgaacatattgaggaagctcttctcgatatccacaaaagggcacctggtctccaactgttgattgtaatattgcctgatgtgactggatcatatggtaagtctgtgctaatgattggtaatatttggtgcaaagtttattccgacaatctgttcatgaagtactctttctgtctgcaggaaaaataaaaaggatctgtgaaacagaattggggattgtctctcagtgttgccaacctagacaagttaataaactcaacaagcagtacatggaaaatgttgccttgaagatcaatgtcaaggtctagtcatctgtgcttcttattgttttttatgatggtgtaaaacgggtatttgtattacagactgggggaaggaacactgttcttaatgatgctattagaagaaacatacctcttattactgatcgtccaaccatcatcatgggtgctgatgtgactcacccacagcctggagaggactcaagtccttctattgctgctgtatgtatatcttattttacttgtatctcattatactactgtttcatcataaaaggtaattctcttatttcaactacaggttgtggcctctatggactggcctgagataaacaaataccgaggattggtttctgctcaagctcatagggaagaaattattcaggacctgtataagctggttcaggatccacaacgtgggctagtccactctggtttgataaggtaagagcaaaacatctacaacttcttgtgttctttgatttttcacaagaataaatataatggacactgtttgtgattgcagggaacatttcatagcattcaggagagctacaggccagatacctcaaaggatcatcttctatcggtaagtggttctcacattccatgcttaaacatttcatagcatgagcaggtttggctaattgctttctctttatacagtgacggagtaagcgaagggcagtttagtcaggttctgctacatgagatgactgctatccgcaaggcttgtaactctctccaagagaattatgttcctcgtgttactttcgtgattgtccagaaacgtcaccacacacgtttgttccctgagcaacacgggaatcgtgatatgactgataagagtggcaatattcaaccaggtttctcactctctgctcttctctatcaacttaattcctttaatgatccagatttcaagtaacatatttgtatttccttatcaggtactgtcgtggacactaaaatctgtcaccctaatgaattcgacttctatttgaacagccatgctggtattcaggtattgcttccagaatctagaccaatttatgacctgttttgtctcagcagaattacaacttcctttgaatgtttgaatggtaatagggaacaagcaggccggcacattaccatgtacttctcgatgagaacggtttcaccgctgatcagttgcaaatgctcacaaacaacctctgctacacgtaagagacaacaacattgtacattttccttatgacatgttttaactctctgaaactaacaaaacatataataaaatgcatatgcaggtatgcgaggtgtacaaaatctgtgtcaattgtgccaccagcctactacgctcacttggctgcattccgtgcccgctactacatggagagtgagatgtctgatggaggttcgagcaggtccaggagctcaacaacaggtgtgggtcaagtcatttcgcagctcccagcaataaaagataacgtcaaggaggttatgttttattgctaatgattcacttcttctcttgccagttttaaaagccgttaataattatgaaaactatattcggctctcggttatctcttttgggtttggctgttaatattttgaaggatctggccaacttttgcgccttaggacttatgttatgcgttttggtttcagatgatgactacttttatcgtttgtga

SEQ ID NO: 63 - DNA, 5572 bp, Arabidopsis thaliana
  source 1..5572: mol_type = genomic DNA
tgtgtttgggggtgatgggagatgatgattttatagtagtttaaaggaagatctataggaggtttttgcttttctccagttacagtttcgatttgagatattaaaagtatgaattaaattgcaagtagtggaattttgtaggaattaagccatgtatttaagtaccttttagtaaataactgttgatgtttgagcttctggggaagaaaaatacggaaagctccatggggcatgttggagatggattgcacccctcattttagctcggcccaaatcaagaataaactaatcaacatcaagcccaaaaagcccataaaagttggtccatgatcctatcaccagcttagtttttctataaatagagaggcatctcaaggaaaaaaggaggaaaaaatccatattaaaacgtcttcaagctcctcagctcgttctctagctcctctgctcgccctcaagctcctcagctcgtcctcaagctccttagctcgttctcaagctcctctgctcgtcctctagctcctctgctcgtcctcaagcttctcagctcgtcctcaagctcctcagctcgtcctcaagttccccagctcgtcctcaagctcctgagctcgtcctcaagctcctcagctcgtctttaagctctccagctcgtcttcaagctccacatcactcaacgaccatctcctcgcctagctataaaactaataaactatgtttatcgcaagaacgacctaactcccgaccttcaacgcgatgagaatgtttttcccttatcaaagaacttagaaatatactttgttgaaattcgtgcatcaacagggcagtgactgaaacactctttttctctttcgtcgtcctctgaattgcgtcgatcgaataggagaaaatgaaatcaagggtttgcaattttaactgggttttcttaggtcatttcggttcataggttttttgactaaatcttggcccgataaacatcactaagtctatttggttctttggctcatgggctttttgaccaaatcgtggccccataaacattactaaatctatttcacgcataaaaaaaaatgtgaaggcgagtaaaaacatgtgggctccacattaaaaagatgtagtgacgtggacacttttagaagagagaaaactctgctattatatatatgatttgtttattttccatcaatatacgaatatctctacttccttttttaaagactctttaaatcttaatcaatcgttcataatatatctccagttgcattcattatccttctaaatcctctcttattagtctttaatcataaataaaaaataatacatcaatgagagttctttccaccgtccgatcaaactctggtatattgacgtcagcaatcggacgtaaacatgtcgaagttaacttgctacgcgaaacagaggattaatctctcagccaataagagacctgagaagacgagaagaaaaaagaagactttggtccttggacttgggtctttctttctctttttctttcgataattattgtacttggttctttgttctcagtgtaaatgaaagtgagaatccaaaggctatcatcggaaactgagggaacagagatcattcatcgccgcggtaagttatctgtcatcgtatatctttaagccctctgtttcttcttgtttgagtagtgatcttagattcttcaaaaaatattgtttaggttgatatagagaaagatggggaagacaattcaagtgtttggattccctaatggtgtgagcgcagaagaagttaagaagtttcttgaaagactcactggttcaggcactgtttacgcaatcaaagttagacaaccaaagaaaggtggtccaagagtctatgccattgttcaattcacatctgagagacatacgaggctgatcatcactgcggcagcagaacgtctttactatggaagatcttatctcaaggcttttgaagttgaacaagacattgttccaaagccaagagcttcattacacaccatctctggtttaaagatgttctttggatgtcaagtctcgactaagaagtttttaactctatggagtgctcaagatgtttgtgtctcgtttggaattgggatgaggaaactgcatttttcgttttcttggtatcaaaaggattatcgtcttgagctttcgtatgagaatatatggcagattgatttgcattctccgcaaggacgatcatcgaagtttcttgtgattcaggtgattggtgctcctaaaatatttgagaaagaggatcaacctatcaatcttttgtttggaataatggatttttacagtgatgggtctgatgagcaatggattagaactacagatttcacttcatcttcttgtattggtcaatcaacagcgttttgtttagagcttcctgttcatcttaatgttcctgatttcagagagaattttgccaactatgcagagcacagagccagctcttttctcattgaatctggttctagctattcatctaatgctaacacacttgttcctgttgttgatcctcctccagggtttagtttgccttttgagatcttgtttaaacttaacacattggtgcagaacgcgtgtctctccgggccagctcttgatcttgacttttatcggttgcttaatcagaaaaaatatgatagagctctcatagatcactgtcttgaaaaactctttcaccttggagaatgttgctatgagcctgctcattggcttcgcgatgagtacaagaagtggatatcgaaaggaaagcttccactgtctcctacaatatctcttgatgatggacttgtttatatgtatcgcgttcaagttacaccagcaagagtctatttctctggaccggaggtgaatgtttctaatcgtgtgcttcgacattactccaagtatatcaacaacttcctcagggtctcatttgttgatgaagatcttgaaaaggttcgttccatggatctatctccacgctcttctactcaaagaagaaccaagttatacgacaggatatattctgttcttcgcgatgggattgtcataggcgataagaagtttgagtttctcgccttttcttccagccagttgcgggagaactctgcttggatgtttgcaccaatagatcggattacagcagcacatatcagagcttggatgggtgattttgaccatataagaaatgtagctaaatatgctgcaaggcttggtcaatcttttagctcttcaagagagacacttaatgttaggagtgatgagattgaagtgattcctgatgttgagattatatctttagggacacgctatgtgttttccgatggaataggaaagatatcagctgaatttgctagaaaggtagcgaggaaatgtggtcttacagagttttctccatctgcttttcaaatccgttatggcggttataaaggagtggtggctgttgatccaaactcatcaaagaaactgtctctgaggaagagtatgagcaaattcgaatcggagaacaccaagcttgatgttctggcgtggagcaagtaccaaccttgttatatgaacagacaactgattacacttttgtctactcttggagttacggacagtgtgtttgagaagaaacaaagggaagttgtggatcgtctcgacgcaatcttgactcatcctttggaagctcacgaggctcttggtttaatggctccaggggaaaacacaaatattctcaaggcattgatcttgtgtggctataaacctgacgctgaacctttcctttcaatgatgcttcagaatttcagggcatctaagttgttggaactacggacaaaaacaaggattttcatttctggtggaagatctatgatgggatgcctagacgagaccagaacactggagtatggtcaggtagtagtgcagtattcagatcccatgaggccgggaaggcgattcatcatcaccggacctgttgttgttgccaaaaacccatgcctgcatcctggtgacgtgcgtgttcttcaagctgtcaatgtcccagctttaaatcatatggtggactgcgttgtgttcccgcaaaagggcttgaggtaaacatttttctatgcttgattcgtgtttttttcgagcttttattgttttaagtctcgaacttttcattggaatcttgtgttcttttgtgcataggccacacccaaatgaatgttctgggagtgatttagatggagatatttactttgtatgttgggatcaagaattggttccgccaagaacgtctgaaccaatggactacactcctgaaccaactcaaatcttggatcatgatgtcacaattgaggttataataaaatttgatcactttggttatatttttgtttttttggcgttaggagattgattggctaccttggtttccaggaagttgaagagtactttgcgaactacattgtgaatgatagtttagggatcatcgcgaatgctcataccgcctttgcggataaggaaccactcaaggcgtttagtgacccatgcattgagcttgcaaagaagttttcaactgcggtagatttcccaaaaactggtgttgcagctgtgataccgcaacatctttacgtgaaagagtatcctgatttcatggagaaaccggataagccaacatatgagtcgaagaacgtgattggtaagctttttagagaggtaaaagagcgagctccaccgttgatctcgatcaaatcattcacgcttgatgtggcctcaaagtcttatgataaagacatggaagttgacggatttgaggagtatgttgatgaagctttctaccagaaggcgaattatgatttcaagttaggtaatttgatggattactatgggattaagactgaggctgagattcttagtggtggtataatgaggatgtcaaagtcattcaccaagagacgagatgcagaatcgattggaagagcggttcgggcgttgaggaaagaaactttgtcgttgttcaatgcttctgaagaagaagaaaatgagtcagcaaaggcttcggcttggtatcatgtaacgtaccactcaagttactggggactttataatgagggtttgaatcgtgaccatttcttaagttttgcgtggtgcgtttatgataagcttgtgaggatcaagaagaccaatcttgggaggcgtcagcggcaggagacgctcgagcggttagaccatgttctgcgtttcggttgattttttttttttggttctgacttatgtcttatgatgtacataaatgtttggttttgtgtgcaatcagcaatttctataaatatggttggtttttagtgaaatcagaagtttctactttcttatttgatcgaattaactcaaatttgaagcttcattcattctttttttttacagtatctcgaaaacatttgtacaaaaatctctaaaattaattagtaccaaacagaaaaacttgctaccactaagagttctatgttcgacctctcaacatatgtatgtacataaacaatttctctgaatgggccaatcccattaaagcacatacacagctctatatattcacacactccaaaatc

SEQ ID NO: 64 - DNA, 11579 bp, Arabidopsis thaliana
  source 1..11579: mol_type = genomic DNA
tgtactaatattaaaaagttctcgataataatcttttttatttttaaatgcaagacttgcaccaactttctctataatggataaaaggtcgatgaatgatattttagggttgactaatttgttatacgatgatacaatcgagttttatccgattattactatggtagtaaataacgcggtcaaatgtggtcgaaccgaactggtgacgatcataacatcaaatgtggtcgaaccgagtgacgatcaaaatatcaacatatgtggtcgaacgactgaaaaccaaactagccaaaaacacacatcaacttttttcggtttggcttagttaccctagaagattaccctcaaacaaacaaaacccaaaaaaattaaaatattaattttaaaatagaagaaacatattttaagaaaaagtcatttcttttaattgttactttagttttggacactacaagctgaccgagtagtccaacattcgatatgaaagaaagtggctcactgcctatatagctctcgccactgggagaatacaaggttcgatcctagattttgatggaatgtcaaccaagattcataatttgtgcacttgttttttccccataatttcttagttaaaggtacatcaatataaattttaagtagtcaagtgtgtccaatcaacaaaaggtaaatctataaaaatttggaaatttatcaaaatgaatcaatgtaatgttgtataatatggaaaaatatgtagtttagatgtttttactttataatacttatcattgctgcatcaccactcatattaaaaatgactaaataaatactcaagtatgtgttaacctcataaaaatgaaatgaggttaaacttctgcaatttcacatatggtaaattgtttctagagctaaaagacctgcaacaaggtgattcaatcttcttcttcgacatttaacaagtcggaagttcatgctacaaatatcagtacaaaaaatcatactctatccatttcaaattaaatttagttcaagtgtatacgtaaatttaaaaaatgaacgcattttagattttcaaaatctgagatcaaatacctaatttaaccttatcaaaatcaagagtcatctagattgtaagggtataatagaaattataatgtttttaataattttttgtaaaaattttaaatgacacttaaagtaaaacggagagaagataacttaacagccacgaaatcgcgacttgagatttcaaagagataaagtattcatctatgtactttggcacatcaatactcttaaaatttaccaaaatatgtaatataacatccctaaccatcaacaacaatcaacataaattttaatatatatgtttttgtaattttcgtaaaaatgttaaaacaacacttatagtaaaacaaagagaggataacttaacagccaaagaattgagatttgagatttcgaagagataagatattcatctatatatcttgacacatcagcactctaaaaatttaccaaaagatgtattttaaaatctctaaactcaataactccacaaaaattttcagaatcaatgattgtagaaacacatgatttctggttcagaatttcacacactccacccaaaaaaatacccttaaaaagttataattgtattgattagctgataaaatcaatttattggaaagaaatcctaataataacgctgtaatagaagagaagagaagagagagggagacgtgagatcgtgaattatgcgtgacgaagttgacttgagcttgaccattccctcgaagcttttggggaagcgagacagagaacaaaaaaattgtgaagaagaaaaaaacaaaaacaaaaaagctaaaaagcagcaaaaggacccaattcttcttcacactagtgctgccactcacaagtttcttcctcctcctttgaccatgccgtacagtgaaatcggcgacgatcttcgctcactcgactttgaccacgccgatgtttcttccgaccttcacctcacttcttcttcctctgtttcttcgttttcctcttcttcgtcttctttgttctccgcggctggtacggatgatccttcaccgaaaatggagaaagaccctagaaaaatcgccaggaggttcgattttttctcgtctttgccaacacttttcatagctcgcattatcttcggttttgctttgcttccttgcttacgattttgtacggatggtattttatcgattctgttgttgtatcggattgtctttagggaaagatcgcgacgagttttttttgtttgtgtgtgttgcttgtggtgaaattcgtttttgagaaggcttaatgattttgtttcgctgtatgaaggtatcaggtggagctgtgtaagaaagcaacggaggagaacgttattgtatatttgggtacaggttgtgggaagactcacattgcagtgatgcttatatatgagcttggtcatttggttcttagtcccaagaaaagtgtttgtatttttcttgctcccaccgtggctttggtcgaacaggtgtgaggctgttcatcttgattatatgtcggtgtttaatgcggattgattagttctaactgtcttgagtttgttgttgtttacagcaagccaaggtcatagcggactctgtcaacttcaaagttgcaatacattgtggaggcaagaggattgtgaagagccactcggagtgggagagagagattgcagcgaatgaggtgatttcctgttttctcattctatttttagcctatgagactcatttaagttgattgttatttccattttacaattatgtaggaaccatcactttattatatgcgatcttctttcaattgtttgttttgttcttgggactgaattttcctgcaggttcttgttatgactccacaaatacttctgcataacttacagcactgtttcatcaagatggagtgtatctcccttctaatatttgatgagtgtcaccatgctcaacaacaaagcaaccatccttatgcagaaatcatgaaggtatcttccttcacattattggtatatcgtgcttgaaatattattaacatataatcaacttttagttgctccactttgttgcaaatgcaggttttctataaatcggaaagtttacaacggcctcgaatatttggaatgactgcatctccagttgttggcaaaggtaggcccatttttctaatggtgactatggattgctggtccattactgtccaaagattttattatgatttagcttctgcattgagttccttttgttcgttctctttcggttgtgaggtttgtcgtgatcttgataatacatgtttacttttgatcatctcgttctatagatggtccacctcttgacagctttacctacttttcagggtcttttcaatcagagaatttatcgaaaagcattaatagccttgaaaatttgctcaatgccaaggtatgctggttctgaaattcccttggttggctgttggcagatgaacttagaacacatttttggtatttaagtagcaagatatctttcctagaattgaatactgccggcttatttatattgagccctatcacgctgtgttttgggtgataccaaagtagaaataatactctgagaaagcttgaatcttttgttttttttggtattttcggcccaagcttatggtaccaaactaatcatttattggaagtctaaggcagaaatatctttctcatgtttagattcgtactaatgttcttacattcagttggtctttcgaaacaatgttctaaaatttccctttttgtctctcgtgatctgaaaggtttattcagtggaaagcaatgtccagctggatggttttgtttcatctcctttagtcaaagtatattattatcggtcagctttaagtgatgcatctcaatcgaccatcagatatgaaaacatgctggaggacatcaaacagcgggttgtctaaatgtgtctcataaatcttttgaatcactgttcctcgatatatgagcttatatttcttcctgatatgaacagtgcttggcatcacttaagctgctgattgatactcatcaaacacaaaccctcctaagtatgaaaaggcttctcaaaagatctcatgataatctcatatatactctgctgaatcttggcctctggggagcaatacaggtagaaatttcatactgaaccaatttatagatttgatatcaggttttcagtttttgctttcagatgtattgattaccttgtatttcctggtttcttcaatgttttaccaagcagctgatgcatgttttagggtacagttattaccataattgccaactatattaaacttttgcattagtagtgtactagatcgaagtcaaagactacaatgactggcaagattcacaatagctgtacaatagggaaaaagtggaaaacaaataagggtttctgttagatgcttgctgaattgtataaaaattcctagagattttttttggtaaatttatgtgcatgtttctataatttgttacaaccatctaacctcgatatgtaaacttacctctttgccaaattaaaattatgtatgttgtttcttgttggtgtcatatgtgtcttaatgcatgttgtagcgtgctaatgtttattgtcttcgttttttggaggctgctaaaatccaattgaatagtgaccataatgtacaagacgagcctgtgggaaagaatcctaagtcaaagatatgtgatacatatctttctatggctgctgaggccctctcttctggtgttgctaaaggtaagatgacatagtaccatagtgagtgtttttttcttctgaaccttaaattttcttccaatacggccatggcagaaacggaaacgtttttcattacatatatttttctggagttccaacttttaaaatatttaacaaattctgcactggatttgtttttttcatgtgaatgccctattaaactagccattgattgcctaattattttttctcatcttttctgtggttgtagatgagaatgcatctgacctcctcagcttagcggcgttgaaggaaccattattctctagaaagctagttcaattgattaagatcctttcggtattcaggttggtacttgatagaggtgacagagtcttagaatgcttttataccgaatagtccataaagcatgtgtgaagtaaataaatgattgaactgtccttagctttattgagtggctacgtaaccaaaacccgatgcgttttctcaaagttaccatttgcgcgaaaaatgacaaacttactttatgtatgaaagtctagtcctacttacctttttttcctctctactttttttatttttttcattcgtaagataggactgagaacctagaaatgaagctttatagatacacaagaaaatttgctatcgtcgatagatctctgttcaaaagtcagaatatggccttttctgagtaaacaacattcagctcatgtcctttcctagtaaacaacttccagctcttgattcaccattaaaaagacattggatatttctatatgaacatggtagttgttattgtccactgggtcttgtgaaatcttaattgcttttcaccacattgtgcttgattcacttgtcatgcattatggaagagaaaccaatggtatttcttgcagtaaacttccatttttctttttctttcaggctagagccacacatgaaatgtataatatttgtcaatcggattgtgactgcaagaacattgtcatgcatactaaataacttggaactgctacggtcttggaagtctgatttccttgttggacttagttctggactgaagagcatgtcaagaaggagtatggaaacaatacttaaacggttccaatctaaagaggtgataatttagccatctttattcctatagttagtattcggagatatctgcacttaatattcctacacccatgatatttaaacacccatttcgataaacatgtattgtctaggattaatcgtcaagccacttccatttaacttctagaggttccttttactgttccagctcaatttactggttgccactaaagttggtgaagaaggccttgatattcagacatgctgtcttgtgatccgttatgatttaccagagactgttaccagcttcatacagtccagaggtcgtgctcgaatgcctcagtctgaatatgcgtttctagtggacaggtttgcacgaatgagaaaatgataagcccataagtatgagtccttacgcgattaacaatgttttcttttatgattcagcggaaacgagaaagagatggatcttattgaaaattttaaagtaaatgaagatcgaatgaatctagaaattacttacagaagctcagaggaaacttgtcctagacttgatgaggagttatacaaagttcatgagacaggagcttgtatcagtggtggaagcagcatctcccttctctataaatattgttctaggcttccacatgatgagtaaggctttaaattttctgttgtgttctttttaaaaagagtcaccttccatagtaaatgggagcttgttcgtggcataactgaatctccctttgccacattttgattccctcagattttttcagcccaagccagagtttcaattcaagcctgttgacgaatttggtggaactatctgtcgcataactttacctgctaatgctcctataagtgaaatcgaaagttcactactaccttcgacagaagctgctaaaaaggatgcttgtctaaaggctgtgcatgagttgcacaacttgggtgtacttaacgattttctgttgccagattccaaggatgaaattgaggacgaattgtcagatgatgaatttgattttgataacatcaaaggtgcatgcgtggttcagttataaaatctaagcttttttatgctattcgtttgttgtataacgccatctattttacttcctgctaggtgaaggctgttcacgaggtgacctgtatgagatgcgtgtaccagtcttgtttaaacaaaagtgggatccatctacaagttgtgtcaatcttcattcttactatataatgtttgtgcctcatcccgctgataggatctacaaaaagtttggtttcttcatgaagtcacctcttcccgttgaggctgagactatggatatcgatcttcaccttgctcatcaaagatctgtaagtgtaaagatttttccatcaggggtcacagaattcgacaacgatgaggtactgagattttaattagataaataataaactagaatgaactcctcttatttgataatgtttatgcagataagactagctgagcttttccaggagattgccctgaaggttctttttgaacggggggagctgatcccggactttgttcccttggaactgcaagactcttctagaacaagcaaatccaccttctaccttcttcttccactctgtctgcatgatggagaaagtgttatatctgtagattgggtgactatcagaaactgcttgtcatcaccaatctttaagactccatctgttttagtggaagatatatttcctccttcgggctctcatttaaagctagcaaatggctgctggaatattgatgatgtgaagaacagcttggtttttacaacctacagtaaacaattttactttgttgctgatatctgccatggaagaaatggtttcagtcctgttaaggaatctagcaccaaaagccatgtggagagcatatataagttgtaagctactaaacttctattattcagtaattgtttgattgcgacttttctcaggggcatgtattctgtcttttctttcttgttaatgttctttttctttttctacaatccattataaaattggttgagactctagatttgaggattatatgattttctgagttaagaaccttcttatttttatgcacaaactaggtatggcgtggaactcaagcatcctgcacagccactcttgcgtgtgaaaccactttgtcatgttcggaacttgcttcacaaccgaatgcagacgaatttgggtagattttcttatctgatttttgcatatcacaattttcttgtgcatgtacatgtacacacagcacaccttttgacctttgtatactgtaattgttaattctcatgttttggttcaaatgttaataacattctcacattgccaagaacagaaccacaagaacttgacgaatacttcatagagattcctcccgaactttctcacttaaagataaaaggattatctaaagacatcggaagctcgttatccttgttaccatcaatcatgcatcgtatggagaatttactcgtggctattgaactgaaacatgtgctgtctgcttcgatccctgagatagctgaagtttctggtcacagggtatgatctcatttcacttgataacccatttacttgattttcctaaaatttgttgatgtttgatactttactgaccgagtgaattggtataggtactcgaggcgctcacaacagagaaatgtcatgagcgcctttctcttgaaaggcttgaggtgcttggtgatgcattcctcaagtttgctgttagccgacacctttttctacaccatgatagtcttgatgaaggagagttgactcggagacgctctaacgttgttaacaattccaacttgtgcaggcttgcaataaaaaaaaatctgcaggttctcatgtttcctataaatgctttgattgctggtacaatttaaatctggttttagctgtgattgctgcacacaacgcaaatacttatcatgtgcagaagcgccgtcagaccctttgcctccatacaattaatacagtctcaatgacatgttttcaaaaacaaagctttttagatagaggcagacaaaaacgtattaattttattgtttagttttgtataatattaacttgtgcgtcttcccaggtctacatccgtgatcaagcattggatcctactcagttctttgcatttggccatccatgcagagtaacctgtgacgaggtagccagtaaagaggttcattccttgaatagggatcttgggatcttggagtcaaatactggtgaaatcagatgtagcaaaggccatcattggttgtacaagaaaacaattgctgatgtggttgaggctcttgtgggagctttcttagttgacagtggcttcaaaggtgctgtgaaatttctgaagtggattggtgtaaatgttgattttgaatccttgcaagtacaagatgcttgtattgcaagcaggcgctacttgcccctcactactcgcaataatttggagacccttgaaaaccagcttgactataagttcctccacaaaggtctacttgtacaagcctttatccatccatcttacaacaggcatggaggaggctgctaccaggtatttttgtgtttccttcttatttttcatttctctcgataatatccatctatggtaaccaaatttctctaattgggggtcctcagagattggagtttcttggggatgctgttctggactacttgatgacatcctattttttcacagtcttcccgaaactgaaacctggtcaactgaccgatctaagatctctctcagtaaataatgaggcgctagcaaatgttgctgtcagtttttcgctaaagagatttctattttgcgagtccatttatcttcatgaagttatagaggattataccaatttcctggcatcttccccattggcaagtggacaatctgaaggtccaagatgcccaaaggtgcgttccgatctccctttcacatgtcatagtaaaacaatgataagattcactcgtattgatatcatcttacttacattttgagaatctcgaactatctctgttacctttctaccttaatatctttttatctatacgagatgttgagaatggaagagactatccccatctcattagttttagtttgcagtcaattaatatcttaattacataagaacatacataggtaaattagtggaagagctaatatagttattatattcttatgcaggttcttggtgacttggtagaatcctgtttgggggctcttttcctcgattgtgggttcaacttgaatcatgtctggactatgatgctatcatttctagatccggtcaaaaacttgtctaaccttcagattagtcctataaaagaactgattgaactttgccagtcttacaagtgggatcgggaaatatcagcgacgaaaaaggatggtgcttttactgttgaactaaaagtgaccaagaatggttgttgccttacagtttctgcaactggtcggaacaaaagagagggcacaaaaaaggctgcacagctgatgattacaaacctgaaggtactttctcaaaatcaaaagaaactgtagtgtaacaaatttcttcaattgatgtgatgtatatatatcttaagctatctagtgttcatatatgtaactcgttgttcaagaacttctttgtgtaattcatccgcaggctcatgagaacataacaacctcccatccgttggaggatgttctgaagaatggcatccgaaatgaagctaaattaattggctacaatgaagatcctatagatgttgtggatcttgttgggctggacgttgaaaacctaaatatcctagaaacttttggcgggaatagtgaaagaagcagctcatacgtcatcagacgaggtctcccccaagcaccatctaaaacagaagacaggcttcctcaaaaggccatcataaaagcaggtatgtggatgaattcttgtgtattttatcaggagattgtaaatttagtgcaatcttgaattatcgattctattactccacaggtggaccaagcagcaaaaccgcaaaatccctcttgcacgaaacatgtgttgctaactgttggaagccaccacacttcgaatgttgtgaagaggaaggaccaggccacctgaaatcgtaagtaacttgatcaaacacactgctaaatctctgaacttgagcgcgctagaaacttaataaacaaaatatcggtaattggaatttaatgtcatcaattgtgtgcatgaatacagattcgtctacaaggtaatcctggaagttgaagatgcgcccaatatgacattggaatgttatggtgaggctagagcaacgaagaaaggtgcagcagagcacgctgcccaagctgctatatggtgcctcaagcattctggattcctttgctgatgatctcgagcggctatatatcggttagaaatagatgttatcataggcatatataacttttaccagagctacatattagcatatatgatcgacacctacaatttctcgaaagagaaaaaaggatgtctgaaaactaaccttaaaccatagattttggagcggagagctttcggcaaaagttctcttcgattgctcttctgaatttctgaatataagtatatgtttacttgtacttgatgaacccatagcatgataggctccaaaaatatagtttactcatctctcatgcatcaaatatgttcctgtgtgatcttaattaaacaatatatgaactaagcgtta

SEQ ID NO: 65 - protein, 924 aa, Arabidopsis thaliana
MDSTNGNGADLESANGANGSGVTEALPPPPPVIPPNVEPVRVKTELAEKKGPVRVPMARKGFGTRGQKIPLLTNHFKVDVANLQGHFFHYSVALFYDDGRPVEQKGVGRKILDKVHQTYHSDLDGKEFAYDGEKTLFTYGALPSNKMDFSVVLEEVSATRANGNGSPNGNESPSDGDRKRLRRPNRSKNFRVEISYAAKIPLQALANAMRGQESENSQEAIRVLDIILRQHAARQGCLLVRQSFFHNDPTNCEPVGGNILGCRGFHSSFRTTQGGMSLNMDVTTTMIIKPGPVVDFLIANQNARDPYSIDWSKAKRTLKNLRVKVSPSGQEFKITGLSDKPCREQTFELKKRNPNENGEFETTEVTVADYFRDTRHIDLQYSADLPCINVGKPKRPTYIPLELCALVPLQRYTKALTTFQRSALVEKSRQKPQERMTVLSKALKVSNYDAEPLLRSCGISISSNFTQVEGRVLPAPKLKMGCGSETFPRNGRWNFNNKEFVEPTKIQRWVVVNFSARCNVRQVVDDLIKIGGSKGIEIASPFQVFEEGNQFRRAPPMIRVENMFKDIQSKLPGVPQFILCVLPDKKNSDLYGPWKKKNLTEFGIVTQCMAPTRQPNDQYLTNLLLKINAKLGGLNSMLSVERTPAFTVISKVPTIILGMDVSHGSPGQSDVPSIAAVVSSREWPLISKYRASVRTQPSKAEMIESLVKKNGTEDDGIIKELLVDFYTSSNKRKPEHIIIFRDGVSESQFNQVLNIELDQIIEACKLLDANWNPKFLLLVAQKNHHTKFFQPTSPENVPPGTIIDNKICHPKNNDFYLCAHAGMIGTTRPTHYHVLYDEIGFSADELQELVHSLSYVYQRSTSAISVVAPICYAHLAAAQLGTFMKFEDQSETSSSHGGITAPGPISVAQLPRLKDNVANSMFFC

SEQ ID NO: 66 - protein, 924 aa, Arabidopsis thaliana; identical to SEQ ID NO: 65

SEQ ID NO: 67 - protein, 896 aa, Arabidopsis thaliana
MDSDEPNGSGLPPPPPFVPANLVPEVEPVKKNILLPMARPRGSGSKGQKIPLLTNHFGVKFNKPSGYFFHYSVAINYEDGRPVEAKGIGRKILDKVQETYQSDLGAKYFAYDGEKTLFTVGALPSNKLDFSVVLEEIPSSRNHAGNDTNDADRKRSRRPNQTKKFMVEISYAAKIPMQAIASALQGKETENLQDALRVLDIILRQSAARQGCLLVRQSFFHNDVKNFVPIGGGVSGCRGFHSSFRTTQGGLSLNIDTSTTMIVQPGPVVDFLLANQNKKDPYGMDWNKARRVLKNLRVQITLSNREYKISGLSEHSCKDQLFTWRKPNDKGEFEEVEITVLNYYKERNIEVRYSGDFPCINVGKPKRPTYFPIEFCNLVSLQRYTKSLTNFQRAALVEKSRQKPPERMASLTKGLKDSNYNADPVLQDSGVSIITNFTQVEGRILPTPMLKVGKGENLSPIKGKWNFMRKTLAEPTTVTRWAVVNFSARCDTNTLIRDLIKCGREKGINVEPPFKDVINENPQFRNAPATVRVENMFEQIKSKLPKPPLFLLCILAERKNSDVYGPWKKKNLVDLGIVTQCIAPTRLNDQYLTNVLLKINAKLGGLNSLLAMERSPAMPKVTQVPTIIVGMDVSHGSPGQSDIPSIAAVVSSRQWPLISKYKACVRTQSRKMEMIDNLFKPVNGKDEGMFRELLLDFYYSSENRKPEHIIIFRDGVSESQFNQVLNIELDQMMQACKFLDDTWHPKFTVIVAQKNHHTKFFQSRGPDNVPPGTIIDSQICHPRNFDFYLCAHAGMIGTTRPTHYHVLYDEIGFATDDLQELVHSLSYVYQRSTTAISVVAPVCYAHLAAAQMGTVMKYEELSETSSSHGGITTPGAVPVPPMPQLHNNVSTSMFFC

SEQ ID NO: 68 - protein, 878 aa, Arabidopsis thaliana
METSSSLPLSPISIEPEQPSHRDYDITTRRGVGTTGNPIELCTNHFNVSVRQPDVVFYQYTVSITTENGDAVDGTGISRKLMDQLFKTYSSDLDGKRLAYDGEKTLYTVGPLPQNEFDFLVIVEGSFSKRDCGVSDGGSSSGTCKRSKRSFLPRSYKVQIHYAAEIPLKTVLGTQRGAYTPDKSAQDALRVLDIVLRQQAAERGCLLVRQAFFHSDGHPMKVGGGVIGIRGLHSSFRPTHGGLSLNIDVSTTMILEPGPVIEFLKANQSVETPRQIDWIKAAKMLKHMRVKATHRNMEFKIIGLSSKPCNQQLFSMKIKDGEREVPIREITVYDYFKQTYTEPISSAYFPCLDVGKPDRPNYLPLEFCNLVSLQRYTKPLSGRQRVLLVESSRQKPLERIKTLNDAMHTYCYDKDPFLAGCGISIEKEMTQVEGRVLKPPMLKFGKNEDFQPCNGRWNFNNKMLLEPRAIKSWAIVNFSFPCDSSHISRELISCGMRKGIEIDRPFALVEEDPQYKKAGPVERVEKMIATMKLKFPDPPHFILCILPERKTSDIYGPWKKICLTEEGIHTQCICPIKISDQYLTNVLLKINSKLGGINSLLGIEYSYNIPLINKIPTLILGMDVSHGPPGRADVPSVAAVVGSKCWPLISRYRAAVRTQSPRLEMIDSLFQPIENTEKGDNGIMNELFVEFYRTSRARKPKQIIIFRDGVSESQFEQVLKIEVDQIIKAYQRLGESDVPKFTVIVAQKNHHTKLFQAKGPENVPAGTVVDTKIVHPTNYDFYMCAHAGKIGTSRPAHYHVLLDEIGFSPDDLQNLIHSLSYVNQRSTTATSIVAPVRYAHLAAAQVAQFTKFEGISEDGKVPELPRLHENVEGNMFFC

SEQ ID NO: 69 - protein, 850 aa, Arabidopsis thaliana
MDTTLPPPQHMEREPLKSKSSLLPMTRRGNGSKGQKILLLTNHFRVNFRKPNSHNFFHYSVTITYEDGSPLLAKGFGRKILEKVQQTCQADLGCKHFAYDGDKNLYTVGPLPRSSLDFSVVLETAPSRRNADKRLKLPHQSKKFNVAILFAPPEIPMEAIANALQGKKTKHLLDAIRVMDCILSQNAARQGCLLVRQSFFHNDAKYFANIGEGVDCCKGFHSSFRTTQGGLSLNIDVSTAMIVKPGPVVDFLIANQGVNDPFSINWKKAKNTLKNLRVKVLPSNQEYKITGLSGLHCKDQTFTWKKRNQNREFEEVEITVSDYFTRIREIELRYSGGLPCINVGKPNRPTYFPIELCELVSLQRYTKALTKFQRSNLIKESRQNPQQRIGVLTRALKTSNYNDDPMLQECGVRIGSDFTQVEGRVLPTPKLKAGKEQDIYPINGSWNFKNKPATVTRWAVVNFSARCDPQKIIDDLTRCGKMKGINVDSPYHVVFEENPQFKDATGSVRVDKMFQHLQSILGEVPPKFLLCILEKKNSDVYEKSCSMWNCECIVPPQNLNDQYLTNLLLKINAKLGGLNSVLDMELSGTMPLVMRVPTIIIGMDVSHGSPGQSDHIPSIAAVVSSREWPLISKYRACVRTQSPKVEMIDSLFKPVSDKDDQGIMRELLLDFHSSSGKKPNHIIIFRDGVSESQFNQVLNIELDQMMQINHHTKFFQTESPNNVLPGTIIDSNICHQHNNDFYLCAHAGKIGTTRPTHYHVLYDEIGFDTDQLQELVHSLSYVYQRSTTAISLVAPICYAHLAAAQMATAMKFEDMSETSSSHGGITTAGAVPVPPMPKLNTNVASSMFFC

SEQ ID NO: 70 - protein, 839 aa, Arabidopsis thaliana
MAPKRKRPATKDDTTKSIPKPKKRAPKRAKTVKEEPVTVVEEGEKHVARFLDEPIPESEAKSTWPDRYKPIEVQPPKASSRKKTKDDEKVEIIRARCHYRRAIVDERQIYELNDDAYVQSGEGKDPFICKIIEMFEGANGKLYFTARWFYRPSDTVMKEFEILIKKKRVFFSEIQDTNELGLLEKKLNILMIPLNENTKETIPATENCDFFCDMNYFLPYDTFEAIQQETMMAISESSTISSDTDIREGAAAISEIGECSQETEGHKKATLLDLYSGCGAMSTGLCMGAQLSGLNLVTKWAVDMNAHACKSLQHNHPETNVRNMTAEDFLFLLKEWEKLCIHFSLRNSPNSEEYANLHGLNNVEDNEDVSEESENEDDGEVFTVDKIVGISFGVPKKLLKRGLYLKVRWLNYDDSHDTWEPIEGLSNCRGKIEEFVKLGYKSGILPLPGGVDVVCGGPPCQGISGHNRFRNLLDPLEDQKNKQLLVYMNIVEYLKPKFVLMENVVDMLKMAKGYLARFAVGRLLQMNYQVRNGMMAAGAYGLAQFRLRFFLWGALPSEIIPQFPLPTHDLVHRGNIVKEFQGNIVAYDEGHTVKLADKLLLKDVISDLPAVANSEKRDEITYDKDPTTPFQKFIRLRKDEASGSQSKSKSKKHVLYDHHPLNLNINDYERVCQVPKRKGANFRDFPGVIVGPGNVVKLEEGKERVKLESGKTLVPDYALTYVDGKSCKPFGRLWWDEIVPTVVTRAEPHNQVIIHPEQNRVLSIRENARLQGFPDDYKLFGPPKQKYIQVGNAVAVPVAKALGYALGTAFQGLAVGKDPLLTLPEGFAFMKPTLPSELA

SEQ ID NO: 71 - protein, 1580 aa, Arabidopsis thaliana
MHSSLEPEKMEEGGGSNSLKRKFSEIDGDQNLDSVSSPMMTDSNGSYELKVYEVAKNRNIIAVLGTGIDKSEITKRLIKAMGSSDTDKRLIIFLAPTVNLVKQQCCEIRALVNLKVEEYFGAKGVDKWTSQRWDEEFSKHDVLVMTPQILLDVLRSAFLKLEMVCLLIIDECHHTTGNHPYAKLMKEFYHESTSKPKIFGLTASAVIRKGIVSSPSNYAAQVSELERLMDSKIFNPEEREGVEKFATTVKEGPILYNPSPSCSLELKEKLETSHLKFDASLRRLQELGKDSFLNMDNKFETYQKRLSIDYREILHCLDNLGLICAHLAAEVCLEKISDTKEESETYKECSMVCKEFLEDILSTIGVYLPQDDKSLVDLQQNHLSAVISGHVSPKLKELFHLLDSFRGDKQKQCLILVERIITAKVIERFVKKEASLAYLNVLYLTENNPSTNVSAQKMQIEIPDLFQHGKVNLLFITDVVEEGFQVPDCSCMVCFDLPKTMCSYSQSQKHAKQSNSKSIMFLERGNPKQRDHLHDLMRREVLIQDPEAPNLKSCPPPVKNGHGVKEIGSMVIPDSNITVSEEAASTQTMSDPPSRNEQLPPCKKLRLDNNLLQSNGKEKVASSKSKSSSSAAGSKKRKELHGTTCANALSGTWGENIDGATFQAYKFDFCCNISGEVYSSFSLLLESTLAEDVGKVEMDLYLVRKLVKASVSPCGQIRLSQEELVKAKYFQQFFFNGMFGKLFVGSKSQGTKREFLLQTDTSSLWHPAFMFLLLPVETNDLASSATIDWSAINSCASIVEFLKKNSLLDLRDSDGNQCNTSSGQEVLLDDKMEETNLIHFANASSDKNSLEELVVIAIHTGRIYSIVEAVSDSSAMSPFEVDASSGYATYAEYFNKKYGIVLAHPNQPLMKLKQSHHAHNLLVDFNEEMVVKTEPKAGNVRKRKPNIHAHLPPELLARIDVPRAVLKSIYLLPSVMHRLESLMLASQLREEIDCSIDNFSISSTSILEAVTTLTCPESFSMERLELLGDSVLKYVASCHLFLKYPDKDEGQLSRQRQSIISNSNLHRLTTSRKLQGYIRNGAFEPRRWTAPGQFSLFPVPCKCGIDTREVPLDPKFFTENMTIKIGKSCDMGHRWVVSKSVSDCAEALIGAYYVSGGLSASLHMMKWLGIDVDFDPNLVVEAINRVSLRCYIPKEDELIELERKIQHEFSAKFLLKEAITHSSLRESYSYERLEFLGDSVLDFLITRHLFNTYEQTGPGEMTDLRSACVNNENFAQVAVKNNLHTHLQRCATVLETQINDYLMSFQKPDETGRSIPSIQGPKALGDVVESIAGALLIDTRLDLDQVWRVFEPLLSPLVTPDKLQLPPYRELNELCDSLGYFFRVKCSNDGVKAQATIQLQLDDVLLTGDGSEQTNKLALGKAASHLLTQLEKRNISRKTSLGDNQSSMDVNLACNHSDRETLTSETTEIQSIVIPFIGPINMKKGGPRGTLHEFCKKHLWPMPTFDTSEEKSRTPFEFIDGGEKRTSFSSFTSTITLRIPNREAVMYAGEARPDKKSSFDSAVVELLYELERRKIVIIQK

SEQ ID NO: 72 - protein, 1570 aa, Arabidopsis thaliana
MHSSLEPEKMEEGGGSNSLKRKFSEIDGDQNLDSVSSPMMTDSNGSYELKVYEVAKNRNIIAVLGTGIDKSEITKRLIKAMGSSDTDKRLIIFLAPTVNLVKQQCCEIRALVNLKVEEYFGAKGVDKWTSQRWDEEFSKHDVLVMTPQILLDVLRSAFLKLEMVCLLIIDECHHTTGNHPYAKLMKEFYHESTSKPKIFGLTASAVIRKAQVSELERLMDSKIFNPEEREGVEKFATTVKEGPILYNPSPSCSLELKEKLETSHLKFDASLRRLQELGKDSFLNMDNKFETYQKRLSIDYREILHCLDNLGLICAHLAAEVCLEKISDTKEESETYKECSMVCKEFLEDILSTIGVYLPQDDKSLVDLQQNHLSAVISGHVSPKLKELFHLLDSFRGDKQKQCLILVERIITAKVIERFVKKEASLAYLNVLYLTENNPSTNVSAQKMQIEIPDLFQHGKVNLLFITDVVEEGFQVPDCSCMVCFDLPKTMCSYSQSQKHAKQSNSKSIMFLERGNPKQRDHLHDLMRREVLIQDPEAPNLKSCPPPVKNGHGVKEIGSMVIPDSNITVSEEAASTQTMSDPPSRNEQLPPCKKLRLDNNLLQSNGKEKVASSKSKSSSSAAGSKKRKELHGTTCANALSGTWGENIDGATFQAYKFDFCCNISGEVYSSFSLLLESTLAEDVGKVEMDLYLVRKLVKASVSPCGQIRLSQEELVKAKYFQQFFFNGMFGKLFVGSKSQGTKREFLLQTDTSSLWHPAFMFLLLPVETNDLASSATIDWSAINSCASIVEFLKKNSLLDLRDSDGNQCNTSSGQEVLLDDKMEETNLIHFANASSDKNSLEELVVIAIHTGRIYSIVEAVSDSSAMSPFEVDASSGYATYAEYFNKKYGIVLAHPNQPLMKLKQSHHAHNLLVDFNEEMVVKTEPKAGNVRKRKPNIHAHLPPELLARIDVPRAVLKSIYLLPSVMHRLESLMLASQLREEIDCSIDNFSISSTSILEAVTTLTCPESFSMERLELLGDSVLKYVASCHLFLKYPDKDEGQLSRQRQSIISNSNLHRLTTSRKLQGYIRNGAFEPRRWTAPGQFSLFPVPCKCGIDTREVPLDPKFFTENMTIKIGKSCDMGHRWVVSKSVSDCAEALIGAYYVSGGLSASLHMMKWLGIDVDFDPNLVVEAINRVSLRCYIPKEDELIELERKIQHEFSAKFLLKEAITHSSLRESYSYERLEFLGDSVLDFLITRHLFNTYEQTGPGEMTDLRSACVNNENFAQVAVKNNLHTHLQRCATVLETQINDYLMSFQKPDETGRSIPSIQGPKALGDVVESIAGALLIDTRLDLDQVWRVFEPLLSPLVTPDKLQLPPYRELNELCDSLGYFFRVKCSNDGVKAQATIQLQLDDVLLTGDGSEQTNKLALGKAASHLLTQLEKRNISRKTSLGDNQSSMDVNLACNHSDRETLTSETTEIQSIVIPFIGPINMKKGGPRGTLHEFCKKHLWPMPTFDTSEEKSRTPFEFIDGGEKRTSFSSFTSTITLRIPNREAVMYAGEARPDKKSSFDSAVVELLYELERRKIVIIQK

SEQ ID NO: 73 - protein, 1531 aa, Arabidopsis thaliana
MHSSLEPEKMEEGGGSNSLKRKFSEIDGDQNLDSVSSPMMTDSNGSYELKVYEVAKNRNIIAVLGTGIDKSEITKRLIKAMGSSDTDKRLIIFLAPTVNLQCCEIRALVNLKVEEYFGAKGVDKWTSQRWDEEFSKHDVLVMTPQILLDVLRSAFLKLEMVCLLIIDECHHTTGNHPYAKLMKIFNPEEREGVEKFATTVKEGPILYNPSPSCSLELKEKLETSHLKFDASLRRLQELGKDSFLNMDNKFETYQKRLSIDYREILHCLDNLGLICAHLAAEVCLEKISDTKEESETYKECSMVCKEFLEDILSTIGVYLPQDDKSLVDLQQNHLSAVISGHVSPKLKELFHLLDSFRGDKQKQCLILVERIITAKVIERFVKKEASLAYLNVLYLTENNPSTNVSAQKMQIEIPDLFQHGKVNLLFITDVVEEGFQVPDCSCMVCFDLPKTMCSYSQSQKHAKQSNSKSIMFLERGNPKQRDHLHDLMRREVLIQDPEAPNLKSCPPPVKNGHGVKEIGSMVIPDSNITVSEEAASTQTMSDPPSRNEQLPPCKKLRLDNNLLQSNGKEKVASSKSKSSSSAAGSKKRKELHGTTCANALSGTWGENIDGATFQAYKFDFCCNISGEVYSSFSLLLESTLAEDVGKVEMDLYLVRKLVKASVSPCGQIRLSQEELVKAKYFQQFFFNGMFGKLFVGSKSQGTKREFLLQTDTSSLWHPAFMFLLLPVETNDLASSATIDWSAINSCASIVEFLKKNSLLDLRDSDGNQCNTSSGQEVLLDDKMEETNLIHFANASSDKNSLEELVVIAIHTGRIYSIVEAVSDSSAMSPFEVDASSGYATYAEYFNKKYGIVLAHPNQPLMKLKQSHHAHNLLVDFNEEMVVKTEPKAGNVRKRKPNIHAHLPPELLARIDVPRAVLKSIYLLPSVMHRLESLMLASQLREEIDCSIDNFSISSTSILEAVTTLTCPESFSMERLELLGDSVLKYVASCHLFLKYPDKDEGQLSRQRQSIISNSNLHRLTTSRKLQGYIRNGAFEPRRWTAPGQFSLFPVPCKCGIDTREVPLDPKFFTENMTIKIGKSCDMGHRWVVSKSVSDCAEALIGAYYVSGGLSASLHMMKWLGIDVDFDPNLVVEAINRVSLRCYIPKEDELIELERKIQHEFSAKFLLKEAITHSSLRESYSYERLEFLGDSVLDFLITRHLFNTYEQTGPGEMTDLRSACVNNENFAQVAVKNNLHTHLQRCATVLETQINDYLMSFQKPDETGRSIPSIQGPKALGDVVESIAGALLIDTRLDLDQVWRVFEPLLSPLVTPDKLQLPPYRELNELCDSLGYFFRVKCSNDGVKAQATIQLQLDDVLLTGDGSEQTNKLALGKAASHLLTQLEKRNISRKTSLGDNQSSMDVNLACNHSDRETLTSETTEIQSIVIPFIGPINMKKGGPRGTLHEFCKKHLWPMPTFDTSEEKSRTPFEFIDGGEKRTSFSSFTSTITLRIPNREAVMYAGEARPDKKSSFDSAVVELLYELERRKIVIIQK

SEQ ID NO: 74 - protein, 626 aa, Arabidopsis thaliana
MVIWNNDDDDFLEIDNFQSSPRSSPIHAMQCRVENLAGVAVTTSSLSSPTETTDLVQMGFSDEVFATLFDMGFPVEMISRAIKETGPNVETSVIIDTISKYSSDCEAGSSKSKAIDHFLAMGFDEEKVVKAIQEHGEDNMEAIANALLSCPEAKKLPAAVEEEDGIDWSSSDDDTNYTDMLNSDDEKDPNSNENGSKIRSLVKMGFSELEASLAVERCGENVDIAELTDFLCAAQMAREFSEFYTEHEEQKPRHNIKKRRFESKGEPRSSVDDEPIRLPNPMIGFGVPNEPGLITHRSLPELARGPPFFYYENVALTPKGVWETISRHLFEIPPEFVDSKYFCVAARKRGYIHNLPINNRFQIQPPPKYTIHDAFPLSKRWWPEWDKRTKLNCILTCTGSAQLTNRIRVALEPYNEEPEPPKHVQRYVIDQCKKWNLVWVGKNKAAPLEPDEMESILGFPKNHTRGGGMSRTERFKSLGNSFQVDTVAYHLSVLKPIFPHGINVLSLFTGIGGGEVALHRLQIKMKLVVSVEISKVNRNILKDFWEQTNQTGELIEFSDIQHLTNDTIEGLMEKYGGFDLVIGGSPCNNLAGGNRVSRVGLEGDQSSLFFEYCRILEVVRARMRGS

SEQ ID NO: 75 - protein, 647 aa, Arabidopsis thaliana
MGSTVILSSDDEDSDISESEMDEYGDKMYLNLKGGKLKVRLSPQAFICPYCPNKKKTSFQYKDLLQHASGVGNSNSDKRSAKEKASHLALVKYLQQDLADSASEAEPSSKRQKNGNPIQDCDHDEKLVYPWKGIVVNIPTTKAQDGRSAGESGSKLRDEYILRGFNPTRVRPLWNYLGHSGTAIVEFNKDWNGLHNGLLFDKAYTVDGHGKKDWLKKDGPKLGLYGWIARADDYNGNNIIGENLRKTGDLKTIAELTEEEARKQELLVQNLRQLVEEKKKDMKEIEELCSVKSEELNQLMEEKEKNQQKHYRELNAIQERTMSHIQKIVDDHEKLKRLLESERKKLEIKCNELAKREVHNGTERMKLSEDLEQNASKNSSLELAAMEQQKADEEVKKLAEDQRRQKEELHEKIIRLERQRDQKQAIELEVEQLKGQLNVMKHMASDGDAEVVKEVDIIFKDLGEKEAQLADLDKFNQTLILRERRTNDELQEAHKELVNIMKEWNTNIGVKRMGELVTKPFVDAMQQKYCQQDVEDRAVEVLQLWEHYLKDSDWHPFKRVKLENEDREVEVIDDRDEKLRELKADLGDGPYNAVTKALLEINEYNPSGRYITTELWNFKADKKATLEEGVTCLLDQWEKAKRKRGMA

SEQ ID NO: 76 - protein, 179 aa, Arabidopsis thaliana
MEIQELKGKFQVIKHLGDDDDNILKMKLWLKLPSFALHRRRISRIHHGIHSNIKEPRTNQICVFPAVSSHFKSDLVNEEYEPLKKLKEKWGEDVHNTLKITIKDMDEYNACGKYPTPELWNFKKKLKSTLKEVIKFLLNDIKSLKRQRICRCVISFLVDIGLLIDLNQHKPHIVLVYKV

SEQ ID NO: 77 - protein, 554 aa, Arabidopsis thaliana
MKKKQQKQEFVAETSEMNNNNECSGQDQQKRYVWPWVGLVANVPTEVEPSGRRVGKSGSTLRDEFTLKGFNPTRVKPIWNTKGHTGFALVEFAKDFKGFESAMQFEKSFDLDRHGKRDWKKGHRLRDDKLYGWLAREDDYNRSDTVGKNVKKKRDLKSISQIVEEDQRKLYHLFENMCQTIEKNKQRKQQLEQKVDETLESLEFHNLMLNNSYQEEIQKMEKNMQEFYQQVLGGHEKSFAELEAKREKLDERARLIEQRAIKNEEEMEKTRLEREMIQKAMCEQNEANEEAMKLAEKHQKEKEKLHKRIMEMEAKLNETQELELEIEKLKGTTNVMKHMVGCDGDKDIVEKIAKTQIELDARETALHEKMMTLARKERATNDEYQDARKEMIKVWKANEELMKQEKIRVKIMGELNPAPFLPAVMNKHKAMMLCSVWAAEIGDVQWTPFRVDESDGTPKQKLHISQHSKCEMQRVVDENDEKLRMLKNQYGEEVYSEVVRAKLEMEEHNASGSYETEELWNYEENRKATIEEITDVMLKIRSKLAAMKNKRKRP

SEQ ID NO: 78 - protein, 736 aa, Arabidopsis thaliana
MYSRRELEDLEYRYYSEMKDGTRKVKISESLFRCPFCYIDRKRDYQFDDLLRHASGIGGSSRTKDGRDKARHLALERYMRKYLRPRERPRPSPTSDVSSLPKEEFTGKWKSTLSTTEEGEFITTENSSSPHIVKAEPKFVSGDDSGRSGEERLKFSDKPDPFFSNEDKSYPAKRPCLVSGAKEGDEPVQRIGLSHGASFAPTYPQKLVSLGAGNGDQMYVHPWKGILANMKRTFNEKTRKYAGESGSKIREDLIKKGFNPHKVTPLWNGRLGFTGFAIVDFGKEWEGFRNATMFDKHFEVSQCGKRDHDLTRDPGDKLYGWVAKQDDYYSRTAIGDHLRKQGDLKSVSGKEAEDQRKTFTLVSNLENTLVTKSDNLQQMESIYKQTSSVLEKRMKEKDEMINTHNEKMSIMQQTARDYLASIYEEHEKASQHLEAQRKEYEDRENYLDKCQAKNKTERRKLQWQKHKNLMATQEQNKADEDMMRLAEQQQREKDELRKQVRELEEKIDAEQALELEIERMRGDLQVMGHMQEGEGEDSKIKEMIEKTKEELKEKEEDWEYQESLYQTLVVKHGYTNDELQDARKALIRSMRELTTRAYIGVKRMGALDETPFKKVAKEKYPAVEADKKAEELCSLWEEHLGDSAWHPIKVVEKDGIAKEELNEEDEKLQELRKELGEEVYAAVTQALKERNEYNGSGRYIVPELWNFKQNRKASIKEGVVYLVNSWKQKKPKPKRR

SEQ ID NO: 79 - protein, 647 aa, Arabidopsis thaliana; identical to SEQ ID NO: 75

SEQ ID NO: 80 - protein, 638 aa, Arabidopsis thaliana
MNNKLSDFEKNLYKKLKSGKLEVKVSYRTFLCPYCPDNKKKVGLYVDILQHASGVGNSQSKKRSLTEKASHRALAKYLIKDLAHYATSTISKRLKARTSFIPAETGDAPIIYDDAQFEKLVWPWKGVLVNIPTTSTEDGRSCTGESGPKLKDELIRRGFNPIRVRTVWDRFGHSGTGIVEFNRDWNGLQDALVFKKAYEGDGHGKKDWLCGATDSSLYAWLANADDYYRANILGENLRKMGDLKSIYRFAEEEARKDQKLLQRLNFMVENKQYRLKKLQIKYSQDSVKLKYETEEKEKILRAYSEDLTGRQQKSTDHFNRIFADHEKQKVQLESQIKELEIRKLELAKREAENETQRKIVAKELEQNAAINSYVQLSALEQQKTREKAQRLAVDHKMQKEKLHKRIAALERQLDQKQELELEVQQLKSQLSVMRLVELDSGSEIVNKVETFLRDLSETEGELAHLNQFNQDLVVQERKSNDELQEARRALISNLRDMGLHIGVKRMGELDTKPFMKAMRIKYCQEDLEDWAVEVIQLWEEYLKDPDWHPFKRIKLETAETIVEVIDEDDEKLRTLKNELGDDAYQAVANALLEINEYNPSGRYISSELWNFREDRKATLEEGVNSLLEQWNQAKHLKS

SEQ ID NO: 81 - protein, 638 aa, Arabidopsis thaliana; identical to SEQ ID NO: 80

SEQ ID NO: 82 - protein, 561 aa, Arabidopsis thaliana
MEKNQQKQEFLAETSEMKNTKNNDDCSVQQQQRFVWPWVGLVANIPTEVEPSGRRVGKSGSTLRDEFTMKGFNPTRVQPIWDFKGHSGFALVEFAKDFEGFESAMNFERSFNLDRHGKRDWEKGHRLRDNKLYGWVAREDDYNRSDTVGKNVKKKRDLKSISQIVEEDERKMVHLVENMSQTIEKKKQSKQELEQKVDETSRFLESLELHNVLLNKNYQEGFQKMQMKMEELYQQVLDGHEKSLAELEAKREKLDERARLIEQRAIINEEEMEKSRLEREMNQKAMCEQNEANEEAMKLAEKHQASSSLKEKEKLHKRIMEMEAKLNETQELELEIEKLKGTTNVMKHMVGSDGDKDIVEKIAKTQIQLDAQETALHEKMMTLARKERATNDEYQDVLKEMIQVWNANEELMKQEKIRVKRMGQLNPAPFLPAVMKKHKVTQSKAENKAMKLCSVWEANIGDVQWTPFRVDESDGTPKRVVDENDEKLRTLKNQYGEEVYNEVVRTKLEIEEHNASGSYVILELWNYEENRKATMEEATDVMLKIRSKLAAMKNKRKRLEV

SEQ ID NO: 83 - protein, 1534 aa, Arabidopsis thaliana
MVENGAKAAKRKKRPLPEIQEVEDVPRTRRPRRAAACTSFKEKSIRVCEKSATIEVKKQQIVEEEFLALRLTALETDVEDRPTRRLNDFVLFDSDGVPQPLEMLEIHDIFVSGAILPSDVCTDKEKEKGVRCTSFGRVEHWSISGYEDGSPVIWISTELADYDCRKPAASYRKVYDYFYEKARASVAVYKKLSKSSGGDPDIGLEELLAAVVRSMSSGSKYFSSGAAIIDFVISQGDFIYNQLAGLDETAKKHESSYVEIPVLVALREKSSKIDKPLQRERNPSNGVRIKEVSQVAESEALTSDQLVDGTDDDRRYAILLQDEENRKSMQQPRKNSSSGSASNMFYIKINEDEIANDYPLPSYYKTSEEETDELILYDASYEVQSEHLPHRMLHNWALYNSDLRFISLELLPMKQCDDIDVNIFGSGVVTDDNGSWISLNDPDSGSQSHDPDGMCIFLSQIKEWMIEFGSDDIISISIRTDVAWYRLGKPSKLYAPWWKPVLKTARVGISILTFLRVESRVARLSFADVTKRLSGLQANDKAYISSDPLAVERYLVVHGQIILQLFAVYPDDNVKRCPFVVGLASKLEDRHHTKWIIKKKKISLKELNLNPRAGMAPVASKRKAMQATTTRLVNRIWGEFYSNYSPEDPLQATAAENGEDEVEEEGGNGEEEVEEEGENGLTEDTVPEPVEVQKPHTPKKIRGSSGKREIKWDGESLGKTSAGEPLYQQALVGGEMVAVGGAVTLEVDDPDEMPAIYFVEYMFESTDHCKMLHGRFLQRGSMTVLGNAANERELFLTNECMTTQLKDIKGVASFEIRSRPWGHQYRKKNITADKLDWARALERKVKDLPTEYYCKSLYSPERGGFFSLPLSDIGRSSGFCTSCKIREDEEKRSTIKLNVSKTGFFINGIEYSVEDFVYVNPDSIGGLKEGSKTSFKSGRNIGLRAYVVCQLLEIVPKESRKADLGSFDVKVRRFYRPEDVSAEKAYASDIQELYFSQDTVVLPPGALEGKCEVRKKSDMPLSREYPISDHIFFCDLFFDTSKGSLKQLPANMKPKFSTIKDDTLLRKKKGKGVESEIESEIVKPVEPPKEIRLATLDIFAGCGGLSHGLKKAGVSDAKWAIEYEEPAGQAFKQNHPESTVFVDNCNVILRAIMEKGGDQDDCVSTTEANELAAKLTEEQKSTLPLPGQVDFINGGPPCQGFSGMNRFNQSSWSKVQCEMILAFLSFADYFRPRYFLLENVRTFVSFNKGQTFQLTLASLLEMGYQVRFGILEAGAYGVSQSRKRAFIWAAAPEEVLPEWPEPMHVFGVPKLKISLSQGLHYAAVRSTALGAPFRPITVRDTIGDLPSVENGDSRTNKEYKEVAVSWFQKEIRGNTIALTDHICKAMNELNLIRCKLIPTRPGADWHDLPKRKVTLSDGRVEEMIPFCLPNTAERHNGWKGLYGRLDWQGNFPTSVTDPQPMGKVGMCFHPEQHRILTVRECARSQGFPDSYEFAGNINHKHRQIGNAVPPPLAFALGRKLKEALHLKKSPQHQP

SEQ ID NO: 84 - protein, 1453 aa, Arabidopsis thaliana
MEDDCEELQVPVGTLTSIGFSISNNNDRDKMSVLEVEAPNQVTDSRLGLPNPDSVCRTCGSKDRKVCEGHFGVINFAYSIINPYFLKEVAALLNKICPGCKYIRKKQFQITEDQPERCRYCTLNTGYPLMKFRVTTKEVFRRSGIVVEVNEESLMKLKKRGVLTLPPDYWSFLPQDSNIDESCLKPTRRIITHAQVYALLLGIDQRLIKKDIPMFNSLGLTSFPVTPNGYRVTEIVHQFNGARLIFDERTRIYKKLVGFEGNTLELSSRVMECMQYSRLFSETVSSSKDSANPYQKKSDTPKLCGLRFMKDVLLGKRSDHTFRTVVVGDPSLKLNEIGIPESIAKRLQVSEHLNQCNKERLVTSFVPTLLDNKEMHVRRGDRLVAIQVNDLQTGDKIFRSLMDGDTVLMNRPPSIHQHSLIAMTVRILPTTSVVSLNPICCLPFRGDFDGDCLHGYVPQSIQAKVELDELVALDKQLINRQNGRNLLSLGQDSLTAAYLVNVEKNCYLNRAQMQQLQMYCPFQLPPPAIIKASPSSTEPQWTGMQLFGMLFPPGFDYTYPLNNVVVSNGELLSFSEGSAWLRDGEGNFIERLLKHDKGKVLDIIYSAQEMLSQWLLMRGLSVSLADLYLSSDLQSRKNLTEEISYGLREAEQVCNKQQLMVESWRDFLAVNGEDKEEDSVSDLARFCYERQKSATLSELAVSAFKDAYRDVQALAYRYGDQSNSFLIMSKAGSKGNIGKLVQHSMCIGLQNSAVSLSFGFPRELTCAAWNDPNSPLRGAKGKDSTTTESYVPYGVIENSFLTGLNPLESFVHSVTSRDSSFSGNADLPGTLSRRLMFFMRDIYAAYDGTVRNSFGNQLVQFTYETDGPVEDITGEALGSLSACALSEAAYSALDQPISLLETSPLLNLKNVLECGSKKGQREQTMSLYLSEYLSKKKHGFEYGSLEIKNHLEKLSFSEIVSTSMIIFSPSSNTKVPLSPWVCHFHISEKVLKRKQLSAESVVSSLNEQYKSRNRELKLDIVDLDIQNTNHCSSDDQAMKDDNVCITVTVVEASKHSVLELDAIRLVLIPFLLDSPVKGDQGIKKVNILWTDRPKAPKRNGNHLAGELYLKVTMYGDRGKRNCWTALLETCLPIMDMIDWGRSHPDNIRQCCSVYGIDAGRSIFVANLESAVSDTGKEILREHLLLVADSLSVTGEFVALNAKGWSKQRQVESTPAPFTQACFSSPSQCFLKAAKEGVRDDLQGSIDALAWGKVPGFGTGDQFEIIISPKVHGFTTPVDVYDLLSSTKTMRRTNSAPKSDKATVQPFGLLHSAFLKDIKVLDGKGIPMSLLRTIFTWKNIELLSQSLKRILHSYEINELLNERDEGLVKMVLQLHPNSVEKIGPGVKGIRVAKSKHGDSCCFEVVRIDGTFEDFSYHKCVLGATKIIAPKKMNFYKSKYLKNGTLESGGFSENP

SEQ ID NO: 85 - protein, 1453 aa, Arabidopsis thaliana; identical to SEQ ID NO: 84

SEQ ID NO: 86 - protein, 1976 aa, Arabidopsis thaliana
MEEESTSEILDGEIVGITFALASHHEICIQSISESAINHPSQLTNAFLGLPLEFGKCESCGATEPDKCEGHFGYIQLPVPIYHPAHVNELKQMLSLLCLKCLKIKKAKGTSGGLADRLLGVCCEEASQISIKDRASDGASYLELKLPSRSRLQPGCWNFLERYGYRYGSDYTRPLLAREVKEILRRIPEESRKKLTAKGHIPQEGYILEYLPVPPNCLSVPEASDGFSTMSVDPSRIELKDVLKKVIAIKSSRSGETNFESHKAEASEMFRVVDTYLQVRGTAKAARNIDMRYGVSKISDSSSSKAWTEKMRTLFIRKGSGFSSRSVITGDAYRHVNEVGIPIEIAQRITFEERVSVHNRGYLQKLVDDKLCLSYTQGSTTYSLRDGSKGHTELKPGQVVHRRVMDGDVVFINRPPTTHKHSLQALRVYVHEDNTVKINPLMCSPLSADFDGDCVHLFYPQSLSAKAEVMELFSVEKQLLSSHTGQLILQMGSDSLLSLRVMLERVFLDKATAQQLAMYGSLSLPPPALRKSSKSGPAWTVFQILQLAFPERLSCKGDRFLVDGSDLLKFDFGVDAMGSIINEIVTSIFLEKGPKETLGFFDSLQPLLMESLFAEGFSLSLEDLSMSRADMDVIHNLIIREISPMVSRLRLSYRDELQLENSIHKVKEVAANFMLKSYSIRNLIDIKSNSAITKLVQQTGFLGLQLSDKKKFYTKTLVEDMAIFCKRKYGRISSSGDFGIVKGCFFHGLDPYEEMAHSIAAREVIVRSSRGLAEPGTLFKNLMAVLRDIVITNDGTVRNTCSNSVIQFKYGVDSERGHQGLFEAGEPVGVLAATAMSNPAYKAVLDSSPNSNSSWELMKEVLLCKVNFQNTTNDRRVILYLNECHCGKRFCQENAACTVRNKLNKVSLKDTAVEFLVEYRKQPTISEIFGIDSCLHGHIHLNKTLLQDWNISMQDIHQKCEDVINSLGQKKKKKATDDFKRTSLSVSECCSFRDPCGSKGSDMPCLTFSYNATDPDLERTLDVLCNTVYPVLLEIVIKGDSRICSANIIWNSSDMTTWIRNRHASRRGEWVLDVTVEKSAVKQSGDAWRVVIDSCLSVLHLIDTKRSIPYSVKQVQELLGLSCAFEQAVQRLSASVRMVSKGVLKEHIILLANNMTCSGTMLGFNSGGYKALTRSLNIKAPFTEATLIAPRKCFEKAAEKCHTDSLSTVVGSCSWGKRVDVGTGSQFELLWNQKETGLDDKEETDVYSFLQMVISTTNADAFVSSPGFDVTEEEMAEWAESPERDSALGEPKFEDSADFQNLHDEGKPSGANWEKSSSWDNGCSGGSEWGVSKSTGGEANPESNWEKTTNVEKEDAWSSWNTRKDAQESSKSDSGGAWGIKTKDADADTTPNWETSPAPKDSIVPENNEPTSDVWGHKSVSDKSWDKKNWGTESAPAAWGSTDAAVWGSSDKKNSETESDAAAWGSRDKNNSDVGSGAGVLGPWNKKSSETESNGATWGSSDKTKSGAAAWNSWDKKNIETDSEPAAWGSQGKKNSETESGPAAWGAWDKKKSETEPGPAGWGMGDKKNSETELGPAAMGNWDKKKSDTKSGPAAWGSTDAAAWGSSDKNNSETESDAAAWGSRNKKTSEIESGAGAWGSWGQPSPTAEDKDTNEDDRNPWVSLKETKSREKDDKERSQWGNPAKKFPSSGGWSNGGGADWKGNRNHTPRPPRSEDNLAPMFTATRQRLDSFTSEEQELLSDVEPVMRTLRKIMHPSAYPDGDPISDDDKTFVLEKILNFHPQKETKLGSGVDFITVDKHTIFSDSRCFFVVSTDGAKQDFSYRKSLNNYLMKKYPDRAEEFIDKYFTKPRPSGNRDRNNQDATPPGEEQSQPPNQSIGNGGDDFQTQTQSQSPSQTRAQSPSQAQAQSPSQTQSQSQSQSQSQSQSQSQSQSQSQSQSQSQSQSQSPSQTQTQSPSQTQAQAQSPSSQSPSQTQT

SEQ ID NO: 87 - protein, 1172 aa, Arabidopsis thaliana
MPDMDIDVKDLEEFEATTGEINLSELGEGFLQSFCKKAATSFFDKYGLISHQLNSYNYFIEHGLQNVFQSFGEMLVEPSFDVVKKKDNDWRYATVKFGEVTVEKPTFFSDDKELEFLPWHARLQNMTYSARIKVNVQVEVFKNTVVKSDKFKTGQDNYVEKKILDVKKQDILIGSIPVMVKSILCKTSEKGKENCKKGDCAFDQGGYFVIKGAEKVFIAQEQMCTKRLWISNSPWTVSFRSENKRNRFIVRLSENEKAEDYKRREKVLTVYFLSTEIPVWLLFFALGVSSDKEAMDLIAFDGDDASITNSLIASIHVADAVCEAFRCGNNALTYVEQQIKSTKFPPAESVDECLHLYLFPGLQSLKKKARFLGYMVKCLLNSYAGKRKCENRDSFRNKRIELAGELLEREIRVHLAHARRKMTRAMQKHLSGDGDLKPIEHYLDASVITNGLSRAFSTGAWSHPFRKMERVSGVVANLGRANPLQTLIDLRRTRQQVLYTGKVGDARYPHPSHWGRVCFLSTPDGENCGLVKNMSLLGLVSTQSLESVVEKLFACGMEELMDDTCTPLFGKHKVLLNGDWVGLCADSESFVAELKSRRRQSELPREMEIKRDKDDNEVRIFTDAGRLLRPLLVVENLQKLKQEKPSQYPFDHLLDHGILELIGIEEEEDCNTAWGIKQLLKEPKIYTHCELDLSFLLGVSCAVVPFANHDHGRRVLYQSQKHCQQAIGFSSTNPNIRCDTLSQQLFYPQKPLFKTLASECLKKEVLFNGQNAIVAVNVHLGYNQEDSIVMNKASLERGMFRSEQIRSYKAEVDAKDSEKRKKMDELVQFGKTHSKIGKVDSLEDDGFPFIGANMSTGDIVIGRCTESGADHSIKLKHTERGIVQKVVLSSNDEGKNFAAVSLRQVRSPCLGDKFSSMHGQKGVLGYLEEQQNFPFTIQGIVPDIVINPHAFPSRQTPGQLLEAALSKGIACPIQKEGSSAAYTKLTRHATPFSTPGVTEITEQLHRAGFSRWGNERVYNGRSGEMMRSMIFMGPTFYQRLVHMSEDKVKFRNTGPVHPLTRQPVADRKRFGGIKFGEMERDCLIAHGASANLHERLFTLSDSSQMHICRKCKTYANVIERTPSSGRKIRGPYCRVCVSSDHVVRVYVPYGAKLLCQELFSMGITLNFDTKLC

SEQ ID NO: 88 - protein, 1172 aa, Arabidopsis thaliana; identical to SEQ ID NO: 87

SEQ ID NO: 89 - protein, 1055 aa, Arabidopsis thaliana
MACRLQNMTYSARIKVNAQVEVFKKIVIKHDKFKTGQDEYVEKEILDVKKQDILIGSIPVMVKSVLCKTSEKGKENCKKGNCAFDQGGYFVIKGAEKVFIAQEQMCTKRLWISNSPWTVSFRSETKRNRFIVRLSENEKAEDYKIMEKVLTVYFLSTEIPVWLLFFALGVSSDKEAMDLIAFDGDDASITNSLIASIHEADAVCEAFRCGNNALTYVEHQIKSTKFPPAESVDDCLRLYLFPCLQGLKKKARFLGYMVKCLLSAYAGKRKCENRDSFRNKRIELAGELLEREIRVHLAHARRKMTRAMQKQLSGDGDLKPIEHYLDASVITNGLNRAFSTGAWSHPFRKMERVSGVVANLGRANPLQTLIDLRRTRQQVLYTGKVGDARHPHPSHWGRVCFLSTPDGENCGLVKNMSLLGLVSTQGLESVVEMLFTCGMEELMNDTSTPLCGKHKVLLNGDWVGLCADSESFVGELKSRRRQSELPLEMEIKRDKDDNEVRIFTDAGRLLRPLLVVENLHKLKQDKPTQYPFKHLLDQGILELIGIEEEEDCTTAWGIKQLLKEPKNYTHCELDLSFLLGVSCAIVPFANHDHGKRVLYQSQKHCQQAIGFSSTNPNIRCDTLSQQLFYPQKPLFKTLASECLEKEVLFNGQNAIVAVNVHLGYNQEDSIVMNKASLERGMFRSEQIRSYKAEVDTKDSEKRKKMDELVQFGKTYSKIGKVDSLEDDGFPFIGANMSTGDIVIGRCTESGADHSIKLKHTERGIVQKVVLSSNDEGKNFAAVSLRQVRSPCLGDKFSSMHGQKGVLGYLEEQQNFPFTIQGIVPDIVINPHAFPSRQTPGQLLEAALSKGIACPIQKKEGSSAAYTKLTRHATPFSTPGVTEITEQLHRAGFSRWGNERVYNGRSGEMMRSLIFMGPTFYQRLVHMSENKVKFRNTGPVHPLTRQPVADRKRFGGIRFGEMERDCLIAHGASANLHERLFTLSDSSQMHICRKCKTYANVIERTPSSGRKIRGPYCRVCASSDHVVRVYVPYGAKLLCQELFSMGITLNFDTKLC

SEQ ID NO: 90 - protein, 1133 aa, Arabidopsis thaliana
MVSETTTNRSTVKISNVPQTIVADELLRFLELHLGEDTVFALEIPTTRDNWKPRDFARVQFTTLEVKSRAQLLSSQSKLLFKTHNLRLSEAYDDIIPRPVDPRKRLDDIVLTVGFPESDEKRFCALEKWDGVRCWILTEKRRVEFWVWESGDCYKIEVRFEDIIETLSCCVNGDASEIDAFLLKLKYGPKVFKRVTVHIATKFKSDRYRFCKEDFDFMWIRTTDFSGSKSIGTSTCFCLEVHNGSTMLDIFSGLPYYREDTLSLTYVDGKTFASAAQIVPLLNAAILGLEFPYEILFQLNALVHAQKISLFAASDMELIKILRGMSLETALVILKKLHQQSSICYDPVFFVKTQMQSVVKKMKHSPASAYKRLTEQNIMSCQRAYVTPSKIYLLGPELETANYVVKNFAEHVSDFMRVTFVEEDWSKLPANALSVNSKEGYFVKPSRTNIYNRVLSILGEGITVGPKRFEFLAFSASQLRGNSVWMFASNEKVKAEDIREWMGCFRKIRSISKCAARMGQLFSASRQTLIVRAQDVEQIPDIEVTTDGADYCFSDGIGKISLAFAKQVAQKCGLSHVPSAFQIRYGGYKGVIAVDRSSFRKLSLRDSMLKFDSNNRMLNVTRWTESMPCFLNREIICLLSTLGIEDAMFEAMQAVHLSMLGNMLEDRDAALNVLQKLSGENSKNLLVKMLLQGYAPSSEPYLSMMLRVHHESQLSELKSRCRILVPKGRILIGCMDEMGILEYGQVYVRVTLTKAELKSRDQSYFRKIDEETSVVIGKVVVTKNPCLHPGDIRVLDAIYEVHFEEKGYLDCIIFPQKGERPHPNECSGGDLDGDQFFVSWDEKIIPSEMDPPMDYAGSRPRLMDHDVTLEEIHKFFVDYMISDTLGVISTAHLVHADRDPEKARSQKCLELANLHSRAVDFAKTGAPAEMPYALKPREFPDFLERFEKPTYISESVFGKLYRAVKSSLAQRKPEAESEDTVAYDVTLEEAGFESFIETAKAHRDMYGEKLTSLMIYYGAANEEEILTGILKTKEMYLARDNRRYGDMKDRITLSVKDLHKEAMGWFEKSCEDEQQKKKLASAWYYVTYNPNHRDEKLTFLSFPWIVGDVLLDIKAENAQRQSVEEKTSGLVSI

SEQ ID NO: 91 - protein, 1196 aa, Arabidopsis thaliana
MGSEGNMKKSVVTQVSIGGFGESTTAKQLTDYLEDEVGIVWRCRLKTSWTPPGSYPNFEIADTSNIPSIDEYKKVEPHAFVHFAVFESAGRAMDAAGQCNLILDGQPLKVSLGPKNPYSLNQRRRTTVPYKLAGITLEIGTLVSRDDFFVSWRAEGVDFLVDPFDNTCKFCFRKSTAFSFKDAVMHAVINCDYKLELLVRDIQTVRQYKTLHGFVLILQLASSPRVWYRTADDDIYDTVPGDLLDDDDPWIRTTDFTQVGAIGRCHSYRVLISPRYENKLRTALDYFRMRRVQEERVRWPPRIRNEPCFGEPVSDHFFCIHHKEGISFEIMFLVNSVLHRGVFNQFQLTERFFDLLRNQPKDVNIASLKHLCTYKRPVFDAYKRLKLVQEWIQKNPKLLGSHEQSEDISEIRRLVITPTRAYCLPPEVELSNRVLRRYKAVAERFLRVTFMDESMQTINSNVLSYFVAPIVKDLTSSSFSQKTYVFKRVKSILTDGFKLCGRKYSFLAFSANQLRDRSAWFFAEDGKTRVSDIKTWMGKFKDKNVAKCAARMGLCFSSTYATVDVMPHEVDTEVPDIERNGYVFSDGIGTITPDLADEVMEKLKLDVHYSPCAYQIRYAGFKGVVARWPSKSDGIRLALRDSMKKFFSKHTILEICSWTRFQPGFLNRQIITLLSVLGVPDEIFWDMQESMLYKLNRILDDTDVAFEVLTASCAEQGNTAAIMLSAGFKPKTEPHLRGMLSSVRIAQLWGLREKSRIFVTSGRWLMGCLDEAGILEHGQCFIQVSKPSIENCFSKHGSRFKETKTDLEVVKGYVAIAKNPCLHPGDVRILEAVDVPQLHHMYDCLIFPQKGDRPHTNEASGSDLDGDLYFVAWDQKLIPPNRKSYPAMHYDAAEEKSLGRAVNHQDIIDFFARNLANEQLGTICNAHVVHADRSEYGAMDEECLLLAELAATAVDFPKTGKIVSMPFHLKPKLYPDFMGKEDYQTYKSNKILGRLYRRVKEVYDEDAEASSEESTDPSAIPYDAVLEIPGFEDLIPEAWGHKCLYDGQLIGLLGQYKVQKEEEIVTGHIWSMPKYTSKKQGELKERLKHSYNSLKKEFRKVFEETIPDHENLSEEEKNILYEKKASAWYHVTYHPEWVKKSLELQDPDESSHAAMLSFAWIAADYLARIKIRSREMGSIDSAKPVDSLAKFLAQRL

SEQ ID NO: 92 - protein, 625 aa, Arabidopsis thaliana
MSSRAGPMSKEKNVQGGYRPEVEQLVQGLAGTRLASSQDDGGEWEVISKKNKNKPGNTSGKTWVSQNSNPPRAWGGQQQGRGSNVSGRGNNVSGRGNGNGRGIQANISGRGRALSRKYDNNFVAPPPVSRPPLEGGWNWQARGGSAQHTAVQEFPDVEDDVDNASEEENDSDALDDSDDDLASDDYDSDVSQKSHGSRKQNKWFKKFFGSLDSLSIEQINEPQRQWHCPACQNGPGAIDWYNLHPLLAHARTKGARRVKLHRELAEVLEKDLQMRGASVIPCGEIYGQWKGLGEDEKDYEIVWPPMVIIMNTRLDKDDNDKWLGMGNQELLEYFDKYEALRARHSYGPQGHRGMSVLMFESSATGYLEAERLHRELAEMGLDRIAWGQKRSMFSGGVRQLYGFLATKQDLDIFNQHSQGKTRLKFELKSYQEMVVKELRQISEDNQQLNYFKNKLSKQNKHAKVLEESLEIMSEKLRRTAEDNRIVRQRTKMQHEQNREEMDAHDRFFMDSIKQIHERRDAKEENFEMLQQQERAKVVGQQQQNINPSSNDDCRKRAEEVSSFIEFQEKEMEEFVEEREMLIKDQEKKMEDMKKRHHEEIFDLEKEFDEALEQLMYKHGLHNEDD

SEQ ID NO: 93 - protein, 651 aa, Arabidopsis thaliana
MSTLLPFPDLNLMPDSQSSTAGTTAGDTVVTGKLEVKSEPIEEWQTPPSSTSDQSANTDLIAEFIRISELFRSAFKPLQVKGLDGVSVYGLDSGAIVAVPEKENRELIEPPPGFKDNRVSTVVVSPKFERPRELARIAILGHEQRKELRQVMKRTRMTYESLRIHLMAESMKNHVLGQGRRRRSDMAAAYIMRDRGLWLNYDKHIVGPVTGVEVGDIFFYRMELCVLGLHGQTQAGIDCLTAERSATGEPIATSIVVSGGYEDDEDTGDVLVYTGHGGQDHQHKQCDNQRLVGGNLGMERSMHYGIEVRVIRGIKYENSISSKVYVYDGLYKIVDWWFAVGKSGFGVFKFRLVRIEGQPMMGSAVMRFAQTLRNKPSMVRPTGYVSFDLSNKKENVPVFLYNDVDGDQEPRHYEYIAKAVFPPGIFGQGGISRTGCECKLSCTDDCLCARKNGGEFAYDDNGHLLKGKHVVFECGEFCTCGPSCKSRVTQKGLRNRLEVFRSKETGWGVRTLDLIEAGAFICEYAGVVVTRLQAEILSMNGDVMVYPGRFTDQWRNWGDLSQVYPDFVRPNYPSLPPLDFSMDVSRMRNVACYISHSKEPNVMVQFVLHDHNHLMFPRVMLFALENISPLAELSLDYGLADEVNGKLAICN

SEQ ID NO: 94 - protein, 650 aa, Arabidopsis thaliana
MGSSHIPLDPSLNPSPSLIPKLEPVTESTQNLAFQLPNTNPQALISSAVSDFNEATDFSSDYNTVAESARSAFAQRLQRHDDVAVLDSLTGAIVPVEENPEPEPNPYSTSDSSPSVATQRPRPQPRSSELVRITDVGPESERQFREHVRKTRMIYDSLRMFLMMEEAKRNGVGGRRARADGKAGKAGSMMRDCMLWMNRDKRIVGSIPGVQVGDIFFFRFELCVMGLHGHPQSGIDFLTGSLSSNGEPIATSVIVSGGYEDDDDQGDVIMYTGQGGQDRLGRQAEHQRLEGGNLAMERSMYYGIEVRVIRGLKYENEVSSRVYVYDGLFRIVDSWFDVGKSGFGVFKYRLERIEGQAEMGSSVLKFARTLKTNPLSVRPRGYINFDISNGKENVPVYLFNDIDSDQEPLYYEYLAQTSFPPGLFVQQSGNASGCDCVNGCGSGCLCEAKNSGEIAYDYNGTLIRQKPLIHECGSACQCPPSCRNRVTQKGLRNRLEVFRSLETGWGVRSLDVLHAGAFICEYAGVALTREQANILTMNGDTLVYPARFSSARWEDWGDLSQVLADFERPSYPDIPPVDFAMDVSKMRNVACYISHSTDPNVIVQFVLHDHNSLMFPRVMLFAAENIPPMTELSLDYGVVDDWNAKLAICN

SEQ ID NO: 95 - protein, 650 aa, Arabidopsis thaliana; identical to SEQ ID NO: 94

SEQ ID NO: 96 - protein, 1107 aa, Arabidopsis thaliana
MGKTIQVFGFPNGVSAEEVKKFLERLTGSGTVYAIKVRQPKKGGPRVYAIVQFTSERHTRLIITAAAERLYYGRSYLKAFEVEQDIVPKPRASLHTISGLKMFFGCQVSTKKFLTLWSAQDVCVSFGIGMRKLHFSFSWYQKDYRLELSYENIWQIDLHSPQGRSSKFLVIQVIGAPKIFEKEDQPINLLFGIMDFYSDGSDEQWIRTTDFTSSSCIGQSTAFCLELPVHLNVPDFRENFANYAEHRASSFLIESGSSYSSNANTLVPVVDPPPGFSLPFEILFKLNTLVQNACLSGPALDLDFYRLLNQKKYDRALIDHCLEKLFHLGECCYEPAHWLRDEYKKWISKGKLPLSPTISLDDGLVYMYRVQVTPARVYFSGPEVNVSNRVLRHYSKYINNFLRVSFVDEDLEKVRSMDLSPRSSTQRRTKLYDRIYSVLRDGIVIGDKKFEFLAFSSSQLRENSAWMFAPIDRITAAHIRAWMGDFDHIRNVAKYAARLGQSFSSSRETLNVRSDEIEVIPDVEIISLGTRYVFSDGIGKISAEFARKVARKCGLTEFSPSAFQIRYGGYKGVVAVDPNSSKKLSLRKSMSKFESENTKLDVLAWSKYQPCYMNRQLITLLSTLGVTDSVFEKKQREVVDRLDAILTHPLEAHEALGLMAPGENTNILKALILCGYKPDAEPFLSMMLQNFRASKLLELRTKTRIFISGGRSMMGCLDETRTLEYGQVVVQYSDPMRPGRRFIITGPVVVAKNPCLHPGDVRVLQAVNVPALNHMVDCVVFPQKGLRPHPNECSGSDLDGDIYFVCWDQELVPPRTSEPMDYTPEPTQILDHDVTIEEVEEYFANYIVNDSLGIIANAHTAFADKEPLKAFSDPCIELAKKFSTAVDFPKTGVAAVIPQHLYVKEYPDFMEKPDKPTYESKNVIGKLFREVKERAPPLISIKSFTLDVASKSYDKDMEVDGFEEYVDEAFYQKANYDFKLGNLMDYYGIKTEAEILSGGIMRMSKSFTKRRDAESIGRAVRALRKETLSLFNASEEEENESAKASAWYHVTYHSSYWGLYNEGLNRDHFLSFAWCVYDKLVRIKKTNLGRRQRQETLERLDHVLRFG

SEQ ID NO: 97 - protein, 1702 aa, Arabidopsis thaliana
MRDEVDLSLTIPSKLLGKRDREQKNCEEEKNKNKKAKKQQKDPILLHTSAATHKFLPPPLTMPYSEIGDDLRSLDFDHADVSSDLHLTSSSSVSSFSSSSSSLFSAAGTDDPSPKMEKDPRKIARRYQVELCKKATEENVIVYLGTGCGKTHIAVMLIYELGHLVLSPKKSVCIFLAPTVALVEQQAKVIADSVNFKVAIHCGGKRIVKSHSEWEREIAANEVLVMTPQILLHNLQHCFIKMECISLLIFDECHHAQQQSNHPYAEIMKVFYKSESLQRPRIFGMTASPVVGKGSFQSENLSKSINSLENLLNAKVYSVESNVQLDGFVSSPLVKVYYYRSALSDASQSTIRYENMLEDIKQRCLASLKLLIDTHQTQTLLSMKRLLKRSHDNLIYTLLNLGLWGAIQAAKIQLNSDHNVQDEPVGKNPKSKICDTYLSMAAEALSSGVAKDENASDLLSLAALKEPLFSRKLVQLIKILSVFRLEPHMKCIIFVNRIVTARTLSCILNNLELLRSWKSDFLVGLSSGLKSMSRRSMETILKRFQSKELNLLVATKVGEEGLDIQTCCLVIRYDLPETVTSFIQSRGRARMPQSEYAFLVDSGNEKEMDLIENFKVNEDRMNLEITYRSSEETCPRLDEELYKVHETGACISGGSSISLLYKYCSRLPHDEFFQPKPEFQFKPVDEFGGTICRITLPANAPISEIESSLLPSTEAAKKDACLKAVHELHNLGVLNDFLLPDSKDEIEDELSDDEFDFDNIKGEGCSRGDLYEMRVPVLFKQKWDPSTSCVNLHSYYIMFVPHPADRIYKKFGFFMKSPLPVEAETMDIDLHLAHQRSVSVKIFPSGVTEFDNDEIRLAELFQEIALKVLFERGELIPDFVPLELQDSSRTSKSTFYLLLPLCLHDGESVISVDWVTIRNCLSSPIFKTPSVLVEDIFPPSGSHLKLANGCWNIDDVKNSLVFTTYSKQFYFVADICHGRNGFSPVKESSTKSHVESIYKLYGVELKHPAQPLLRVKPLCHVRNLLHNRMQTNLEPQELDEYFIEIPPELSHLKIKGLSKDIGSSLSLLPSIMHRMENLLVAIELKHVLSASIPEIAEVSGHRVLEALTTEKCHERLSLERLEVLGDAFLKFAVSRHLFLHHDSLDEGELTRRRSNVVNNSNLCRLAIKKNLQVYIRDQALDPTQFFAFGHPCRVTCDEVASKEVHSLNRDLGILESNTGEIRCSKGHHWLYKKTIADVVEALVGAFLVDSGFKGAVKFLKWIGVNVDFESLQVQDACIASRRYLPLTTRNNLETLENQLDYKFLHKGLLVQAFIHPSYNRHGGGCYQRLEFLGDAVLDYLMTSYFFTVFPKLKPGQLTDLRSLSVNNEALANVAVSFSLKRFLFCESIYLHEVIEDYTNFLASSPLASGQSEGPRCPKVLGDLVESCLGALFLDCGFNLNHVWTMMLSFLDPVKNLSNLQISPIKELIELCQSYKWDREISATKKDGAFTVELKVTKNGCCLTVSATGRNKREGTKKAAQLMITNLKAHENITTSHPLEDVLKNGIRNEAKLIGYNEDPIDVVDLVGLDVENLNILETFGGNSERSSSYVIRRGLPQAPSKTEDRLPQKAIIKAGGPSSKTAKSLLHETCVANCWKPPHFECCEEEGPGHLKSFVYKVILEVEDAPNMTLECYGEARATKKGAAEHAAQAAIWCLKHSGFLC

SEQ ID NO: 98 - protein, 1688 aa, Arabidopsis thaliana
MRDEVDLSLTIPSKLLGKRDREQKNCEEEKNKNKKAKKQQKDPILLHTSAATHKFLPPPLTMPYSEIGDDLRSLDFDHADVSSDLHLTSSSSVSSFSSSSSSLFSAAGTDDPSPKMEKDPRKIARRYQVELCKKATEENVIVYLGTGCGKTHIAVMLIYELGHLVLSPKKSVCIFLAPTVALVEQQAKVIADSVNFKVAIHCGGKRIVKSHSEWEREIAANEHCFIKMECISLLIFDECHHAQQQSNHPYAEIMKVFYKSESLQRPRIFGMTASPVVGKGSFQSENLSKSINSLENLLNAKVYSVESNVQLDGFVSSPLVKVYYYRSALSDASQSTIRYENMLEDIKQRCLASLKLLIDTHQTQTLLSMKRLLKRSHDNLIYTLLNLGLWGAIQAAKIQLNSDHNVQDEPVGKNPKSKICDTYLSMAAEALSSGVAKDENASDLLSLAALKEPLFSRKLVQLIKILSVFRLEPHMKCIIFVNRIVTARTLSCILNNLELLRSWKSDFLVGLSSGLKSMSRRSMETILKRFQSKELNLLVATKVGEEGLDIQTCCLVIRYDLPETVTSFIQSRGRARMPQSEYAFLVDSGNEKEMDLIENFKVNEDRMNLEITYRSSEETCPRLDEELYKVHETGACISGGSSISLLYKYCSRLPHDEFFQPKPEFQFKPVDEFGGTICRITLPANAPISEIESSLLPSTEAAKKDACLKAVHELHNLGVLNDFLLPDSKDEIEDELSDDEFDFDNIKGEGCSRGDLYEMRVPVLFKQKWDPSTSCVNLHSYYIMFVPHPADRIYKKFGFFMKSPLPVEAETMDIDLHLAHQRSVSVKIFPSGVTEFDNDEIRLAELFQEIALKVLFERGELIPDFVPLELQDSSRTSKSTFYLLLPLCLHDGESVISVDWVTIRNCLSSPIFKTPSVLVEDIFPPSGSHLKLANGCWNIDDVKNSLVFTTYSKQFYFVADICHGRNGFSPVKESSTKSHVESIYKLYGVELKHPAQPLLRVKPLCHVRNLLHNRMQTNLEPQELDEYFIEIPPELSHLKIKGLSKDIGSSLSLLPSIMHRMENLLVAIELKHVLSASIPEIAEVSGHRVLEALTTEKCHERLSLERLEVLGDAFLKFAVSRHLFLHHDSLDEGELTRRRSNVVNNSNLCRLAIKKNLQVYIRDQALDPTQFFAFGHPCRVTCDEVASKEVHSLNRDLGILESNTGEIRCSKGHHWLYKKTIADVVEALVGAFLVDSGFKGAVKFLKWIGVNVDFESLQVQDACIASRRYLPLTTRNNLETLENQLDYKFLHKGLLVQAFIHPSYNRHGGGCYQRLEFLGDAVLDYLMTSYFFTVFPKLKPGQLTDLRSLSVNNEALANVAVSFSLKRFLFCESIYLHEVIEDYTNFLASSPLASGQSEGPRCPKVLGDLVESCLGALFLDCGFNLNHVWTMMLSFLDPVKNLSNLQISPIKELIELCQSYKWDREISATKKDGAFTVELKVTKNGCCLTVSATGRNKREGTKKAAQLMITNLKAHENITTSHPLEDVLKNGIRNEAKLIGYNEDPIDVVDLVGLDVENLNILETFGGNSERSSSYVIRRGLPQAPSKTEDRLPQKAIIKAGGPSSKTAKSLLHETCVANCWKPPHFECCEEEGPGHLKSFVYKVILEVEDAPNMTLECYGEARATKKGAAEHAAQAAIWCLKHSGFLC

SEQ ID NO: 99 - protein, 997 aa, Arabidopsis thaliana
MSNRGGGGHGGASRGRGGGRRSDQRQDQSSGQVAWPGLQQSYGGRGGSVSAGRGRGNVGRGENTGDLTATQVPVASAVSGGRGRGNIGDPTFSVASSSKTVSVASSSKEESKNTEVSETMSNLQITSTETKPEMTSLPPASSKAVTFPVRPGRGTLGKKVMVRANHFLVQVADRDLYHYDVSINPEVISKTVNRNVMKLLVKNYKDSHLGGKSPAYDGRKSLYTAGPLPFDSKEFVVNLAEKRADGSSGKDRPFKVAVKNVTSTDLYQLQQFLDRKQREAPYDTIQVLDVVLRDKPSNDYVSVGRSFFHTSLGKDARDGRGELGDGIEYWRGYFQSLRLTQMGLSLNIDVSARSFYEPIVVTDFISKFLNIRDLNRPLRDSDRLKVKKVLRTLKVKLLHWNGTKSAKISGISSLPIRELRFTLEDKSEKTVVQYFAEKYNYRVKYQALPAIQTGSDTRPVYLPMELCQIDEGQRYTKRLNEKQVTALLKATCQRPPDRENSIKNLVVKNNYNDDLSKEFGMSVTTQLASIEARVLPPPMLKYHDSGKEKMVNPRLGQWNMIDKKMVNGAKVTSWTCVSFSTRIDRGLPQEFCKQLIGMCVSKGMEFKPQPAIPFISCPPEHIEEALLDIHKRAPGLQLLIVILPDVTGSYGKIKRICETELGIVSQCCQPRQVNKLNKQYMENVALKINVKTGGRNTVLNDAIRRNIPLITDRPTIIMGADVTHPQPGEDSSPSIAAVVASMDWPEINKYRGLVSAQAHREEIIQDLYKLVQDPQRGLVHSGLIREHFIAFRRATGQIPQRIIFYRDGVSEGQFSQVLLHEMTAIRKACNSLQENYVPRVTFVIVQKRHHTRLFPEQHGNRDMTDKSGNIQPGTVVDTKICHPNEFDFYLNSHAGIQGTSRPAHYHVLLDENGFTADQLQMLTNNLCYTYARCTKSVSIVPPAYYAHLAAFRARYYMESEMSDGGSSRSRSSTTGVGQVISQLPAIKDNVKEVMFYC

SEQ ID NO: 100 - DNA, 3358 bp, Glycine max
  source 1..3358: mol_type = genomic DNA
ctccacgtcaccacaccacaccacatcatcaaacgtccgagagcggctaacagcacaaactgcatagagcgtcaccgcagagtgcgtcattattattattttctcttcgtactcccccagaggaatgagaggatgtgaacaggtgctcgctgatgccactattaaaagagtgaagggagcgagtaacagaatcacgcttcaaatcatctgcattcatttttcttctctctacttcttctgcgtcatcttagggttttggtttgtgctcctctcactgattttctggagatggcttctttcgggccaaatggaactgaaaatgaggattcgttgcctcccccacctcccgttgtaccatcagatgttgtacctgttaaagctgagccggagaagaaaaaggcttcaaggtttccaatagccaggcgtggccttgcttcaaaagggacgaagctgcaacttctcaccaatcactacagagtgaacgttgcaaacactgatgggcatttttatcagtatagtgttgctcttttttatgatgatggacgacctgtggagggtaagggtgtagggaggaagcttctggacagggtgcatgaaacgtatgattctgaattgaatgggaaagattttgcatatgatggtgagaagactctgtttactctcgggtctcttgctcgcaacaagcttgagtttacggttgttctggaggatgttattgctaccagaaacaatggaaactgcagcccagagggcaatggagaactgaatgagagtgacaaaaagaggatgaggcgccctaatagatccaaggcatttaaagtggaacttagctatgcttcaaagattccattgcaggccattgccaatgctctacgtggacaggaatctgagaattatcaagaagcaataagagtgcttgatatcattttgaggcaacatgctgctaagcaagggtgtttgcttgtgcggcaatcgttctttcacaacaatcccaagaattttgctgatgtaggaggaggtgtacttggttgcaggggcttccactctagttttagaactactcaaagtggactgtctttgaacatagatgtctcaaccaccatgataattacccctgggcctgtggttgacttcctaatatccaatcaaaatgtgagagaccccttttcacttgattgggcaaaggccaagaggacattaaaaaacctgaggattaaatcgagcccatctaatcaagaattcaaaatcactgggcttagtgaactcccttgcaaagatcaaatgtttacattgaagaaaaaaggtggtgatgatgacactgaggaagaagtgacagtatatgattattttgttaatatccgcaagatagatcttcggtattctggggatctcccatgtatcaacgttgggaaaccaaaaaggccaacttacattcctcttgagctgtgttctttggtatcacttcaacgttatacaaaagcactatccacacttcaaaggtcttcattggtggagaagtccaggcagaagccacaagagaggatgagggtcttgtctgatgcacttaaaagtagcaattatggttctgaaccaatgctacgcaattgtggaatctctataagccccaactttactgaagttgagggtcgggttttacaagctccacggttgaaatttggtaatggggaggacttcaatcctagaaatgggaggtggaacttcaataacaagaaaattgtcaagccaactaaaatagaaagatgggctgtggttaacttctctgcacgctgtgatatacgagggcttgtgagggatctcattaagtgtggtggaatgaaaggcattgtgatagatcagccgtttgatgtgtttgaagaaaatggtcagtttaggcgtgcaccgccagtggttcgagttgagaagatgtttgagttggtccagtcaaaacttcctggggctcctcagtttcttctttgtctgcttcctgagaggaaaaattctgatctttatggtccatggaagaagaagaatcttgctgagtttggaattgtgactcagtgtatagctccgacaagggtcaatgaccaatatttgactaatgttctgttgaaaatcaatgctaagcttggtggtctgaactcaatgttaggcgttgagcattctccttctattcctattgtttctagagcgccaaccatcattattggcatggatgtgtctcatggttcgccagggcaaacagatattccttcaattgctgcggtggtcagctctagagaatggcctctaatatcaaagtatagggccagtgtccgtacgcagtctccaaagatggaaatgattgataatttgttcaagaaagtttccgacaaggaggatgaaggcataatgagggagcttctacttgatttctatacaagttctggaaatagaaagcccgataatataatcatattcagggatggtgttagtgagtcccagttcaatcaagttttgaacattgaacttgatcaaattatcgaggcttgcaagtttttagatgaaaagtggaatcccaagtttttggtgattgttgctcaaaagaaccatcatactaaattctttcaacctggagctcctgacaatgttcctcctggaacggtaattgataacaaaatttgtcatcctcggaattatgatttctacatgtgtgcacatgctggaatgattggtactagcaggcctacacactaccatgttctcttagacgagattggcttttcacctgatgatctacaggagcttgtgcattcattatcatatgtgtatcagaggagcacaactgccatttctgtcgttgctccaatatgctatgctcatctggctgcaactcagatgggtcaatttatgaaatttgaggacaaatctgagacatcttcaagtcatggtggttctggtatacctgctcctcccgtccctcagttgccaagattgcaggacaaagtttcgagctcaatgttcttttgttgaaggatctgtttctagggataggcgatgactgataacagtgctgtttataagaccttcataggatagtttttttgtggaaacagttgaactatgggcgccaatggtgtaggtaaggattattatacatgtaagcaggcattttgctcatgcctttacatgtgtttagtcttttactattttgaatattgttgcgaagtctttcgctattttgaagtttgttaaggtttatgtgattcctatggcgttcctattatgcactcttgatcattatctaatctagtggtttgcatgaatcaaaaaggtgaaatgggtattactgtttttgttaaagtttgttggtgatctgtct

SEQ ID NO: 101 - protein, 3384 aa, Glycine max
GGGTAACATTACAAACTGTATAGAGCAGCACCGCAGAGTGCGTCATTTTTATTTTTTATTTTTTCTCTTCGCAATTCACTCATTCACTCACTCACTCACTCACTCACTCTCTCTCGCTGCTGCCATTATTAAAAGAGTGAAGAGAGAGCGAGTTATAGAACCATACTTCAAATCATTTTCATTCCATTTTCTTCTCTCTGCGCCTTCTTAGGGTTTGGGTTTCTGCTTGTGCTTCTGTCACTCATTCTGGAGATGGCTTCTTCGGGGCCAAATGGAACTGACAACGGGGATTCGTTGCCTCCCCCGCCTCCTGTTGTCCCATCAGATGTTGTACCTGTCAAAGCTGAGCTGGAGAAGAAGAAGGCTTTGCGGCTTCCAATAGCCAGGCGTGGCCTTGCTTCAAAAGGGACAAAGCTGCAACTTCTCACCAATCACTACAGGGTGAACGTTGCAAATACTGACGGGCATTTTTATCAGTATAGTGTTGCTCTTTTTTATGATGATGGACGACCTGTGGAGGGTAAGGGTGTAGGGAGGAAGCTTCTGGACAGGGTGCATGAGACGTATGATTCTGAATTGAATGGGAAGGATTTTGCATATGATGGTGAGAAGACTCTGTTTACTCTTGGGTCTCTTGCTCGCAACAAGCTTGAGTTTACGGTCGTTTTGGAGGATATTATTGCTTCCAGAAACAATGGAAACTGCAGCCCAGATGGCAATGGAGAACTGAATGAGAGTGACAAAAAGAGGATGAGGCGCCCTAATAGTTCCAAGGCATTTAAAGTTGAGCTTAGCTATGCTTCAAAGATTCCATTGCAGGCCATTGCCAATGCTCTACGTGGACAGGAATCCGAGAATTATCAAGAAGCTATAAGAGTGCTTGATATCATTTTGAGGCAACATGCTGCTAAGCAAGGCTGTTTGCTTGTGAGGCAATCGTTCTTCCACAATGATCCCAAGAATTTTGCTGATGTAGGAGGAGGTGTACTTGGATGCAGGGGTTTCCATTCTAGCTTTAGAACTACACAAAGTGGACTGTCTTTGAACATAGATGTCTCAACCACGATGATAATTACCCCTGGGCCTGTGGTGGACTTCCTAATATCCAATCAAAATGTGAGAGACCCCTTTTCACTTGACTGGGCCAAGGCCAAGAGGACATTAAAAAATCTGAGGATTAAAGCGAGCCCATCTAATCAAGAATTCAAAATAACTGGGATTAGTGAATTCCCTTGCAAAGATCAAACGTTTACCTTGAAGAGAAAAGGTGGTGATGATGTTGCTGAGGAAGAAGTGACAGTATATGATTATTTTGTTAATATCCGCAAGATAGATCTTCGATATTCTGGGGATCTCCCATGTATTAACGTTGGAAAGCCAAAAAGGCCAACTTATATCCCTCTTGAGCTTTGCTCTTTGGTATCCCTGCAACGTTATACAAAAGCACTATCCACTCTTCAAAGGGCTTCATTGGTGGAGAAGTCCAGGCAGAAGCCACAGGAGAGGATGAGGGTTTTGACTGATGCACTTAAAAGTAGCAATTATGGTTCCGAACCAATGCTACGTAATTGTGGGATCTCTATAAGCCCCAACTTTACTGAAGTTGAGGGTCGGGTTTTACAAGCTCCGCGGTTAAAATTTGGTAATGGGGAAGACTTCAATCCTAGAAATGGGAGGTGGAACTTCAATAACAAGAAAATTGTCAAGCCAACTAAAATAGAAAGATGGGCTGTGGTTAACTTCTCTGCACGCTGTGATACACGAGGGCTTGTGAGGGATCTCATTAAGTGTGGTGGAATGAAAGGAATTGTGATAGATCAGCCATTTGATGTGTTTGAAGAAAATGGTCAGTTTAGGCGTGCACCGCCTGTGGTTCGAGTAGAGAAGATGTTTGAATTGGTTCAGTCTAAACTTCCTGGGGCTCCTCAGTTTCTTCTTTGTCTGCTTCCTGAGAGGAAAAATTCTGATCTTTATGGTCCATGGAAGAAGAAGAATCTTGCTGAGTTTGGAATCGTGACTCAGTGTATAGCTCCGACCAGGGTCAATGACCAATATTTGACTAATGTTCTGTTGAAAATCAATGCTAAGCTTGGTGGCCTGAACTCAATACTAGGTGTTGAGCATTCTCCTTCTATTCCTATTGTTTCTAGAGCACCAACCATTATTATTGGCATGGATGTGTCTCATGGTTCGCCAGGGCAAACAGATATTCCTTCAATTGCCGCGGTGGTCAGCTCCCGAGAATGGCCACTAATATCAAAGTATAGGGCTAGCGTCCGTACCCAGTCTCCAAAGATGGAAATGATTGATAATTTGTTCAAGAAGGTTTCTGACAAGGAGGATGAAGGCATAATGAGGGAGCTTCTACTTGATTTCTATACAAGTTCTGGGAATAGAAAGCCCGATAATATAATCATATTCAGGGACGGTGTTAGTGAGTCCCAGTTCAATCAAGTTTTGAACATTGAACTTGATCAAATTATCGAGGCTTGCAAGTTTTTAGATGAAAAGTGGAACCCCAAGTTTTTGGTGATTGTTGCTCAAAAGAACCATCATACTAAATTCTTTCAACCTGGAGCTCCTGACAATGTTCCTCCTGGAACTGTAATTGATAACAAAATTTGCCATCCTCGGAATTATGATTTCTATATGTGTGCACATGCTGGAATGATTGGTACTAGCAGGCCCACACACTACCATGTTCTGTTAGACGAGATTGGCTTTTCACCTGATGATCTACAAGAGCTTGTACATTCATTATCATATGTGTATCAGAGGAGCACCACTGCCATTTCTGTCGTTGCTCCAATTTGCTATGCTCATCTGGCTGCTACTCAGATGGGTCAGTTTATGAAATTTGAAGACAAATCTGAGACATCTTCGAGTCATGGTGGTTCTGGTATGCCTGCTCCTCCCGTCCCTCAGTTGCCAAGATTGCAGGAAAATGTTTCGAGCTCAATGTTCTTTTGTTGAAGGATCTGTTGCAGTTCTAGGGATAGTGATAACTGATAACAGTGCTGTTTATAAGACTTCATAGGATAGTTTTTTTGTTTGAACCGTTGACTATGGGCGCCATTGGTAGTAGGAAAGGATTATTATACATGTAAAAAGGCATTTTGCTTATGCCTTTACATGTGTTTAGTCTTTAACTATTTTGATACTGTTGCGAGCGAAGTCTTTCGCTATTTTGAAGATTGTTAAGGTTTATGTGATTCCTATGGCGCTCTTGATCATTTTCTATTTTAGTTGTGGTTTGCATGAATCAAAAGATTAAATGGGTATATTACTGTTCTTATTTACGGATAAAATCCATATTATAGACTCCTGATTGCAATGTGACCCGAGTAAATAAGAATGTCTCAATTGTGTTTAAAATACGTGAAT

SEQ ID NO: 102 - DNA, 3410 bp, Glycine max
  source 1..3410: mol_type = genomic DNA
tcctttaaaatcaaacatatgcaggcgtaggaaaagtcccgaaacccgaggcacgcacgcgtcagtgacatgcctgcacgcacttactcgccatgcgtgcgtttcatccttcgagctcgctcactgcatcaccgcacccaatcaatcccacccctccgtgcaatcaacaccaaacatgaatcaacggtccccaacgcatggaaccgaaccgcagagaataatcgctttgttgactcacaagagagagagagagacgatgacaaaagaggctatggattcatttgagccagatggaaatgggaaggagtcactgccaccaccacctcctgttgttccctctgatattgtacctctcaaagcagaggaggtgctctgtacccctaccgagcataataagaaaaaggcttcccgacttccaatagccagatctggtctgggatcaaaaggaaataaaatacaattactaaccaatcacttcaaagttaatgttgctaaaaatgatgggcatttcttccattatagtgtggcttttacttatgaagatggacgccctgtagaaggtaagggtgtagggagaaagataatagatagggtgcaggagacatatcattctgacttaaatggtaaggactttgcatatgatggggagaaaagtctgtttactgttggctctcttcctcaaaacaagcttgagtttgaagttgttcttgaggatgtcacctctaacaggaataatggcaattgcagccctgatggtctaggggacaatgagagtgacagaaagaggatgcgacgtccttatcgttcgaagtcattcaaagtagagataagctttgctgcaaaaattccaatgcaggccattgccagtgccttacgcgggcaagagactgagaattttcaagaagccatcagagttcttgatatcattttgaggcagcatgctgctaagcaaggctgcttacttgtacgccaatcctttttccacaataatccaaataattttgctgatgtaggaggtggtgtcctaggctgtagaggattccactcaagctttagaactacacagagtggcctgtctcttaacatagatgtgtcaactacaatgataatttctcctgggcctgtggtggatttcttaatttccaatcaaaatgtgagagatccttttcaacttgactgggctaaggccaaaaggaccctaaaaaatctgaggattaaaactagcccatccaatcaagaattcaaaatttctgggctcagtgaactcccatgcagagagcagacttttactttgaaaggtaaaggtgggggggatggtgaagatggtaatgaggaaatcactgtatatgattattttgttaaggttcgtaagatagatctccgatactctgctgaccttccatgtatcaatgttggcaagcctaaacgaccaacatttttccccattgaggtttgtgaattggtatcattgcaacgatatacaaaagctctgtccacgcttcaaagggcttcattagtggagaagtcgaggcagaagccacaagagaggatgaaaattttgtctgatgcactgagaacaagcaactatggtgctgaacctatgctccggaattgtggaatttctataagcactggcttcactgaagtggagggccgggtgttgcctgcaccaaggttgaagtttggcaatggtgaggatctcaatcctaggaatgggagatggaatgtcagcagagtgaaatttgtggaaccatcaaagatagaaagatgggctgttgctaacttttctgcacgctgtgatgtacgaggacttgtacgggacctcattagaattggagatatgaaaggaattactatagaacaaccatttgacgtgtttgatgagaatccacagtttaggcgtgccccccctatggttagagtggagaaaatgttcgagcatatccaatctaaacttcctggggctcctcagttccttctctgtttgcttcctgatcggaaaaattgtgatatttatggtccatggaaaaagaagaatcttgctgattttggaatcataaatcagtgtatgtgtcctttaagggtcaatgaccagtacctgactaatgttatgttgaagatcaatgccaagcttggtgggttgaattcattgttaggcgttgaacattctccttctcttcctgttgtttccaaagctcccaccctcattctgggaatggacgtgtcacatggctcacctgggcagactgacattccttcaattgctgcggtggtcagctctagacactggcctctgatatcaaagtatagggcatgtgttcgtacgcaatctgcaaagatggaaatgattgataatttgttcaagctagtatctgaaaaggaagatgaaggcatcataagggaacttttgcttgatttctatacaacttctgggaggagaaaaccggaaaatataatcatattcagggatggggttagtgagtcacaattcaatcaagttttgaatattgaactcgatcgaatcattgaggcttgcaaatttctcgatgaaaattgggagccaaaatttgtggtaattgttgctcagaagaaccaccacactagatttttccagcctggctctcccgacaatgtcccacctggaactgttatcgacaataaaatttgtcatcccagaaattatgatttctacctatgtgcacatgctggaatgataggaactagtaggcctacccattatcatgtgctgcttgatcaggttggtttctctccggatcagctgcaggagcttgtccattcattatcatatgtgtatcagaggagcactactgccatttctgttgttgctccaatatgctatgcgcacttggctgctactcagttggggcagttcatgaaatttgaggacaaatctgaaacatcttcaagccatggtggattgagcggtgcaggtgctgttcccgtccctcagttgcctcccttgcaggagaatgtccgcaacacaatgttcttttgttgaggccttaatgctctgccctgtctcctcaagtggtgaaaatgctgtacataaaactatgtttctaatcttgcaagttatgcggacgaagtttatattgtggtagacttggtcttcttagccatatttagtctttctagcacaagccttttcaaatgttcggggaccttaccttactttttgtagcaagactctctttagcgcaacgtctttttgtagcaaggcttgatcttcagcacgtcttttgttaggcccccccttttttaaggtttaattgcactttttacctcgaatgctgtaatttatagtgaattttacttatctccaacaaattaccttggcgtattttattccaaatttttaagaaacttagattttattgtgttattttact

SEQ ID NO: 103 - DNA, 3412 bp, Glycine max
  source 1..3412: mol_type = genomic DNA
tgagtgaggatttcatttatagtttatagagagagagagcgttgacacctatccattttgaaaccttctaaactcactctctcactttctcactccctcactccctccgttgacgtttttgttttctttttctctgtgttctgaagaagttttagggtttcgttttgtttctctcttcggccacttcaggctatggattcatttgagccagatggaaatgggaaggagtcactgccaccaccacctcctgttgttccctctgatattgtacctctcaaagcagaggaggtgctctgtacccctaccgagcataataagaaaaaggcttcccgacttccaatagccagatctggtctgggatcaaaaggaaataaaatacaattactaaccaatcacttcaaagttaatgttgctaaaaatgatgggcatttcttccattatagtgtggcttttacttatgaagatggacgccctgtagaaggtaagggtgtagggagaaagataatagatagggtgcaggagacatatcattctgacttaaatggtaaggactttgcatatgatggggagaaaagtctgtttactgttggctctcttcctcaaaacaagcttgagtttgaagttgttcttgaggatgtcacctctaacaggaataatggcaattgcagccctgatggtctaggggacaatgagagtgacagaaagaggatgcgacgtccttatcgttcgaagtcattcaaagtagagataagctttgctgcaaaaattccaatgcaggccattgccagtgccttacgcgggcaagagactgagaattttcaagaagccatcagagttcttgatatcattttgaggcagcatgctgctaagcaaggctgcttacttgtacgccaatcctttttccacaataatccaaataattttgctgatgtaggaggtggtgtcctaggctgtagaggattccactcaagctttagaactacacagagtggcctgtctcttaacatagatgtgtcaactacaatgataatttctcctgggcctgtggtggatttcttaatttccaatcaaaatgtgagagatccttttcaacttgactgggctaaggccaaaaggaccctaaaaaatctgaggattaaaactagcccatccaatcaagaattcaaaatttctgggctcagtgaactcccatgcagagagcagacttttactttgaaaggtaaaggtgggggggatggtgaagatggtaatgaggaaatcactgtatatgattattttgttaaggttcgtaagatagatctccgatactctgctgaccttccatgtatcaatgttggcaagcctaaacgaccaacatttttccccattgaggtttgtgaattggtatcattgcaacgatatacaaaagctctgtccacgcttcaaagggcttcattagtggagaagtcgaggcagaagccacaagagaggatgaaaattttgtctgatgcactgagaacaagcaactatggtgctgaacctatgctccggaattgtggaatttctataagcactggcttcactgaagtggagggccgggtgttgcctgcaccaaggttgaagtttggcaatggtgaggatctcaatcctaggaatgggagatggaatgtcagcagagtgaaatttgtggaaccatcaaagatagaaagatgggctgttgctaacttttctgcacgctgtgatgtacgaggacttgtacgggacctcattagaattggagatatgaaaggaattactatagaacaaccatttgacgtgtttgatgagaatccacagtttaggcgtgccccccctatggttagagtggagaaaatgttcgagcatatccaatctaaacttcctggggctcctcagttccttctctgtttgcttcctgatcggaaaaattgtgatatttatggtccatggaaaaagaagaatcttgctgattttggaatcataaatcagtgtatgtgtcctttaagggtcaatgaccagtacctgactaatgttatgttgaagatcaatgccaagcttggtgggttgaattcattgttaggcgttgaacattctccttctcttcctgttgtttccaaagctcccaccctcattctgggaatggacgtgtcacatggctcacctgggcagactgacattccttcaattgctgcggtggtcagctctagacactggcctctgatatcaaagtatagggcatgtgttcgtacgcaatctgcaaagatggaaatgattgataatttgttcaagctagtatctgaaaaggaagatgaaggcatcataagggaacttttgcttgatttctatacaacttctgggaggagaaaaccggaaaatataatcatattcagggatggggttagtgagtcacaattcaatcaagttttgaatattgaactcgatcgaatcattgaggcttgcaaatttctcgatgaaaattgggagccaaaatttgtggtaattgttgctcagaagaaccaccacactagatttttccagcctggctctcccgacaatgtcccacctggaactgttatcgacaataaaatttgtcatcccagaaattatgatttctacctatgtgcacatgctggaatgataggaactagtaggcctacccattatcatgtgctgcttgatcaggttggtttctctccggatcagctgcaggagcttgtccattcattatcatatgtgtatcagaggagcactactgccatttctgttgttgctccaatatgctatgcgcacttggctgctactcagttggggcagttcatgaaatttgaggacaaatctgaaacatcttcaagccatggtggattgagcggtgcaggtgctgttcccgtccctcagttgcctcccttgcaggagaatgtccgcaacacaatgttcttttgttgaggccttaatgctctgccctgtctcctcaagtggtgaaaatgctgtacataaaactatgtttctaatcttgcaagttatgcggacgaagtttatattgtggtagacttggtcttcttagccatatttagtctttctagcacaagccttttcaaatgttcggggaccttaccttactttttgtagcaagactctctttagcgcaacgtctttttgtagcaaggcttgatcttcagcacgtcttttgttaggcccccccttttttaaggtttaattgcactttttacctcgaatgctgtaatttatagtgaattttacttatctccaacaaattaccttggcgtattttattccaaatttttaagaaacttagattttattgtgttattttactcctaacgtaactgtattttttactcctattttttttttttattttcttggcaaattttatccaattttttttttcaaattt

SEQ ID NO: 104 - DNA, 3267 bp, Glycine max
  source 1..3267: mol_type = genomic DNA
gcttaattattatataatcactttttctctctacgtttttctttttaacttttctctcttattcctaccctaattgactaattcaccaggtgtccattcatcaccactccacataaacctatacactaggtaagcaagatcaagaatcacatcttgcatttgcttcttgcacaacaatttccacctttttttataaaagaaacttcaatgttcaaatgtctgaaactattagttcataaatttcaaaccccacccaatccggaaaccaaaaatttcccaattgtccatttcccctccaatgcatcttcttccctccaaatcaccatttccaaagctccttctccttattcttcttcgccttcttcttccaatctgaaccctacccaacaccatcaccaacaagaacaccaccttcttctataacactaccatgaattctctcttttcgccggaaaaccttcctccaccaccgggaatcccaatccccgccacaattgccgccgccagcaccaccaccccaaacccaattctaatcccaaagctggaacctttcgatgaatggctcaacacccacacaccccaacaacagcaacaatctcaggaccccaattcttcaaatgggtccctcgacctcgaccttaagctcttcggcgacgaatcccccgaagatttctccggcgaccctaacttgctctccgacttcaaccgtctctctcagcttttcagaaccgctttctccaacaacaacgccgttcccgaccccatcacccaagggatccagcagctcggaaacgacgccgtttccaacccctttgccaaacccccccaaaacgaaaccaccgtggttccaccgccgagcttccaaaacggcaccgtttcggaccccgggatgctgctgcagcagcagcagcagtatccgaacggcgccgtttcagacccagattcgcgggcaattgtgccggtcccggaggacgggcggtcctcctcggtggcggtcaccacgccgcggcagccgcggcgctgcaaagagctggtccgcctgatggatgtcggcgggccggagcagcgtcacttccgggacgtggtccggcggacgaggatgctttacgactcccttcgcgtcctggcgacggtggaggacgagggccgggtggatgcccggcgggggcgcagcgatttgcgtgcctcggcggtgatgaggaactgtggcctgtggctgaaccgtgacaagagaattgttggtgcaattcccggtgtctgcattggtgatgtgttcctttataggatggagttgtgtgttgttggccttcatggtcagcctcaggctgggattgattatctccctgccagcatgagttccaatggtgaaccaattgccactagtgtcattgtttctggtggttatgaggatgatgttgatgagggtgatgttatcatttactctggccacggtggccaggacaagcattctaggcaggttttccaccagaagcttgaggggggaaatcttgcaatggagaggagtatgcactatgggattgaggtcagggttattcgtggggtgcggtatgagggtgctgcctctgctaccgggaggttgtatgtgtatgatgggttgtataggattcatgagtgctggtttgatgtggggaagtcgggtttcggggtttataagtataagctgtgtaggattgatgggcaggctaagatggggactgtggtgatgaaggaggcgcttatgcttaggaaggatcccttgagtttcaaacccatgtgttgtttgtctcttgatgtttcgaataggaaggaaaatgtggccattcggctttttaacgacattgatcgtaactatgaccctctgcagtatgagtatcttgtgaagacaaattttccgcagtttgtctttcatcagagtgggagggggacgggttgtgagtgtgtggatgggtgtgttgaggggtgcttttgtgctatgaagaatggaggggattttccttataatcagagtgggattctcttgagagggaagcctttggtttttgagtgtggcccgttttgtcattgtcctcctcattgtcgaaaccgtgtcacgcagaaggggttgaaaaataggttggaagtgtttagatctagggaaactggttggggagttaggtccttggaccttattcaagctggtgcttttatatgtgagtacacgggggttgttctcactagggatcaagcacagcttttgacaatgaatggtgattcgttgatatatccgaatcggtttactgataggtgggcagaatggggggacttatctatgattgactccaattatgtgcgtccatcgtatccgtcaatacctcctttggattttgctatggatgtgtcaagaatgaggaatgttgcttgctatatgagtcatagttcgactcccaatgtgttggttcagtttgttctctatgatcacaataatttgatgttccctcaccttatgctatttgcgatggagagcatccctccgatgagagagctcagccttgattatggggtagctgatgagtggacaggaaagctctctataggtaactgaacaattttgggagtttcatacactttataatatactgaagctgagttttgggcattgtttgcagagagatagtcaagttgatgcagcacaactttcacaagttttcaaccccgccaatttacaaggaacagtagtagaattgcttgctatttacggtgtcaggatatcaaaattcaaatataaagaaatgtctattacgttattctatctaactgttggtggctagtacacggtgtgcctttgtgttgagaaagatcaggaattgaagttgccaagtctgcttaatcttgaagacttctgtaggtttctcacttgttgatgtcatttgttttttctgtaattgatgtcttcctcatctcggcgaagcattttcacacatttttgtaagcactaatagtgcaagctgtattaactctttcttcttttggagtactttgtatatagtataagttcaaaacttgtataggttttgtattagtgactggtatcggatgcagcattttaattagtttagaactgggtaaattgggcatctggttattaagatgataggatatagccattgttgctaatgatcttgtatgaggaaagtcaattatgatgaaatggacaatttggttatgaatttcacccaataaggttgtagaacatctatgataagacattgtttgcacgttgcatgtaga

SEQ ID NO: 105 - DNA, 3230 bp, Glycine max
  source 1..3230: mol_type = genomic DNA
cattttctcactttatctatttcttttcttctcatctctcttcttcctaccctaattcccaaaaaatgaggtgtccattaatcaccactccacataaatctacacattaggtaagcaacatcaaggatctggcatcttgcacagctatctctacctttcccacaaaacaaaaaagcaattcaaagttcaaattctgaagctcttagttcataaatttcaaaccccacccaaccaaaatttcaaaaccggaaaccaaaaatttcccaagtgtccatttcccctccaatgcatcttcttccctccaaatcaccatttccaatgcttcttcttcttccaatctaaaccctacccaacaccaccaccacctccacctccaacaagaacaccttcttctataacattaccaccatgaattttctcttttcacgggaaaaccttcccccacctccgggaatcccaatccccgccaccattgccgccgccaacaccaccccaaacccaattctaatcccaaagctcgaacctttcgacgaattgctcaacacccacacaccccaacaacaacaacaatctcaggaccccagtttttcaaatgggtcccttgacctcgacctcgacctcgacctcaagctcgtctgcgacgaaacccccggtgctttctctggcgacccaagcttgctctcagatttcaaccgtctctctcagcttttcaaaaccgctttcaccaacaacaacgccgttctcgaccccatcgcccaagggctccagcagctccaaaacgacgctgtttccgaccctctagacggcactaccgttgttccaccgcagagcttccaaaattcggaccccgggatgcagcagcagcagcagtacccgaacggggccgtttcggacccggattcgcgggcaattgtgccggtcccggaggaagggcggtcctcttcggtggcggtcaccacgccgcggcagcggcgcttcaaggagctggtccgcctgacggatgtcggcgggccggagcaacggcacttccgggacgtggtccgccggacgaggatggtttacgactccctgcgcgtcctggcgacggtggaggacgagggccgggtggatgcccgccgggggcgcagcgatctgcgcgcctcggcggtgatgaggaactgtggcctgtggctgaaccgtgacaagagaattgttggtgcaattcccggtgtctgcattggtgatgtgttcctttataggatggagttgtgtgttgttggccttcacggtcagcctcaggctgggattgattatctccctgctagcatgagttccaatggtgaaccaattgccactagtgtcattgtttctggtggttatgaggatgatgttgatgagggtgatgttattatttactctggccatggtggccaggacaagcattctaggcaggttttccaccagaagcttgagggggggaaccttgcaatggagaggagtatgcactatgggattgaggtgagggtcattcgcggagtgcggtatgagggtgctgcctctgctactgggaggttgtatgtgtatgatgggttgtatagaattcatgagtgctggtttgatgtggggaagtcgggttttggggtttataagtataagctgtgtaggattgatgggcaggctaagatggggactgtggtgatgaaggaggcgcttatgcttaggaaggatcccttgagtttcaaacccacgtgttgtttgtcgcttgatgtttcaaataggaaggagaatgtggcggttcggcttttcaatgacattgatcctaactatgaccctctgcagtatgagtatcttgtgaagacaaattttccgcagtttgtgttccatcagagcgggagggggacaggttgtgagtgtgcggacgggtgtgttgaggggtgcttttgtgccatgaagaatggaggggattttccttataatcagagtgggattctcttgagagggaagcctttggtttttgagtgtggcccattttgtcgttgtcctcctcattgtcggaaccgtgtcacgcagaaggggttgaaaaataggttggaagtgttcagatctagggaaactggttggggagttaggtccatggaccttattcaagctggtgcttttatatgcgagtacacaggggttgttctgactagggagcaagcacggcttttgactatgaatggtgattccttgatatatccaaatcggtttactgataggtgggcagaatggggggacttgtctatgatagactccaattttgtgcgtccatcatatccgtcaatacctcctttggattttgccatggatgtgtcaagaatgaggaatgttgcttgctatatgagtcatagttcaactcccaatgtgttggttcagtttgttctgtatgatcacaataatttgatgttccctcgccttatgctatttgcgatggagagcatccctccgatgagagagctcagccttgattatggggtagctgatgagtggacaggaaagctctctatatgcaatgaatgattttgaaagtttcatacactttataatatactgaagctgactttcgggcattgtttgcagagatagtcaagttgatgcagcacaagttttcaacactgccaatttacaaagagcagtagtagaattgcttgctatacgacggtgtcaggaaatcaaaattcaaatataaagaaatgtctattacgttattctggtttttatctaactgtcaatggctagtacacggtgctcctctggtgaggaaggtcaagaattgaagttcccatttctgcttaatcttgaagacttcagtagttttctcacttgttgatgccatttgtttgttctgtaattgttgatgtcttcctcagctcggcgaagcattttcaaatcacatttttgtaagcaataatagtgcaagctgtattaactctttcttcttttggagaacttgtttgtatatagtataatttcaaagcttgtaaaggttttataatagtgactggtatcggatgcaacattttaattaatttagaagcgggtaaattgggcatctggatattaagattactaggatatagccattgttgctaatgatcttgtatgaggaaaatcaaattatgatgaaatggacaatttggttgttatgaatttaacccaataatgtagtagaacaactatggtaaagaaattgtttgcactttgtatgtaga

SEQ ID NO: 106 - DNA, 1767 bp, Glycine max
  source 1..1767: mol_type = genomic DNA
cccaaacccgaacccttctgggatacccacatcgaaacctccgacgaactcgacctctactccgagttcaatcgcgtcactgagctctttcacttcgccttcggagccaccaacgttgtcgaccctttcggagccaccaatgttgcatgccccgaacagactccgctggttcctgttcctcaggagctcgattcagcggcccagcccgacccgaattcgccctccgaggacgtcttgcgagcgatcgttccggtaccgccggagcagcaggacggcgcggtggccaccgccaccgtgccgaggcggaagcagagccggcagaaggagctggtgagagtgatggatctgtctccgagggacgaggctcatttgcgcgagaccgtgaggaggacaaggctcatatacgactcgctgcgagtgttgacctccgtggaggaggagaagcgagtcgcctcagtggcattgcggcgtctccggggagacctgcgggctgccagcctgatgagagagcgtggactgtggctgaaccgtgacaagaggatcgtcggggcgatccccggaattatggttggggatttgttcctttttcggatggagttgtgtgtggttggattgcacggtcagatacaggctggaatagattttcttcctgcaagcatgagttccactggagaacctattgctaccagtgtcattgtttctggtggctatgaggatgacatggatgatggtgaggttatagtttacactggccatggagggcaggagaagaattcctccaggcagatctctcatcagaagttggagtcagggaaccttgcattggagaggagtatgcattatggtgttgaggtaagggttatccgtgggatgaagtatgaggggagtgctgctgggtctggtaaggtgtatgtgtatgatggggtgtataggattgttgattgctggtttgatgtggggaggtcgggttttggggtttataagtttaagctttggaggattgaggggcaggctaagatgggtagtgctattttgaaggaagctaggaatgttaggaggagtgagctggatttgaatcccacatctgctgatatggctaacaggaaggagaatgttgcagttcggctttttaatgactttgatgatgatcggggtcctctttgctatgaatatcttgtgaggacttgttttccgaagtttgtgtttcatcagagtgggaaagctactggctgtgactgtgtggatggttgtggtgatggatgcttttgtgctatgaaaaatgggggtgagtttccttacactctgcaggggcatcttgtgagagggaagcctttgatttttgaatgtggcccattttgctcctgtcctcctcattgtcgcaatcgtgttgcgcagaaggggctgaaatataggttggaagtgtttaggtctaagcagacatcttggggagtaaggtccttggaccttattcaagctggttcttttatctgtgagtttgcaggggttgttttgaccagggagcaagctcaactcttaacaatgaatgatatttctctggatgtgtcaacaatgaggaatgttgcttgctatatgagccatagttcaactccaaatgtctgggttcagtttgttctgcatgatcacaacaatttgatgttcccacaccttatgctatttgccatggaaaacatccctcccatgagagagctcagccttgattatggtgtagctgatgagtggacaggcaaactctctatatgtaactga

SEQ ID NO: 107 - DNA, 2477 bp, Glycine max
  source 1..2477: mol_type = genomic DNA
tcacatttcattaaaatttcaagtccaccttggtcttccagctctaacgttactttgtcccgcatacttcacgcctctgctgttaccacactcactcactactactactcgctctccccacgctacactggttgcgcgtgagtctcaatcgccgcattctcttcgcgcgatctttctacgatcactgaacagagcatatacaaatgagttcgaaaagagggggtgggagacctgtaaccgtggctaacaatgatatgtccaaagggaaaagcatatctgaagctcatccaaaagttgagcagttgactcagggtatcgctgacactaagctaaactcaggacaagatgatggtgagtgggaggtatatgcaaggaaatccaagaacaaggctggaagcagtgctgcaaaaccatgggcccccccagcccataattctaatcctagggcatgggggaatgcagaaatggctcaaaagccaggcatccggggtcatggtggacttggaagatcttcgggaaatccctggcagacacaaaatgctaactttaggagaccagctggcagaggaaatggaaggcctcagttagcaacaagtggatatgaaagcaactatgttccaaatcctgcaattcggcctccacttgagcatggctggaactggcaatccagacctggtgcattgcagtccaatgcaagggatgaaatttcaccagaggaccttcaaaagaatgatgatgttgatgacgatgatggggaggaggactctgatgcttttgaagataccgatgatgatctgatgagtgatgactatgattcagatgctagtcaaaagagtcatgagacacgtaagaaaatcaaatggtttaagaagttttttgagattttggatggcttgactgttgaacagataaatgaaccagaaagacagtggcattgtccagcttgccaaggtggtcctggagctattgattggtacagaggactgcagcccttggtgacacatgccaaaacaaagggatctaaaagggtgaagattcacagggagcttgctatacttttggatgaggaattacgcagaaggggtacttcagtaattccagctggggaagtatttggaaaatggaaaggtttgaaagaagaagaaaaagaccatgacatagtttggcccccaatggttgtcattcagaatacaaagcttgaacaggatgaaaatgataagtggataggtatgggtaaccaagaacttcttgattattttagcacatatgatgctgtgagagcacgacactcttatggcccacagggtcatcgtgggatgagtgttttgatatttgaagcctcagctagtggctatctagaggcagagcgtctccacaagcattttgcagagcaaggaactgataaagattcttggttcagtcgccctattttatatctccctggggggaatcgccagctctatggatacatggctacaaaagaagatatggactttttcaacagacattcccaaggtaaatctagactcaaatatgacataagatcatatcaggagatggttgtacaccaaattcggcaaatgaatgaagacaaccaacagctgctctattttaagaacaaggctgtgaaaggtgcaaaacacacaaaagctcttgaagaatctattggtataatgtctgagaagctgcggaagacaatggaggaaaatcgcattgtgaggaggagaactaaaatgcaacatgaagagaccaaagaagagatgtatatgcaagaacaattcttcaaggaccagatcaaaatcattcatgattcaagggatgcaaaggaagaagatttcgagaggatgcaacaggaggaacgtgagaaggtgaagcagtcaagtactactggtcatgtgaatgctgaggaatatagactcaaggtggaagagtatctgaaatttgttgaggtccaagataaagaaatggagaactttgttgctgaaaaggagaagctgttacatgctcatggcacgggttatgctgcaatgaagcggaggcattgggaggaagaagttcagtatgagcagaagtttgatgaggaattggctaacctcatggaaaagtactccccgtcgtagaagtccaatggtatctaatggtagggtcttttgcacagactcatacaaacagataaacacagccaaataggtagagaaaataaatagagacatcagctttctagagattgagacttttactaaattcagtatgtcattttcttttctttagtacttgttggcatttggtacattcttggatatagaaacctggttaaaattttaaatggtggtgcatgcggttcgaattgaatgacaaattttacaaattggacgttgccatgccctgatgaatgatttatgcattatgagtttgaatatcttgagccaggggattttactgtttcaatatgtttgaaagttccgttaagaatcaac

SEQ ID NO: 108 - DNA, 2472 bp, Glycine max
  source 1..2472: mol_type = genomic DNA
tcacatttcattaaaatttcaagtccaccttggtcttccagctctaacgttactttgtcccgcatacttcacgcctctgctgttaccacactcactcactactactactcgctctccccacgctacactggttgcgcgtgagtctcaatcgccgcattctcttcgcgcgatctttctacgatcactgagcatatacaaatgagttcgaaaagagggggtgggagacctgtaaccgtggctaacaatgatatgtccaaagggaaaagcatatctgaagctcatccaaaagttgagcagttgactcagggtatcgctgacactaagctaaactcaggacaagatgatggtgagtgggaggtatatgcaaggaaatccaagaacaaggctggaagcagtgctgcaaaaccatgggcccccccagcccataattctaatcctagggcatgggggaatgcagaaatggctcaaaagccaggcatccggggtcatggtggacttggaagatcttcgggaaatccctggcagacacaaaatgctaactttaggagaccagctggcagaggaaatggaaggcctcagttagcaacaagtggatatgaaagcaactatgttccaaatcctgcaattcggcctccacttgagcatggctggaactggcaatccagacctggtgcattgcagtccaatgcaagggatgaaatttcaccagaggaccttcaaaagaatgatgatgttgatgacgatgatggggaggaggactctgatgcttttgaagataccgatgatgatctgatgagtgatgactatgattcagatgctagtcaaaagagtcatgagacacgtaagaaaatcaaatggtttaagaagttttttgagattttggatggcttgactgttgaacagataaatgaaccagaaagacagtggcattgtccagcttgccaaggtggtcctggagctattgattggtacagaggactgcagcccttggtgacacatgccaaaacaaagggatctaaaagggtgaagattcacagggagcttgctatacttttggatgaggaattacgcagaaggggtacttcagtaattccagctggggaagtatttggaaaatggaaaggtttgaaagaagaagaaaaagaccatgacatagtttggcccccaatggttgtcattcagaatacaaagcttgaacaggatgaaaatgataagtggataggtatgggtaaccaagaacttcttgattattttagcacatatgatgctgtgagagcacgacactcttatggcccacagggtcatcgtgggatgagtgttttgatatttgaagcctcagctagtggctatctagaggcagagcgtctccacaagcattttgcagagcaaggaactgataaagattcttggttcagtcgccctattttatatctccctggggggaatcgccagctctatggatacatggctacaaaagaagatatggactttttcaacagacattcccaaggtaaatctagactcaaatatgacataagatcatatcaggagatggttgtacaccaaattcggcaaatgaatgaagacaaccaacagctgctctattttaagaacaaggctgtgaaaggtgcaaaacacacaaaagctcttgaagaatctattggtataatgtctgagaagctgcggaagacaatggaggaaaatcgcattgtgaggaggagaactaaaatgcaacatgaagagaccaaagaagagatgtatatgcaagaacaattcttcaaggaccagatcaaaatcattcatgattcaagggatgcaaaggaagaagatttcgagaggatgcaacaggaggaacgtgagaaggtgaagcagtcaagtactactggtcatgtgaatgctgaggaatatagactcaaggtggaagagtatctgaaatttgttgaggtccaagataaagaaatggagaactttgttgctgaaaaggagaagctgttacatgctcatggcacgggttatgctgcaatgaagcggaggcattgggaggaagaagttcagtatgagcagaagtttgatgaggaattggctaacctcatggaaaagtactccccgtcgtagaagtccaatggtatctaatggtagggtcttttgcacagactcatacaaacagataaacacagccaaataggtagagaaaataaatagagacatcagctttctagagattgagacttttactaaattcagtatgtcattttcttttctttagtacttgttggcatttggtacattcttggatatagaaacctggttaaaattttaaatggtggtgcatgcggttcgaattgaatgacaaattttacaaattggacgttgccatgccctgatgaatgatttatgcattatgagtttgaatatcttgagccaggggattttactgtttcaatatgtttgaaagttccgttaagaatcaac

SEQ ID NO: 109 - DNA, 2887 bp, Glycine max
  source 1..2887: mol_type = genomic DNA
attgcatcacggattgtggccaccctacttgttattctttccttgtgcaaaaccctgtttgtttggccactcaaaaatgtcatttgatgctgtttctgtgtggcctgtattggagtagttcagtgttgctgtaattgcagtgcaacttgtggctgcttttgcatagacctgtggccatcctagctgttgttctctccatatacaaatccctgtttgttttgcccctcaaaatgtcatttggtgctgtttctgtgtggcctgtagtggagcagttcagtgttgtggttattgtggcacgaattgtggtctctttcgcatggaattgtggcatttccggctgttattctttccatatacaaaaacctatttgtttggctcctccaacgacgtcgtttggtgtcataaggctacaattccatgtgaaacggccacaatctgcctcaggaaaaaacccgtttgtttggcccctctaacgatgtcgtttagtgtcataaggtgggcagtcttgggattttttgcccttaaaagaaaaccctacttctctttgctatttgatgcaaatcatctgaccctgagctctcagctgcgcttctggccaatctgtggcactccaaacagagcatataaaaatgagtttgaaaagaggaggtgggagacctgtaactgtggctaacaatgatatgtccaaagggaaaagcatatctgaacctcagccaaaagttgagcagttgactcagggtattgctgatactaagctaaactcagaacaagatgatggtgagtgggaggtatatgcaaggaaatccaagaacaaggctggaagcagtgctgcaaaaccatggggccccccggtccataattctaatcctagggcatgggggaatgctgaaatggttcaaaagccaggcatccggagtcatggtggagttggaagatcttctggaaatccctggcagacaccaaatgctaactttaggagaccagctggcagaggaaatggaaggcctcaattaggaacaagtggatatgaaagcaactatgtgactccaaatcctgtaattcggcctccactcgagcatggctggaactggcaatccagacctggtgcaatgcagtccaatgtaagggatgaaatttcaccagaggaccttcaaaagaattatggtgttgatgatgatggggaggaggaggaatctgatgatttggaagatactgatgatgatctgatgagtgatgacgatgattctgatgctagtcaaaagagtcatgagacacgtaagaaaagcaaatggtataagaagttctttgagattttggatggcttgactgttgaacagataaacgaaccagaaagacagtggcattgtccagcttgccaaggtggtcctggagctattgattggtacagaggactgcagcccttggtgacacatgccaaaacaaagggatcaaaaagggtgaagattcacagggagcttgctatacttttggatgaggaattacgcagaaggggtacttcagtaattccagctggggaagtatttggaaagtggaaaggtttgaaagaagaagaaaaggaccatgagatagtttggcctccaatggttgtcattcagaatacaaagcttgaacaggatgaaaatgataagtggataggtatgggtaaccaagaacttcttgattattttagcacatatgctgctgcaaaagcacggcactcttatggcccacagggtcatcgtgggatgagtgttttgatatttgaagcctcagctagtggctatctagaggcagagcgtctccacaagcattttgcagagcaaggaactgataaagatgcttggttcaatcgccctattttatatctacctggggggaatcgccagctctatggatacatggctacaaaagaagatctggactttttcaacaggcattcccaaggtaaatctagactcaaatatgacataatgtcatatcaggagatggttgtacaccaaattcggcaaatgaatgaagacaaccaacagctgctctattttaaggacaaggctgtgaaaggtgcaaaacacacaaaagctcttgaagaatctattggtataatgtctgagaagctgcggaagacaatggaggaaaatcgcattgtgaggaggagaactaaaatgcaacatgaagagaccaaagaagagatgtatatgcaagaacaattcttcaaagaccagatcaaaatcattcatgattcaagggatgcaaaggaagaagattttgagaagatgcaacaggaagagcgtgagaaggtgaagcagtcaagtagtactggtcatgtgaatgctgaggaatatagactcaaggtggaagagtatctgaaatttgttgaggtccaagataaagaaatggagaactttgttgctgaaaaggagaaactgttgcatgctcatggcatgggttatgctgcaatgaagcggaggcattgggaggaagaagttcagtatgagcagaagtttgatgaggaactcgccaacctcatggaaaagtactccccgttggagaagttcaatggtatctaatggtagggtcttttgcacagactcatacaaacagataaacacagccaaataggtagagaaaatagagacatcagctttctagagatcgagacttttactaaattcagtatgtcattttcttttctttagtacttgttggcatttggtacatgactggatatagaaaaccttgttaaaattttaaatggtggtgcatgtggttcgaatgactagaaattttacaaatagaaattttacaattgggagttgctatgccccgatgaatgattgatgcattgtgagtttgaatatctttagccaggggattttacagtttgagt

SEQ ID NO: 110 - DNA, 2554 bp, Glycine max
  source 1..2554: mol_type = genomic DNA
aaacagaggcaactctttttcttgtttcctatcaacaacattctccttcgtctcgaagtttatccgtacgtgccattttaccatttcttgtttatttatttttcttttcctttctctgtactcaataaatcacatttcaagtccaccttggtcagtcttcctcctctaacgttccttcctttgctgttacaacactcactcactcgctctccgcgcttttctggaggcgcgtgagtctcaaccgccacattttcttcgcgcgatcttcctacgatcagtgaacagagcatataaaaatgagtttgaaaagaggaggtgggagacctgtaactgtggctaacaatgatatgtccaaagggaaaagcatatctgaacctcagccaaaagttgagcagttgactcagggtattgctgatactaagctaaactcagaacaagatgatggtgagtgggaggtatatgcaaggaaatccaagaacaaggctggaagcagtgctgcaaaaccatggggccccccggtccataattctaatcctagggcatgggggaatgctgaaatggttcaaaagccaggcatccggagtcatggtggagttggaagatcttctggaaatccctggcagacaccaaatgctaactttaggagaccagctggcagaggaaatggaaggcctcaattaggaacaagtggatatgaaagcaactatgtgactccaaatcctgtaattcggcctccactcgagcatggctggaactggcaatccagacctggtgcaatgcagtccaatgtaagggatgaaatttcaccagaggaccttcaaaagaattatggtgttgatgatgatggggaggaggaggaatctgatgatttggaagatactgatgatgatctgatgagtgatgacgatgattctgatgctagtcaaaagagtcatgagacacgtaagaaaagcaaatggtataagaagttctttgagattttggatggcttgactgttgaacagataaacgaaccagaaagacagtggcattgtccagcttgccaaggtggtcctggagctattgattggtacagaggactgcagcccttggtgacacatgccaaaacaaagggatcaaaaagggtgaagattcacagggagcttgctatacttttggatgaggaattacgcagaaggggtacttcagtaattccagctggggaagtatttggaaagtggaaaggtttgaaagaagaagaaaaggaccatgagatagtttggcctccaatggttgtcattcagaatacaaagcttgaacaggatgaaaatgataagtggataggtatgggtaaccaagaacttcttgattattttagcacatatgctgctgcaaaagcacggcactcttatggcccacagggtcatcgtgggatgagtgttttgatatttgaagcctcagctagtggctatctagaggcagagcgtctccacaagcattttgcagagcaaggaactgataaagatgcttggttcaatcgccctattttatatctacctggggggaatcgccagctctatggatacatggctacaaaagaagatctggactttttcaacaggcattcccaaggtaaatctagactcaaatatgacataatgtcatatcaggagatggttgtacaccaaattcggcaaatgaatgaagacaaccaacagctgctctattttaaggacaaggctgtgaaaggtgcaaaacacacaaaagctcttgaagaatctattggtataatgtctgagaagctgcggaagacaatggaggaaaatcgcattgtgaggaggagaactaaaatgcaacatgaagagaccaaagaagagatgtatatgcaagaacaattcttcaaagaccagatcaaaatcattcatgattcaagggatgcaaaggaagaagattttgagaagatgcaacaggaagagcgtgagaaggtgaagcagtcaagtagtactggtcatgtgaatgctgaggaatatagactcaaggtggaagagtatctgaaatttgttgaggtccaagataaagaaatggagaactttgttgctgaaaaggagaaactgttgcatgctcatggcatgggttatgctgcaatgaagcggaggcattgggaggaagaagttcagtatgagcagaagtttgatgaggaactcgccaacctcatggaaaagtactccccgttggagaagttcaatggtatctaatggtagggtcttttgcacagactcatacaaacagataaacacagccaaataggtagagaaaatagagacatcagctttctagagatcgagacttttactaaattcagtatgtcattttcttttctttagtacttgttggcatttggtacatgactggatatagaaaaccttgttaaaattttaaatggtggtgcatgtggttcgaatgactagaaattttacaaatagaaattttacaattgggagttgctatgccccgatgaatgattgatgcattgtgagtttgaatatctttagccaggggattttacagtttgagt

SEQ ID NO: 111 - DNA, 2419 bp, Glycine max
  source 1..2419: mol_type = genomic DNA
cgggtaccgtgtgggactttttattgtgtgattatgatacacatacacattacacgctagactctggaccatcatctgctatcggaggcttcaatattttgaccactggaagctgttttgttgcctttgtatgaggtgtcattgataattatgcttcgaagtgacagtatcaactccctgagataggtggtgaaaattgaattatggctgatgatggtgctgatccatttccgaagttgacaagtgtgtatagagtgtctggttccaaaaacaataagctgagctggaatgtagccaattctcagcaaagtgttgactccagtgtaaacaactcaaggcagttacagagcatttctgatggcagtgcttcaagatcctggttttctcaaaattctagaccaaatgcatgggaagttccaagtgtgattcagaagctgaggctggggaagcggggtaatgacggattgactaacaacagtaacctacaggacaaaagtaattctccagatgctctggctttgacgggaagtggaattttgaatgacagcaagttgcctcctgagtcagcaatatctccaacatcagagacatgtttaaattcatctgttgatgttgttgatacaactacatccaaggatttaaaaaatgttgaatgcaaggatgagagaatcccagaaccccattgtgaagacaatggatctgatattgtttttgatagtgatgacgattgttttttagacaacattgacttggataccggggagagaagccatgaacagtgcaaaaagagcaagtggctcaggaatttctttgataaattaaatgcactcaccaatgaggagataagttcattagacaggcagtggcattgcccagcatgccaagggggttctggtgctattgattggtacaaagggttgcagccccttttggatcattccagaacaatacaaacaacgagggcaagactgcaccggatgtttgctgaaactttggaggaagagtgtttcaggagaagagctccattaacaacggttggcgaagtccacaatatatgggagggtcttgataagaaagtcaaggatcatgaaatagtttggcccccaatggttattatcatgaatacaagatatgagcaggacgaaagtaataagtggaatggaatggggaaccaagaactcgtcgattgcttcagtgactatgctgcattgaaggctcgacactcgtatggtccacaagggcaccgagggatgagtgctttaatttttgaggaaaccacggcaggttatctagaagctgtgcggctgcacaagcattttaaagagcaaggaagagatagggaagcttgggattgctgtcaaaatccatttctcccaggtgggaagcgccaactttatggttacttggcttctaaagaagatttggatattttcaacaaacactccggaggaaagacaaaactgaagtttgaaatgagatcatatcaagagatggttgagagaaagataaaacatattaatgatgatagtcggaagcttgactattataagagcatggtagccaaagaacaaatcaaatcacaagtcggtgcagactctttatgtaaatcaagtgagaagttaagcatgacaactgaaaaaaaccgtgttgaccaacaggacaaggagatggatgcactagaaaaaaatttccagagccaaatccaagacattcaacaagccatagctgcaaaggaggataagtttgtgaaattacagctgcaggcaatgcaagaaaaagtgaaagagtcctgcaaagaatcttctgagaaagaggacaaggtggaaaatatctctagtttcctgaagcctcaagacaaggagatgaagcaattcgaggcagagagagagaaaattaaaaaaattcatgaagagaaaaagttggctctgaagaagaagcagtggcaagagcaggttgaacttgagaaggagttagagaatgaactgacgcagctcatggacaagtacaattgcaaccaatctcaagaaaaaaactgttagaaatgaatgacagctaggtaacattattaaggaaaacatacacagaaatggtaaaagccaaaagcattcataggcatacatatcaggcagagtacatgattatgtgttctttctgccacattttattttccataaattaatacttttttcttttggtttacccttgcattttttattttgaaagttgaaaagtgagagttaacaagccccaccggcaccgaaattctggtcccattttcattgatacttgatatagttttgctcattatatctgtagcgtgctttgcttgcaaatggtttcgaatataagtaattttctgttgattgaagttactgttgggaattttggatgcatagtttgaaatagaattagtctgaga

SEQ ID NO: 112 - DNA, 3075 bp, Glycine max
  source 1..3075: mol_type = genomic DNA
tttttattgtgtgattatgatacacatacacattacacgctagactctggaccatcatctgctatcgggtatggctgctgctactgcattctctctccaattccatggatttttgtttttttaaattcttattgcttctttcacatgcaaaactcttaatagtacaattgccttatgaatgcgttattgctatgctgttataaaccaatgctttgttctgttgctccttctgctgttttcttttgttggcaggggtaagtagattcttttcatgaattctcaatgcatgtacccgatatttgctctttctcagataactctgttcctcgattgctcctttgttggggctgaaaaaagaggaacacaacgattgtttgtgtagttaatcaaccaaatgagaaaaaagaggaacacaacgattgagaattaagggataggtaatcaatcaaacttgttcttgactctgtgctatttccatcacagttgctggaaaggttttcactttatcattgaattgatccaatgctctggctctcggtttatgaattaattaaactgttttcattgacatgaattggaacttttggactgtttcttatgacaattttcaaactttatatataaattagcttgggtaaggattgttgtttatgaaaccaattcctttggaacttctgatgctagatgtatttttttaattaagccatccatttgcttgtttattgtttccctgattcccagaggcttcaatattttgaccactggaagctgttttgttgcctttgtatgaggtgtcattgataattatgcttcgaagtgacagtatcaactccctgagataggtggtgaaaattgaattatggctgatgatggtgctgatccatttccgaagttgacaagtgtgtatagagtgtctggttccaaaaacaataagctgagctggaatgtagccaattctcagcaaagtgttgactccagtgtaaacaactcaaggcagttacagagcatttctgatggcagtgcttcaagatcctggttttctcaaaattctagaccaaatgcatgggaagttccaagtgtgattcagaagctgaggctggggaagcggggtaatgacggattgactaacaacagtaacctacaggacaaaagtaattctccagatgctctggctttgacgggaagtggaattttgaatgacagcaagttgcctcctgagtcagcaatatctccaacatcagagacatgtttaaattcatctgttgatgttgttgatacaactacatccaaggatttaaaaaatgttgaatgcaaggatgagagaatcccagaaccccattgtgaagacaatggatctgatattgtttttgatagtgatgacgattgttttttagacaacattgacttggataccggggagagaagccatgaacagtgcaaaaagagcaagtggctcaggaatttctttgataaattaaatgcactcaccaatgaggagataagttcattagacaggcagtggcattgcccagcatgccaagggggttctggtgctattgattggtacaaagggttgcagccccttttggatcattccagaacaatacaaacaacgagggcaagactgcaccggatgtttgctgaaactttggaggaagagtgtttcaggagaagagctccattaacaacggttggcgaagtccacaatatatgggagggtcttgataagaaagtcaaggatcatgaaatagtttggcccccaatggttattatcatgaatacaagatatgagcaggacgaaagtaataagtggaatggaatggggaaccaagaactcgtcgattgcttcagtgactatgctgcattgaaggctcgacactcgtatggtccacaagggcaccgagggatgagtgctttaatttttgaggaaaccacggcaggttatctagaagctgtgcggctgcacaagcattttaaagagcaaggaagagatagggaagcttgggattgctgtcaaaatccatttctcccaggtgggaagcgccaactttatggttacttggcttctaaagaagatttggatattttcaacaaacactccggaggaaagacaaaactgaagtttgaaatgagatcatatcaagagatggttgagagaaagataaaacatattaatgatgatagtcggaagcttgactattataagagcatggtagccaaagaacaaatcaaatcacaagtcggtgcagactctttatgtaaatcaagtgagaagttaagcatgacaactgaaaaaaaccgtgttgaccaacaggacaaggagatggatgcactagaaaaaaatttccagagccaaatccaagacattcaacaagccatagctgcaaaggaggataagtttgtgaaattacagctgcaggcaatgcaagaaaaagtgaaagagtcctgcaaagaatcttctgagaaagaggacaaggtggaaaatatctctagtttcctgaagcctcaagacaaggagatgaagcaattcgaggcagagagagagaaaattaaaaaaattcatgaagagaaaaagttggctctgaagaagaagcagtggcaagagcaggttgaacttgagaaggagttagagaatgaactgacgcagctcatggacaagtacaattgcaaccaatctcaagaaaaaaactgttagaaatgaatgacagctaggtaacattattaaggaaaacatacacagaaatggtaaaagccaaaagcattcataggcatacatatcaggcagagtacatgattatgtgttctttctgccacattttattttccataaattaatacttttttcttttggtttacccttgcattttttattttgaaagttgaaaagtgagagttaacaagccccaccggcaccgaaattctggtcccattttcattgatacttgatatagttttgctcattatatctgtagcgtgctttgcttgcaaatggtttcgaatataagtaattttctgttgattgaagttactgttgggaattttggatgcatagtttgaaatagaattagtctgaga

SEQ ID NO: 113 - DNA, 2301 bp, Glycine max
  source 1..2301: mol_type = genomic DNA
atacacatacacattacacgctagactctggaccatcatctgctatcggtatcaactccctgagataggtggtgaaaattgaattatggctgatgatggtgctgatccatttccgaagttgacaagtgtgtatagagtgtctggttccaaaaacaataagctgagctggaatgtagccaattctcagcaaagtgttgactccagtgtaaacaactcaaggcagttacagagcatttctgatggcagtgcttcaagatcctggttttctcaaaattctagaccaaatgcatgggaagttccaagtgtgattcagaagctgaggctggggaagcggggtaatgacggattgactaacaacagtaacctacaggacaaaagtaattctccagatgctctggctttgacgggaagtggaattttgaatgacagcaagttgcctcctgagtcagcaatatctccaacatcagagacatgtttaaattcatctgttgatgttgttgatacaactacatccaaggatttaaaaaatgttgaatgcaaggatgagagaatcccagaaccccattgtgaagacaatggatctgatattgtttttgatagtgatgacgattgttttttagacaacattgacttggataccggggagagaagccatgaacagtgcaaaaagagcaagtggctcaggaatttctttgataaattaaatgcactcaccaatgaggagataagttcattagacaggcagtggcattgcccagcatgccaagggggttctggtgctattgattggtacaaagggttgcagccccttttggatcattccagaacaatacaaacaacgagggcaagactgcaccggatgtttgctgaaactttggaggaagagtgtttcaggagaagagctccattaacaacggttggcgaagtccacaatatatgggagggtcttgataagaaagtcaaggatcatgaaatagtttggcccccaatggttattatcatgaatacaagatatgagcaggacgaaagtaataagtggaatggaatggggaaccaagaactcgtcgattgcttcagtgactatgctgcattgaaggctcgacactcgtatggtccacaagggcaccgagggatgagtgctttaatttttgaggaaaccacggcaggttatctagaagctgtgcggctgcacaagcattttaaagagcaaggaagagatagggaagcttgggattgctgtcaaaatccatttctcccaggtgggaagcgccaactttatggttacttggcttctaaagaagatttggatattttcaacaaacactccggaggaaagacaaaactgaagtttgaaatgagatcatatcaagagatggttgagagaaagataaaacatattaatgatgatagtcggaagcttgactattataagagcatggtagccaaagaacaaatcaaatcacaagtcggtgcagactctttatgtaaatcaagtgagaagttaagcatgacaactgaaaaaaaccgtgttgaccaacaggacaaggagatggatgcactagaaaaaaatttccagagccaaatccaagacattcaacaagccatagctgcaaaggaggataagtttgtgaaattacagctgcaggcaatgcaagaaaaagtgaaagagtcctgcaaagaatcttctgagaaagaggacaaggtggaaaatatctctagtttcctgaagcctcaagacaaggagatgaagcaattcgaggcagagagagagaaaattaaaaaaattcatgaagagaaaaagttggctctgaagaagaagcagtggcaagagcaggttgaacttgagaaggagttagagaatgaactgacgcagctcatggacaagtacaattgcaaccaatctcaagaaaaaaactgttagaaatgaatgacagctaggtaacattattaaggaaaacatacacagaaatggtaaaagccaaaagcattcataggcatacatatcaggcagagtacatgattatgtgttctttctgccacattttattttccataaattaatacttttttcttttggtttacccttgcattttttattttgaaagttgaaaagtgagagttaacaagccccaccggcaccgaaattctggtcccattttcattgatacttgatatagttttgctcattatatctgtagcgtgctttgcttgcaaatggtttcgaatataagtaattttctgttgattgaagttactgttgggaattttggatgcatagtttgaaatagaattagtctgaga

SEQ ID NO: 114 - DNA, 2689 bp, Glycine max
  source 1..2689: mol_type = genomic DNA
actgcattctctctccaattccatggatttttgtttttttaaattcttattgcttctttcacatgcaaaactcttaatagtacaattgccttatgaatgcgttattgctatgctgttataaaccaatgctttgttctgttgctccttctgctgttttcttttgttggcaggggtaagtagattcttttcatgaattctcaatgcatgtacccgatatttgctctttctcagataactctgttcctcgattgctcctttgttggggctgaaaaaagaggaacacaacgattgtttgtgtagttaatcaaccaaatgagaaaaaagaggaacacaacgattgagaattaagggatagaggcttcaatattttgaccactggaagctgttttgttgcctttgtatgaggtgtcattgataattatgcttcgaagtgacagtatcaactccctgagataggtggtgaaaattgaattatggctgatgatggtgctgatccatttccgaagttgacaagtgtgtatagagtgtctggttccaaaaacaataagctgagctggaatgtagccaattctcagcaaagtgttgactccagtgtaaacaactcaaggcagttacagagcatttctgatggcagtgcttcaagatcctggttttctcaaaattctagaccaaatgcatgggaagttccaagtgtgattcagaagctgaggctggggaagcggggtaatgacggattgactaacaacagtaacctacaggacaaaagtaattctccagatgctctggctttgacgggaagtggaattttgaatgacagcaagttgcctcctgagtcagcaatatctccaacatcagagacatgtttaaattcatctgttgatgttgttgatacaactacatccaaggatttaaaaaatgttgaatgcaaggatgagagaatcccagaaccccattgtgaagacaatggatctgatattgtttttgatagtgatgacgattgttttttagacaacattgacttggataccggggagagaagccatgaacagtgcaaaaagagcaagtggctcaggaatttctttgataaattaaatgcactcaccaatgaggagataagttcattagacaggcagtggcattgcccagcatgccaagggggttctggtgctattgattggtacaaagggttgcagccccttttggatcattccagaacaatacaaacaacgagggcaagactgcaccggatgtttgctgaaactttggaggaagagtgtttcaggagaagagctccattaacaacggttggcgaagtccacaatatatgggagggtcttgataagaaagtcaaggatcatgaaatagtttggcccccaatggttattatcatgaatacaagatatgagcaggacgaaagtaataagtggaatggaatggggaaccaagaactcgtcgattgcttcagtgactatgctgcattgaaggctcgacactcgtatggtccacaagggcaccgagggatgagtgctttaatttttgaggaaaccacggcaggttatctagaagctgtgcggctgcacaagcattttaaagagcaaggaagagatagggaagcttgggattgctgtcaaaatccatttctcccaggtgggaagcgccaactttatggttacttggcttctaaagaagatttggatattttcaacaaacactccggaggaaagacaaaactgaagtttgaaatgagatcatatcaagagatggttgagagaaagataaaacatattaatgatgatagtcggaagcttgactattataagagcatggtagccaaagaacaaatcaaatcacaagtcggtgcagactctttatgtaaatcaagtgagaagttaagcatgacaactgaaaaaaaccgtgttgaccaacaggacaaggagatggatgcactagaaaaaaatttccagagccaaatccaagacattcaacaagccatagctgcaaaggaggataagtttgtgaaattacagctgcaggcaatgcaagaaaaagtgaaagagtcctgcaaagaatcttctgagaaagaggacaaggtggaaaatatctctagtttcctgaagcctcaagacaaggagatgaagcaattcgaggcagagagagagaaaattaaaaaaattcatgaagagaaaaagttggctctgaagaagaagcagtggcaagagcaggttgaacttgagaaggagttagagaatgaactgacgcagctcatggacaagtacaattgcaaccaatctcaagaaaaaaactgttagaaatgaatgacagctaggtaacattattaaggaaaacatacacagaaatggtaaaagccaaaagcattcataggcatacatatcaggcagagtacatgattatgtgttctttctgccacattttattttccataaattaatacttttttcttttggtttacccttgcattttttattttgaaagttgaaaagtgagagttaacaagccccaccggcaccgaaattctggtcccattttcattgatacttgatatagttttgctcattatatctgtagcgtgctttgcttgcaaatggtttcgaatataagtaattttctgttgattgaagttactgttgggaattttggatgcatagtttgaaatagaattagtctgaga

SEQ ID NO: 115 - DNA, 2865 bp, Glycine max
  source 1..2865: mol_type = genomic DNA
aatttaagacgcgtgtgaaaattgacaaaaaatgaaatttgataaaaatttcaagtccgaaaatacaacaaatgagagaaaatgccaagtcaacttaaagttcacttagctatcagccctttcgttttgcttcacacaacagccggcgatcgccttcggatctctgagaaaaggaattcaaaaagagggtgtgagagacctttcactatggcagacattggtgattcttcttccaaagggaaaaatgtattggaatctcttccaaaaattgagcaattaactcaaggtgttgctgatgttaacatagagtcaggacaagatgatggtgaatgggtggtatatgcaaagaagtccaagaatagagcccgaagcacaactgttaaaccatggagtcctccggttcataattctagacccactggaaatacaaagatggctcacaagccagttactcggaatgatggaggagttggaagggcttctgggagtggaaatccttggcagtcccaaaatgctaacttcaagagacctgctggcagaggaaatggaaggccacagttaactgcaagtgaatctgaaagcagcaataatgtgacttctaatccagtcattcgacctcccctcgagcatgggtggaattggcaatctatatctggctccaagcagtccaagagtgttgatgatagcctggtgaagggtgaaattacagaagagtcccctatgaagaatgatagtgttgatgatgaaggggatgaagaggaagggtttgatgctatggaagatacggatgatgatctaatgagtgatgattatgattctgatactagtcaaaagagccacgagactcgtaagaagagcaaatggtttaaggatttctttgagaacttggatggcctatctatcgaaaagatcaatgaaccggaaaggcagtggcactgtacagcttgtcgaggtggtcccggtgctattgattggtacagaggactgcagcctctgattactcatgccaaaacaaaggggtcaaaaagggtgaagatccatagggagtttgctgagcttttggaagaggaactgcgcaaaaggggctctgcagtaattccacctggggaagtatttggtaagtggaaaggtttaaaagatgaggagaaagatcatgaaatagtttggcctccgatggttgtcattcagaatacaaggcttgaacaggatgaaaatgataagtggctaggtatgggtaaccaggagcttcttaattattttagcgcatatgatgctgtgaaagctcgacacgcttatggcccccagggtcatcgggggttgagcgttttgatatttgaagcatcagctataggttatcttgaggctgagcgtctacacaagcactttgcagaacaaggaactgaccgagatgcttggtttagtcaccaccgtagattatttctccctggtggccggcgacagctctatggatacatggcaataaaagaagacctggactttttcaacagacattgccaaggtaaatctagactcaaatatgacatgagatcataccaggagatggttgtaaaccaacttcggcaaatgaatgaggacaaccagctgcttatttatttgaaggacagggatgccaaaaaacaaaaacaaacaaaagctcttgaagaatctttgggtatagtgactgagaagctgcgaaggacaatggaagaaaatcgcattgtgaggttgagaactaaaatgcaacatgaagagaacaaggaagagatgtacatgcaagaagaattttttaaggaacagatcagaatcattcatgattcaagggctgcaaaggaagaagagtttgagaggatgcagcaggagaaacgagagaaggtgaagccgtcaagtactagccctttaaatgaagaggaagggagagttaaggtggacgaatatctaaaatttgttgagtttcaagataaagaaatggaaaactttgttgctgaagaggagaaactccgtcaagctcataaagacaatgttgatgcaatgacgcggaggcactgggaggaaaaggtgcagttggaggaaaggtttaatgaggagctagccaagctcatggaaaagtattccctatctcacccagaaaagtccaatggtatctgatgacagtgtgttgcacatcgcagacaaaaagataaatacagcattataaacagaagataaatggatagagtgattgttctaagttgaagaccctcagatatctgcacttttgtacttgaatacaaggacatgcctagagaatggagatagaaagcttgctaaaatacaaatgacattgcttattttctcctttggtattagtggcttgaacttttgatgtaattgcttttatgcaaattttttgaatagcagcaatttggatggagtgaaatacaccactttaggttatctctggctttggtgaatcgtatgaatggaagcctgatagctctgctgtaagagaagtgttagcgacacactccctaacacacttcctattattattagtgaaaatttattggaaattacaaagtttgagtgaaactcattaaatagttaagacttaccaataaatttcagtcactaataagtgtgttaagtatgttgttaacatttttcttactgtattcatctgtgaagcctgcttctgtattcatctgtcaagcctgcctctgttgcttcaaaactcaaaaggcctgaattcaacgttgtaataaatattgaattttgtttttataggggttaatatttatgtttatccttgtgttcacttgtccgttcgccccatggttatgtttttcaaactttgaggtaataggtttagttgcctttaaatgtaac

SEQ ID NO: 116 - DNA, 2477 bp, Glycine max
  source 1..2477: mol_type = genomic DNA
gtttaaaagtaaattgttagagaggacgcagtcacgcctgtgactgtgtgatacactagactgtattgctgctactgcattctctctccaattccatgcatttttgcttttttaaattcttattgcttctttcacatgccaaactcttcgagtacaattgccgttacttttattcctccttatgaatgcgttactgctatgttataaatagatgctttgttcttgttgctccatctgtcgtgttcttttgttgacagggtggtgaaaattgaattatggctgatgatggtgctgatccatttccagtgttgacaagtgtgtatagagtatctggttccaaaaacagtcagctgggctggaatgtagccaattctcagcaaactgttgactccagtgtaaacaactcaaggcagttacagagcatttctgatggcagtgctccaagaccctggttttctcaaaattttagaccaaatgcatgggaagttccaggtgtgattcagaagctgaggccggcaaagcggggtaatgacggattggctttgacgggaagtggaattttgaacgacaagttgcctcctgagtcagtaatatctccaacatcagagacagagagagggacagggttaaattcatctgttggagtcgttacaactacatccaaggattgtgaaaatgttgaatgcaaggacaaggataagagaatcccagaaccccaatgtgaaaacaacaatgatcagattgttgacaatggatctgatattgtttttgatagtgatgatgattgttttttagatgacattgactcagatactggagagagaagccatgaacagtgcaaaaagagcaagtggctcaggaatttctttgataaattaaatgcactcaccaatgaggagataagttcattagacaggcagtggcattgcccagcatgccaagggggttctggtgctattgattggtacaaagggctgcatccccttttggatcattccagaacaatacaaacaaagagggcaagactgcaccggatgtttgctgaaactttggaggaagagtgtttcaggagaagagctccattaacaacagtcagtgacgtccatgatatatgggagggtcttgataagaaagtcaaggatcatgaaatagtttggcccccaatggttatcatcatgaatacaagatacgagcaggacgaaagtaacaagtggaatggaatggggaaccaaggactccttgattgcttctgtgactatgcagcattgaaggctcgacactcgtatggtccacaagggcaccgagggatgagtgccttaatttttgaggaatccacggcaggttatctagaagctgtgcggctccacaagcattttaaagagcaaggaagagatagggaggcttgggattgctatcggaatccatttctcccaggtgggaagcgccaactttatggttacttggcttctaaagaagatttagatattttcaacaagcactctagaggaaagacaaaattgaagtttgaaatgagatcatatcaagagatggttgagagcaagataaaacatattaatgatgatagtcggaagcttgactattataagagcatggtagccaaagaacaaatcaaatcacaagtaggtgcagactctttattgagattaagtgagaagttaagcttgacaaccgaagaaaaccgtgttgatcaacaaaataaggagatggatgcactagaaaaaaatttccagagccaaatcctagacattcaacaagccatagctgcaaaggaagataagtttgtgaaattacagcaggcaatgcaagaaaaagtgaaagagtcctgcggagaatcttctgagaaagaggacaaggtagaaaatatctcttgtttcctgaagccccaagacaaggagatgaagcagtttgaggcagagagagagaaaatcataaaaattcatgaagagaaaaggttggctctgaagaagaagcattggcaagagcaggttgaacttgagaaggagttagagaatgaacggacgcagctcatggacaagtacacttgcaaccagactcaagaagaaaactgttatgtggatcattaaggaaaacatacacagaaatggaaaaagccaaaagcatccacaggcatacagatcatgcagagtacatgttatgtgctctgccacattttccatgaatttatacttttttcttttggtttactcttgcatttattttgaaagttgaaaagtgagaaagttaacaagccccaccggcaccaaaattctggttccattttcattgatacttgatatagttttgctctcattatatatgtagcgtgcatgctttgcttgcaaatggtttcgaatataaattttctgttgattaaagttactgtcttactgtagggaattttggatgtatagtttgaaatggaattagtctgagactcatactgaataataccaaag

SEQ ID NO: 117 - DNA, 4261 bp, Glycine max
  source 1..4261: mol_type = genomic DNA
ttttagccctaacaatggtagcgaatagcgacactctcagtctcactgagtcacattatctttgtgtgtgtatcgtaaaatgtaaacttcgtggagaaggtatcgcaaactgaatcaatcagactagacttgacccgtcaacttgcaactctctcttcaatcgcaattccttcacttcccactctcatacaaagacccagaatttacatactactgagaacatggacttagaaggaagtgaaaaggattcagtggttactcagattagcattggcggatttggcagtgaggtcaaagcaagtgatctcgtgaattacttggaggataaaattggacttgtgtacaggtgtaggttgaagacttcttggacccctccagagtcatatccagaatttaatatcattgatactgcaaatattagaagaacggataactataagaaggtggagccccatgcctttgtgcattttgcatctccggaatctgtgactgcagccctgaatgcttcaggttgttgtgatctatttttgaagaatcaacccttaaaggtcagctgtgggcctgaaaatccatacttcctgaaccaaaggaggagaactacaactccttttaagatgtctgatgtacttgttgaaattgggactttggttagcccaggggagttttttgtttcttggagaggacctgataaaggtgtaaaatttcttgtggatccctttgatggcatgtgcaggttttgtttcagtagggatactgcattctcattcaaagggatagaaaaaaaagcagtgataaagtgtgattttcaggtgggattcctggttagagacattaatgagatcaagagatataatgatacatcatatctcgttgttttattgcacctagcttcttcaccttgggtttggtacagaactgccgatgatgacattgaagaatcagtaccatttgatttgctagatgatgatgatccttggattagaaccactgattttactcccagtggggcaattggtcgatgcaatttttatagaatttcaatcccacctcgccatggtgcaaaattgatgaaggccatgctttatctgaaaggtcaaagagtgcaaatgcaagaacttgcacttaaacagacacttaggacactgaatgaacctgattttggtgtgcccatgtcagatgctttcttctatatacattttcagaaggacattgcttttgacataatgtttttggtcaatgctattgtacataaaggcatattcaatcagcacaggttgtcggataggttttttgaattgctgaaaaatcaacctaaggagctcaatgtggctgccctgaagcatttatgttcttacaagcgcccagtatttgatgcaactaagaggctaaaaatagtccaagaatggttgctcagaaatcctaaactttatcagatctctaaacagttggatgatattgttgaggttagaagattggttattactccatcaaaagcctattgtataccgcctgaagttgaattgtccaacagggttctcagaaaattcagagaagtttcagattgtttcttgagagtcacctttatggatgaaggcatgcaaacaattaatgtgaatgctcttaactattatgttgctcctatagtgaaggaaatcacatcgaattctttctctcaaaggacaaaaatatataaaagggtcaagactatcttggaacagggattttacttttgtggccgaaaatattcatttttagccttttcatccaatcaacttagagatagatctgcttggttttttgctgaagacaaaataagatgtgatgatatacgaaattggatgggcaagtttaatcagaggaatgttgcaaaatgtgctgctaggatgggacaatgcttctcgtctacttatgcaacagttgaagttgctgcaaatgaagttaactccatgctacctgatgttgagaggaacaattacattttctctgatggtattggtgttatcactcatgatcttgcaagggaagttgcagaaaagttgaagttggacaatgtaccctctgcttaccagatcagatatgctggttttaaaggggttgtggcctcttggccggccaaaggggatggagtcagactttctttgaggcctagtatgaacaagtttcaatctactcataatatcttggagatctgtgcttggaccaggtttcagcctggttttcttaaccggcagattataacattgctttcagcactgggtgtgcctgatgaagtattttggcaaatgcaggaggcaatgcttttgaagttaaatcaaatgcttgtggatgcagatattgctttcgatgttcttaccaaatcatgtgctgagcatgggaatgctgcagcaataatgttaagttgtggcttcagtcccctaacagaacctcatcttagaggaatgctaacttctacacgtgctgcgcagctttggggacttagagaaaagtccaggatttttgtatcgtctgggagatggttgatgggtgtcttagatgagtcgggcgtgcttgaacaagggcagtgctttgttcaagtgtctactccttctcttgaaaattgtttctcaaagcatggttcaagattttcagagacaaagaacctgcatgtagttaaaggttttgtgattatagcaaaaaatccttgccttcatccaggagatgtaagagttttggaggcagttgatgcccccgatttacatcatttaaatgattgtcttgttttccctcaaaagggtgacagaccccatacaaatgaagcttctggaagtgaccttgacggggatttatattttgtcacatgggatgaaaatctcattccaccaagtaagaggagctggatacctatggagtatgcccctcaagaaagcaaacttaagacacgtcaagtgatgacccgagacatcatagaattttttgtcagaaacatggtaaatgaacatttgggtgcaatctgcaatgcacatgtggtacatgccgattccagtgactacggtgccttggatgagaaatgcatacacttggccgagctagcagccactgctgttgattttccaaagaccgggaagcttgtcactatgcctcctcatctgaaaccaaaattgtaccctgatttcatggggaaagagcggcaccagtcttacaggtcgaagaaaatcctgggtagactttaccggcgtatcaaagatgcttatgatgaagatattgatgctccctatttgaactttgtgactggcgatataccgtatgataaagatcttgaagttccaggatctgctgattttattgctgatgcgtgggagcaaaaatgctcatatgatggccaattgagtgggctacttggacaatacaaagtgaaaagagaagaggaagttgttactggacagatttggtctatgccaaaatacaacagtaggaagcaaggggagcttaaagagaggctgaagcactcttacagtgccctgaaaaaagaatttaggcacacttttgagaaattgaattcagatgttggagaattaagcgaggaagaaaaaaatttgttctatgagcagaaagcttcggcctggtatcaggtgacatatcatcctgagtgggtgaaaaaatcccttgatctgcaagataaatcctcagagaaccaagaggctgatagtttgggaagtacggtgatgttgagttttccttggattgcagttgattacctagctcgcacaaagataaggcaacgacatcagagatgtggaaattttgactcaactaagccagttgattctctggcaaagtatctatctgaaaggttataataattctattgagcttgctcttggctactaggccactctgccatcctataatattacgtataatgtgtcttcactttagctgcttcgattgtaactaggtttgttcccaagccaggaaatgcctctggttttgaggcttaagactgtatctagtctagttacatttgatactgtttgaccgttttgttatagtagtcttgtgcatgcggttatatgtatgtgattgtgattaaattatgtttcttgagctttctaaacatagtttgaacaatggtgaagctatcattgaaatctttgtgtgcagcattcataagtattttaaacaatagtgaagttattattgagatctttggcttataggcacagttaaagctcttgggaattaaatgtcttggcgaagtacatatgtgtcaactaataagaag

SEQ ID NO: 118 - DNA, 4398 bp, Glycine max
  source 1..4398: mol_type = genomic DNA
ttttagccctaacaatggtagcgaatagcgacactctcagtctcactgagtcacattatctttgtgtgtgtatcgtaaaatgtaaacttcgtggagaaggtatcgcaaactgaatcaatcagactagacttgacccgtcaacttgcaactctctcttcaatcgcaattccttcacttcccactctcatacaaagacccaggtacatcactttctattacccttttctaatgtatcaatcctttctcatcaaagggtattgcgagcgagactacgtgggagcatgattgctttcatgatttgatcacaacgctatcctgcgtttggtttcgttactggaatttacatactactgagaacatggacttagaaggaagtgaaaaggattcagtggttactcagattagcattggcggatttggcagtgaggtcaaagcaagtgatctcgtgaattacttggaggataaaattggacttgtgtacaggtgtaggttgaagacttcttggacccctccagagtcatatccagaatttaatatcattgatactgcaaatattagaagaacggataactataagaaggtggagccccatgcctttgtgcattttgcatctccggaatctgtgactgcagccctgaatgcttcaggttgttgtgatctatttttgaagaatcaacccttaaaggtcagctgtgggcctgaaaatccatacttcctgaaccaaaggaggagaactacaactccttttaagatgtctgatgtacttgttgaaattgggactttggttagcccaggggagttttttgtttcttggagaggacctgataaaggtgtaaaatttcttgtggatccctttgatggcatgtgcaggttttgtttcagtagggatactgcattctcattcaaagggatagaaaaaaaagcagtgataaagtgtgattttcaggtgggattcctggttagagacattaatgagatcaagagatataatgatacatcatatctcgttgttttattgcacctagcttcttcaccttgggtttggtacagaactgccgatgatgacattgaagaatcagtaccatttgatttgctagatgatgatgatccttggattagaaccactgattttactcccagtggggcaattggtcgatgcaatttttatagaatttcaatcccacctcgccatggtgcaaaattgatgaaggccatgctttatctgaaaggtcaaagagtgcaaatgcaagaacttgcacttaaacagacacttaggacactgaatgaacctgattttggtgtgcccatgtcagatgctttcttctatatacattttcagaaggacattgcttttgacataatgtttttggtcaatgctattgtacataaaggcatattcaatcagcacaggttgtcggataggttttttgaattgctgaaaaatcaacctaaggagctcaatgtggctgccctgaagcatttatgttcttacaagcgcccagtatttgatgcaactaagaggctaaaaatagtccaagaatggttgctcagaaatcctaaactttatcagatctctaaacagttggatgatattgttgaggttagaagattggttattactccatcaaaagcctattgtataccgcctgaagttgaattgtccaacagggttctcagaaaattcagagaagtttcagattgtttcttgagagtcacctttatggatgaaggcatgcaaacaattaatgtgaatgctcttaactattatgttgctcctatagtgaaggaaatcacatcgaattctttctctcaaaggacaaaaatatataaaagggtcaagactatcttggaacagggattttacttttgtggccgaaaatattcatttttagccttttcatccaatcaacttagagatagatctgcttggttttttgctgaagacaaaataagatgtgatgatatacgaaattggatgggcaagtttaatcagaggaatgttgcaaaatgtgctgctaggatgggacaatgcttctcgtctacttatgcaacagttgaagttgctgcaaatgaagttaactccatgctacctgatgttgagaggaacaattacattttctctgatggtattggtgttatcactcatgatcttgcaagggaagttgcagaaaagttgaagttggacaatgtaccctctgcttaccagatcagatatgctggttttaaaggggttgtggcctcttggccggccaaaggggatggagtcagactttctttgaggcctagtatgaacaagtttcaatctactcataatatcttggagatctgtgcttggaccaggtttcagcctggttttcttaaccggcagattataacattgctttcagcactgggtgtgcctgatgaagtattttggcaaatgcaggaggcaatgcttttgaagttaaatcaaatgcttgtggatgcagatattgctttcgatgttcttaccaaatcatgtgctgagcatgggaatgctgcagcaataatgttaagttgtggcttcagtcccctaacagaacctcatcttagaggaatgctaacttctacacgtgctgcgcagctttggggacttagagaaaagtccaggatttttgtatcgtctgggagatggttgatgggtgtcttagatgagtcgggcgtgcttgaacaagggcagtgctttgttcaagtgtctactccttctcttgaaaattgtttctcaaagcatggttcaagattttcagagacaaagaacctgcatgtagttaaaggttttgtgattatagcaaaaaatccttgccttcatccaggagatgtaagagttttggaggcagttgatgcccccgatttacatcatttaaatgattgtcttgttttccctcaaaagggtgacagaccccatacaaatgaagcttctggaagtgaccttgacggggatttatattttgtcacatgggatgaaaatctcattccaccaagtaagaggagctggatacctatggagtatgcccctcaagaaagcaaacttaagacacgtcaagtgatgacccgagacatcatagaattttttgtcagaaacatggtaaatgaacatttgggtgcaatctgcaatgcacatgtggtacatgccgattccagtgactacggtgccttggatgagaaatgcatacacttggccgagctagcagccactgctgttgattttccaaagaccgggaagcttgtcactatgcctcctcatctgaaaccaaaattgtaccctgatttcatggggaaagagcggcaccagtcttacaggtcgaagaaaatcctgggtagactttaccggcgtatcaaagatgcttatgatgaagatattgatgctccctatttgaactttgtgactggcgatataccgtatgataaagatcttgaagttccaggatctgctgattttattgctgatgcgtgggagcaaaaatgctcatatgatggccaattgagtgggctacttggacaatacaaagtgaaaagagaagaggaagttgttactggacagatttggtctatgccaaaatacaacagtaggaagcaaggggagcttaaagagaggctgaagcactcttacagtgccctgaaaaaagaatttaggcacacttttgagaaattgaattcagatgttggagaattaagcgaggaagaaaaaaatttgttctatgagcagaaagcttcggcctggtatcaggtgacatatcatcctgagtgggtgaaaaaatcccttgatctgcaagataaatcctcagagaaccaagaggctgatagtttgggaagtacggtgatgttgagttttccttggattgcagttgattacctagctcgcacaaagataaggcaacgacatcagagatgtggaaattttgactcaactaagccagttgattctctggcaaagtatctatctgaaaggttataataattctattgagcttgctcttggctactaggccactctgccatcctataatattacgtataatgtgtcttcactttagctgcttcgattgtaactaggtttgttcccaagccaggaaatgcctctggttttgaggcttaagactgtatctagtctagttacatttgatactgtttgaccgttttgttatagtagtcttgtgcatgcggttatatgtatgtgattgtgattaaattatgtttcttgagctttctaaacatagtttgaacaatggtgaagctatcattgaaatctttgtgtgcagcattcataagtattttaaacaatagtgaagttattattgagatctttggcttataggcacagttaaagctcttgggaattaaatgtcttggcgaagtacatatgtgtcaactaataagaag

SEQ ID NO: 119 - DNA, 4437 bp, Glycine max
  source 1..4437: mol_type = genomic DNA
tttgttttccagccctaacaaatgaaaatggcgaaactgattacagagcgacttgatagcaaatagcgacaagacaaaggacacgcacactcattcactcagtcacactatctttgtgtattgtaaaatgtaaacttcgtggagaaggcatcgcaaaccgaatcaatcagacttgacttgactcgtcatgctgcaactctctctcactttatcttccactcttcaatcgcaattcctccacactctcatacacagctacatcactttctattactcttttctaattcttatatgcttataatgtaatgtgaaccttaagttttcaaccatttcttatcaaagggtattgcgagcgagactctgcggttgctgatactttcatgatttgatcacaacgctatcctgcgtttttagtttggttactggactactaagaacatggacttagaaggaagtgaaaagggttcagtggttactcagattagcattggtggatttggcagtgaggtcaaagcaagtgatctcctgaattacttggaggataaaattggacttgtgtacaggtgtaggttgaagacttcttggacccctccagagtcatatccagaatttaaaatcattgatactgcaaagattagaagaacggaagactacaagaaggtggagccccatgcctttgtgcattttgcatctccggaatctgtgactgcagccctgaatgcttcaggttgttgtgatctatttttgaagaatcaaccgttaaaggtcagctgtgggcccaaaaatccatacttcctgaaccaaaggaggagaactacaactccttttaagatgtctgatgtacttgttgaaattgggactttggttagtccaggggagtttttcgtttcttggagaggacctgataaaggtgtaaaatttcttgtggatccctttgatggcatgtgcaggttttgtttcagtagagatactgcattctcattcaaagggatagacaaaaaagcagttataaagtgtgattttcaggtgggattcctggttagagacattaatgagatcaggagatataatgatacatcatatctcgttgttttattacacctagcttcttcgccttgggtttggtacagaactgccgatgatgacattgaagaatcagtaccatttgatttgctggatgatgatgatccttggatcagaaccactgattttactcctagtggggcaattggtcgatgcaatttttatagaatttcaatcccacctcgccatggtgcgaaattgatgaaggccatgctttatctaaaaggtcaaagagtgcaaatacaagaacttccactcaaacagacacttaggacacagaatgaacctgattttggcatgccaatgtcagatgctttcttctatgtacattttcagaaggacattgcttttgacataatgtttttggtcaatgctattgtacataaaggcatattcaatcagcacaggttgtcggataggttttttgaattgctgagaaatcaacctaaggagcttaatgtggctgccctgaagcatttatgttcgtacaagcgcccagtatttgatgcaactaagaggctaaaaatagtccaagaatggttgctcagaaatccaaaactgtatcagatctctaaacagttggatgatattgttgaggttagaagattggttgttactccatcaaaagcctattgtataccacctgaagttgaattgtccaacagggttctcagaaaattcagagaagtttcagattgtttcttgagagtcacctttatggatgaaggcatgcagacaattaatgtgaatgctcttaactattatgttgctcctatagtgaaggaaatcacatcaaactctttctctcaaaagacaaaaatatataaaagggtgaaaactatcttggaagagggattttacttttgtggccgaaaatattcatttttagccttttcatccaatcaacttagagatagatctgcttggttttttgctgaggacaaaataagatgtgatgatatacgaaattggatgggcaagtttaatcagaggaatgttgcaaaatgtgctgctaggatgggacaatgcttctcatctacttatgcaacagttgaagttgctgcaaatgaagttaactccatgctacccgatgttgagaggaacaattacattttctctgatggtattggtgttatcactcatgatcttgcaagggaagttgcagaaaagttgaaattggacaatgtaccctctgcttaccagatcagatatgctggttttaaaggggtcgtggcctcttggccggctaaaggggatggggtcagactttctttgaggcctagtatgaacaagtttcaatctactcataatatcttggagatctgtgcgtggaccaggtttcagcctggttttcttaatcggcagattataacattgctttcggcactgggtgtgcctgatgaaatattttggcaaatgcaggaggcaatgcttttgaagttaaatcaaatgcttgtggatgcagatatcgcttttgatgttctgaccaaatcatgtgctgagcatgggaatgctgcagcaataatgttaagttgtggcttcagtcccctaacagaacctcatcttagaggtatgttaacttctacacgtgctgcgcagctttggggacttagagaaaagtccaggatttttgtatcatctgggcgatggttgatgggtgtcttagatgagttgggtgtgcttgaacaagggcagtgctttgttcaagtgtctacaccttctcttgaaaattgtttctcaaagcatgggtcaagattttcagagacaaagaacctgcatgtagttaaaggttttgtggttatagccaaaaatccttgccttcatccaggagatgtaagagttttggaggcagttgatgcccccgatttacatcatttaaacgattgtcttgttttccctcaaaagggtgacagaccccatacaaatgaagcttctggaagtgaccttgatggggatctatattttgtcacatgggatgaaaatctcattccaccaagtaagaggagctggatacctatggagtatgcccctcaagaaagcaaacttctgacacgtcaagtgatgacccgagacatcatagaattttttgtcagaaacatggtaaatgaacatttgggtgcaatctgcaatgcacatgtggtacatgctgattccagtgactatggtgccttggatgaaaaatgcatacacttggccgagctagcagccactgctgtcgattttccaaagaccgggaagcttgtcactatgcctcctcatctgaagccaaaattgtaccctgatttcatggggaaagagcggcaccagtcttacaggtcaaataaaatcctgggtagactttaccggcatatcaaagatgcttatgatgaagatattgaagctccgtatttgaactttgtgactggcgatataccatatgataaagatcttgaggttccaggatctgctgattttattgctgatgcgtgggagcaaaaatgctcatatgatggccagttgagtgggctaattggtcaatacaaagtgaaaagagaagaggaagttgttactggacagatttggtccatgccaaaatacaacagtaggaagcaaggggagcttaaggagaggctgaagcactcttacagtgccctgaaaaaagaatttagatacactttcgagaagttgaattcggatgttggagaattaagcgaggaagaaaaaaatttgttgtatgagcagaaagcttcggcctggtatcaagtgacatatcatcctgaatgggtgaaaaaatcccttgatctgcaagataaatcctcagagaaccaagaggctgatagtttgggaagtacggtgatgttgagttttccttggattgcagttgattacctagctcgcacaaagataaggcaacgacatcagaggagtggaaattttgactcaactaagccagttgattatctggcaaagtatctatctgaaaggttataattccattgagagcttgctcttggctacaaggccactctgccattctataatattacagtgaacctgtgttgtatacgccttataatgtgtcttcactttagctgctttgattgtaactaggtttgttcccaagccagggaattcctttgcctttggggcttaagactgtatctagtctagttacatttgatacattgaccgtatgttatagtagtagtcttgttgtgctgcggttatttgtatatgattgtgattgtgattagattatgtttttttgagctttctaagcatactttgaacaaaggtgaaactattgttgagatctttgtgtgcagcattcataagttatttcaaacaatagtgaagttattattgagatcttcg

SEQ ID NO: 120 - DNA, 4446 bp, Glycine max
  source 1..4446: mol_type = genomic DNA
tttgttttccagccctaacaaatgaaaatggcgaaactgattacagagcgacttgatagcaaatagcgacaagacaaaggacacgcacactcattcactcagtcacactatctttgtgtattgtaaaatgtaaacttcgtggagaaggcatcgcaaaccgaatcaatcagacttgacttgactcgtcatgctgcaactctctctcactttatcttccactcttcaatcgcaattcctccacactctcatacacagctacatcactttctattactcttttctaattcttatatgcttataatgtaatgtgaaccttaagttttcaaccatttcttatcaaagggtattgcgagcgagactctgcggttgctgatactttcatgatttgatcacaacgctatcctgcgtttttagtttggttactggaatttacagactactaagaacatggacttagaaggaagtgaaaagggttcagtggttactcagattagcattggtggatttggcagtgaggtcaaagcaagtgatctcctgaattacttggaggataaaattggacttgtgtacaggtgtaggttgaagacttcttggacccctccagagtcatatccagaatttaaaatcattgatactgcaaagattagaagaacggaagactacaagaaggtggagccccatgcctttgtgcattttgcatctccggaatctgtgactgcagccctgaatgcttcaggttgttgtgatctatttttgaagaatcaaccgttaaaggtcagctgtgggcccaaaaatccatacttcctgaaccaaaggaggagaactacaactccttttaagatgtctgatgtacttgttgaaattgggactttggttagtccaggggagtttttcgtttcttggagaggacctgataaaggtgtaaaatttcttgtggatccctttgatggcatgtgcaggttttgtttcagtagagatactgcattctcattcaaagggatagacaaaaaagcagttataaagtgtgattttcaggtgggattcctggttagagacattaatgagatcaggagatataatgatacatcatatctcgttgttttattacacctagcttcttcgccttgggtttggtacagaactgccgatgatgacattgaagaatcagtaccatttgatttgctggatgatgatgatccttggatcagaaccactgattttactcctagtggggcaattggtcgatgcaatttttatagaatttcaatcccacctcgccatggtgcgaaattgatgaaggccatgctttatctaaaaggtcaaagagtgcaaatacaagaacttccactcaaacagacacttaggacacagaatgaacctgattttggcatgccaatgtcagatgctttcttctatgtacattttcagaaggacattgcttttgacataatgtttttggtcaatgctattgtacataaaggcatattcaatcagcacaggttgtcggataggttttttgaattgctgagaaatcaacctaaggagcttaatgtggctgccctgaagcatttatgttcgtacaagcgcccagtatttgatgcaactaagaggctaaaaatagtccaagaatggttgctcagaaatccaaaactgtatcagatctctaaacagttggatgatattgttgaggttagaagattggttgttactccatcaaaagcctattgtataccacctgaagttgaattgtccaacagggttctcagaaaattcagagaagtttcagattgtttcttgagagtcacctttatggatgaaggcatgcagacaattaatgtgaatgctcttaactattatgttgctcctatagtgaaggaaatcacatcaaactctttctctcaaaagacaaaaatatataaaagggtgaaaactatcttggaagagggattttacttttgtggccgaaaatattcatttttagccttttcatccaatcaacttagagatagatctgcttggttttttgctgaggacaaaataagatgtgatgatatacgaaattggatgggcaagtttaatcagaggaatgttgcaaaatgtgctgctaggatgggacaatgcttctcatctacttatgcaacagttgaagttgctgcaaatgaagttaactccatgctacccgatgttgagaggaacaattacattttctctgatggtattggtgttatcactcatgatcttgcaagggaagttgcagaaaagttgaaattggacaatgtaccctctgcttaccagatcagatatgctggttttaaaggggtcgtggcctcttggccggctaaaggggatggggtcagactttctttgaggcctagtatgaacaagtttcaatctactcataatatcttggagatctgtgcgtggaccaggtttcagcctggttttcttaatcggcagattataacattgctttcggcactgggtgtgcctgatgaaatattttggcaaatgcaggaggcaatgcttttgaagttaaatcaaatgcttgtggatgcagatatcgcttttgatgttctgaccaaatcatgtgctgagcatgggaatgctgcagcaataatgttaagttgtggcttcagtcccctaacagaacctcatcttagaggtatgttaacttctacacgtgctgcgcagctttggggacttagagaaaagtccaggatttttgtatcatctgggcgatggttgatgggtgtcttagatgagttgggtgtgcttgaacaagggcagtgctttgttcaagtgtctacaccttctcttgaaaattgtttctcaaagcatgggtcaagattttcagagacaaagaacctgcatgtagttaaaggttttgtggttatagccaaaaatccttgccttcatccaggagatgtaagagttttggaggcagttgatgcccccgatttacatcatttaaacgattgtcttgttttccctcaaaagggtgacagaccccatacaaatgaagcttctggaagtgaccttgatggggatctatattttgtcacatgggatgaaaatctcattccaccaagtaagaggagctggatacctatggagtatgcccctcaagaaagcaaacttctgacacgtcaagtgatgacccgagacatcatagaattttttgtcagaaacatggtaaatgaacatttgggtgcaatctgcaatgcacatgtggtacatgctgattccagtgactatggtgccttggatgaaaaatgcatacacttggccgagctagcagccactgctgtcgattttccaaagaccgggaagcttgtcactatgcctcctcatctgaagccaaaattgtaccctgatttcatggggaaagagcggcaccagtcttacaggtcaaataaaatcctgggtagactttaccggcatatcaaagatgcttatgatgaagatattgaagctccgtatttgaactttgtgactggcgatataccatatgataaagatcttgaggttccaggatctgctgattttattgctgatgcgtgggagcaaaaatgctcatatgatggccagttgagtgggctaattggtcaatacaaagtgaaaagagaagaggaagttgttactggacagatttggtccatgccaaaatacaacagtaggaagcaaggggagcttaaggagaggctgaagcactcttacagtgccctgaaaaaagaatttagatacactttcgagaagttgaattcggatgttggagaattaagcgaggaagaaaaaaatttgttgtatgagcagaaagcttcggcctggtatcaagtgacatatcatcctgaatgggtgaaaaaatcccttgatctgcaagataaatcctcagagaaccaagaggctgatagtttgggaagtacggtgatgttgagttttccttggattgcagttgattacctagctcgcacaaagataaggcaacgacatcagaggagtggaaattttgactcaactaagccagttgattatctggcaaagtatctatctgaaaggttataattccattgagagcttgctcttggctacaaggccactctgccattctataatattacagtgaacctgtgttgtatacgccttataatgtgtcttcactttagctgctttgattgtaactaggtttgttcccaagccagggaattcctttgcctttggggcttaagactgtatctagtctagttacatttgatacattgaccgtatgttatagtagtagtcttgttgtgctgcggttatttgtatatgattgtgattgtgattagattatgtttttttgagctttctaagcatactttgaacaaaggtgaaactattgttgagatctttgtgtgcagcattcataagttatttcaaacaatagtgaagttattattgagatcttcg

SEQ ID NO: 121 - DNA, 3982 bp, Glycine max
  source 1..3982: mol_type = genomic DNA
ttttttgtaaatccaaagaaaatcaattttttccctaaaaaatcaattttactgcaattgagagaaaaaattgtaagtttacagtttactccttccaaaattcaacaaaattgaacacgagagtcttttctaccaacggagacacagtcactccagtagagagtagcatcatggggacgacaacgacacccctttcccacacggttcgcgtgtccaacatcccccaatccgcgaccgcgaaggacctcctcgacttcctcgaatcgacgttgggttcctccacggtgttcgccctcgaaatcttctccgacaaccccaactggaagtcccgcggcttcgggcgcgtccagttcgagaccctcgacgccaggtcccgcgccctctcgctctcccaactcaaccagctcctcttcaaccgccacttcctccgcctctccgaaaccgactccgacatcatcttccgcccccaacaccgcctccaaaacggcgtcctctacgccggcttcatgctatccgaccaccgcatgagcgtcctcgaatcgtgggagggcattgcggggtgggtcctgccccaaaggaagagacttgacttctgggtgtggcataatggtgactgttacagactcgagtttttgtttgaggatattttggagtctcatggctattgtttgggagaagatgccagactcaatgcccttctcttgaagatgaaatttgggccaaggatttataagaaaaagacagggacagatgtggcagccaattttaggggtgatagataccgttttctgaaggaggattttgaatttctttgggtgcggactactgacttctcgcctctcaagtcaattgggcactctacttcgttttgttgggaaattgtggaggaacatttagcttcggatgtttttacaagtttcccactctacaaggaaaatttgagagatctggctctggaagacagagaagaactctgttctttgacagaagcagttccgcttgtaaaacatgctacgcaatccaagttaccttatgaggctgttttccagctgaattctcttgttcatacccagaaaataagtcttgcttcggtggatgatgaattgattgacttgttagcagacttagatgaagaaactagagctgtggtttttcagaaattgcacaagatgagcttcacttgttatgagcctctcaaatttgtcaagactcaattgcatgtgctgagtaacaagaaaaaaggtctgctgcaatcgccgcagaataggctgacagatagtaatattatgagctgtcatagagccttgattaccccgacaaagatttattgccttggtcccgagcttgaaacctcaaatcatgtggtaaagcactttgcttcacttgcatcagacttcatgaggattacctttgttgaagagaattggaataagcttccaactaatgcagtatcaactggtgtgcaaaagggaatcttttcaaagcctttgaaaactgaaatatataagcggatattgactattcttcgagatgggatcgtaattggctcaaagagatttgagttcctggccttctctgctagtcagctgcgatcaaattctgtttggttatttgcttctaatgacaatctgaaagcagcagatatcagagaatggatgggatgcttcaacaatattcgcagtgtttctaaatgtgcagcgaggatgggtcagttgttcagttcttccatgcaaacttttgaagtggcctctgaagatgtggagatgattccagatattgaagttacttctgatggtgtaagctactgtttctcagatggtattggaaaaatttcccaatgttttgctaggcaagttgctcaaaagctaaacttggatcatactccatcagcatttcaaattcggtatggaggatttaaaggtgtcattgccattgatcgccattcctttaggaagttatcattgcgtagcagcatgcttaagtttgaatccaataataggatgctttgtgtcactaaatggagtgagtcaatgccttgctttctcaatcgagagattatatccctgttgactacgttaggagtaaaagatgaggtacttttggcaatgcaacaggaccaattggatttgttaggaaggatgttgactgatagtaaagcagctttggatgttttggaaagtttaaacggagctgattcaaagagcattctagtgaagatgttgcatgaatttaatgagccaaacagtgagccttacctatcgatgatgcttaaggcttattatgcataccaattatctgacttgaaaagtagatgccgaatatttgttcccaagggtcgggtcttggtaggttgcttggatgaaactggtcttttgaattatggccaagtatttgtccgcataaccgtggcaaaaactagggaaaattttggagatgaaaacctaaggaaagtggatggggatgatagcacacgtataatagtgggaaaggtggtggtcacaaaaaatccttgtcttcacccaggagacatcagagtccttgatgctatctacagtaaagaattagaggaaaacggtttgagggattgccttgtatttccacaaaaaggacataggcctcatccaaatgaatgctctggaggtgatcttgatggagatttgtttttcttaagttgggacaaagatctaatcccatgtcaaactgaggctccaatggactatacaggaaggaggcctcgtataatggaccataaggtgaccctagaggaaatccaacaattctttgttgattacatgatcaatgatactttgggtgctatctctactgcacatctcgttcatgctgaccgtgaacaagataaggccaagagtagaaaatgtctggaattggcagagcttcattccatggctgttgactttgcaaagactggagcacctgctgcaatgcctagagttctgaaaccaagagagtttccagatttcatggagagagttgacaagcctatgtacatctccaagggggtactgggaaaactttatcatgccataattgagtcacaaatgcaaataagatatagctttgtgtggtcagagaagcatgctgaagaagcatatgatcgtagccttgaagtgaatggttttgaggccttccttgagacagcatcaactcacaaagaaatgtatgcagagaagatgagcagtttaatggacttttatggtgcagagaccgaggatgaaatgctacttggtaacgtgcaaaaccgtgcttcatatttgcagcgtgataacaggagatatggtgatatgaaggatcggattctgctctcagtgaagaatcttcagcgtgaagctaaagaatggtttgaaactagttgccaaccgcgtgaatataagcctatggcatctgcatggtatcatgtgacctatcaccgcagccattattgccaggaaagcccatgttttctaagctttccatggatagttggtgacattttgctgcaaataaggtctgtgaactcctttgttaacagatgaattctttctctaatgatgtgcatttatttttgaaaaataaaataaaatctgaagccgtttgtggtggataaatgtcaatgcagacgttgattgaaggtaccaccatgtctaccagattttccttttgcaaaatattattgttattattattggcattataaatatttactagctgtacatgcgatgttgatactagtgggttgagttactccaaaaccaactcaccaaaattccgggtttgtgggacctggcttacaccctgtcaattactagtattagttcgagtttagtaaagtcaaatgaaaacaagtattgaaagagtgtctcactttcgtatctcaagtcatcatataaatttcaaatcctacacattataccacctatgaggagacaaagtttcttgggaagtaaattcagattattctgagattgtacaaatagaacatatt

SEQ ID NO: 122 - DNA, 3826 bp, Glycine max
  source 1..3826: mol_type = genomic DNA
cgaaaatttgccaggttttgtttgtgtttggaagaaaactgaacacatcacgagacccttttccaccaacagtcgctgtgcctgtgttacttacgctctcagtcactctagtagggagcatcatcatggggacgacaacgacgacaaccctttccaacacggttcgcgtgtccaacatcccccaatccgcgaccgcgaaggacctcctcgacttcctcgaatcgacggtgggtccctcgacggtgttcgccctcgaaatcttctccgacaaccccaactggaagtcccgcggcttcggccgcgtccagttcgagaccctcgacgccaggtcccgcgccctctcgctctcccaactcaaccacctcctcttccaccgccacttcctccgcctctccgaaaccgacgccgacatcatcttccgcccccaacaccgccttcataacggcgtcctctacgccggcttcgtgctctccgaccaccgcatgagcgtcctcgaatcctgggagggcgtcgcgggctgggtcctgcccctaaggaagaggctggacttctgggtgtggcataatggcgactgttacagactcgagtttttgtttgaggatattttggagtctcatggctattgtttgggagaagatgccaaactcaatgccctcctcttgaagatgaaatttgggccaaggatttataagaaaaagacgggggcagatgtggcagccaagtttaggggagatagataccgtttttgtaaggaggattttgaatttctttgggtgcggactaccgacttctcacctctcaagtcaattgggcactctacttcgttttgttgggaaattgtggaagaacatttagctttggatgtttttaaaagtttcccactctacaaggaaaatttgagagatctggctctggaagacggagaagaattctgttcttcgacagaagcagttccgcttgtaaagcgtgcttcacaatccaagttaccttatgaggctcttttccagctgaattctcttgttcatacccagaaaattagtcttgcttcggtggatgatgaattgattgacttgttagcaggcttagatgaagaaactagagctgtgatttttctgaaattgcacaagatgagcttcacctgttatgagcctctcaaatttgtcaagactcaattgcatgtgctgagtaacaagaaaaaaggtctgccacaatcgtcgcagaaaaggttgacagatagtaacattatgagctgtcatagagccttgattacccccacaaagatttattgccttggtcctgagcttgaaacctcaaatcatgtggtaaagcactttgcttcgcatgcatcggacttcatgaggattacctttgtcgaagagaattggaataagcttccaactaatgcagtatcaactggtgtgcaaaagggactcttttcaaagcctttgaaaactgaaatatataagcggatattgactattctccgagatgggattgtaattggctcaaagagatttgagttcctggccttctctgctagtcagctgcgatcaaattctgtttggttgtttgcttctaatgacaatctgaaagcagcagatatcagagaatggatgggatgcttcaacaatattcgcagtgtttctaaatgtgcagcgaggatgggtcagttgttcagttcttccatgcaaacttttgaagtggtctctcaagatgtggagataattccggatgttgaagttatttctgatggtgtaagctattgtttctcagatggtattggaaaaatttcccaatcttttgctaggcaagttgctcaaaagctaaaattggatcatactccatcagcatttcaaattcggtatggaggatttaaaggtgtcattgctgttgatcgccgttcctttaggaagttatcattgcgtagcagcatgcttaagtttgaatccaaaaacagcatgctttgtgtcactaaatggagtgagtcaatgccttgctttctcaatcgagagattatatccctgttgtctacattaggagtaaaagatgaggtgcttttggcaatgcaacatgaccaattggatttgttaggaaggatgctgactgatagtaaagcagctttggaagttttggaaagtttaaatggagctgattcaaagagcattctagtgaagatgttgcatgaatttaatgagccaaacagtgagccttacctatcaatgatgctcaaggcttattatgcataccaattatctgacttgaaaagtagatgccgaatatttgttcccaagggtcgggtcttggtaggttgcttggatgaaactggtcttttgaattatggccaagtatttgtccgcataaccgtgacaaaaactagggaaaaatttggagatgaaaacctaaggaaagtggatggggatgataacacatgtataatagtgggaaaggtggtggtcaccaaaaatccttgccttcacccaggagacatcagagtccttgatgctatctacagtgaagaattagaggagaagggtttgagggattgccttgtatttccacaaaaaggacataggcctcatccaaatgaatgctctggaggtgatctcgatggagatttgtttttcataagttgggacaaagatctaatcccatgtcaaactgaggctccaatggactacacaggaaggaggccccgtataatggaccataaagtgaccctagaggaaatccaacaattctttgttgattacatgatcaatgatactttgggtgctatctctactgctcatctagttcacgctgaccgtgaacaagataaggccaagagtagaaaatgtctggaattggcagagcttcattccatggctgtcgactttgcaaagactggagcacctgctgcaatgcctagagttctgaaaccaagagagtttccagatttcatggagagggttgacaagcctatgtacatctccaagggggtactgggaaaactttatcgcgccataattgagtcacaaatgcaaataagatatagctttgtgtggtcagagaagcatgctgaagaagcatatgaccgtagccttgaagtgaatggttttgaggccttccttgagacagcatcaactcacaaagaaatgtatgcagagaagatgagcagtttaatggacttctatggtgcagagaccgaggatgaaatgctacttggtaacttgcaaaaccgtgcttcatatttgcagcgtgataacaggagatatggtgatatgaaggatcggattctgctctcagtgaagaaccttcagcgtgaagctaaagaatggtttgaaactagttgcgaaccgcatgaatataagcctatggcatctgcatggtatcatgtgacctatcaccccagctattattgccgggaaagcccatgctttctaagctttccatggatagttggtgagattttgctgcaaataaggtctgtgagcaaaggagttcacaaatgaaggcttcctctaatgctgtgtgcatttttattttgaaaaaagaagaaaaaatctgaagccgtttgtggtggataacatgtatatgcagatgttgattgaaggtaccaccttgtctgcgagagtttccttttgcaaaatattattgttatcaatatttggcattataaaaatttactagccgtatatgtgatgttgatgccagtggcttcatctataaccaggttcagcgaatcaagtgggttgggttactccaaaaccgtttcaccaaaattccgggtttgtaggatctggttacaccctgttcgagtttattaaagtcaatttaaaacgagtat

SEQ ID NO: 123 - DNA, 3311 bp, Glycine max
  source 1..3311: mol_type = genomic DNA
ggtacgaatgtggggatgggagggacaagaaactttaagtgtgactaacaaagctctaaatcaaggatttgtcctatagtcggtcaaaaagactgaagcttgtgagggatatcttaggatcctgttagggtgtcaaaagccttacatacgatgaaatttgggccaaggatttataagaaaaagacgggggcagatgtggcagccaagtttaggggagatagataccgtttttgtaaggaggattttgaatttctttgggtgcggactaccgacttctcacctctcaagtcaattgggcactctacttcgttttgttgggaaattgtggaagaacatttagctttggatgtttttaaaagtttcccactctacaaggaaaatttgagagatctggctctggaagacggagaagaattctgttcttcgacagaagcagttccgcttgtaaagcgtgcttcacaatccaagttaccttatgaggctcttttccagctgaattctcttgttcatacccagaaaattagtcttgcttcggtggatgatgaattgattgacttgttagcaggcttagatgaagaaactagagctgtgatttttctgaaattgcacaagatgagcttcacctgttatgagcctctcaaatttgtcaagactcaattgcatgtgctgagtaacaagaaaaaaggtctgccacaatcgtcgcagaaaaggttgacagatagtaacattatgagctgtcatagagccttgattacccccacaaagatttattgccttggtcctgagcttgaaacctcaaatcatgtggtaaagcactttgcttcgcatgcatcggacttcatgaggattacctttgtcgaagagaattggaataagcttccaactaatgcagtatcaactggtgtgcaaaagggactcttttcaaagcctttgaaaactgaaatatataagcggatattgactattctccgagatgggattgtaattggctcaaagagatttgagttcctggccttctctgctagtcagctgcgatcaaattctgtttggttgtttgcttctaatgacaatctgaaagcagcagatatcagagaatggatgggatgcttcaacaatattcgcagtgtttctaaatgtgcagcgaggatgggtcagttgttcagttcttccatgcaaacttttgaagtggtctctcaagatgtggagataattccggatgttgaagttatttctgatggtgtaagctattgtttctcagatggtattggaaaaatttcccaatcttttgctaggcaagttgctcaaaagctaaaattggatcatactccatcagcatttcaaattcggtatggaggatttaaaggtgtcattgctgttgatcgccgttcctttaggaagttatcattgcgtagcagcatgcttaagtttgaatccaaaaacagcatgctttgtgtcactaaatggagtgagtcaatgccttgctttctcaatcgagagattatatccctgttgtctacattaggagtaaaagatgaggtgcttttggcaatgcaacatgaccaattggatttgttaggaaggatgctgactgatagtaaagcagctttggaagttttggaaagtttaaatggagctgattcaaagagcattctagtgaagatgttgcatgaatttaatgagccaaacagtgagccttacctatcaatgatgctcaaggcttattatgcataccaattatctgacttgaaaagtagatgccgaatatttgttcccaagggtcgggtcttggtaggttgcttggatgaaactggtcttttgaattatggccaagtatttgtccgcataaccgtgacaaaaactagggaaaaatttggagatgaaaacctaaggaaagtggatggggatgataacacatgtataatagtgggaaaggtggtggtcaccaaaaatccttgccttcacccaggagacatcagagtccttgatgctatctacagtgaagaattagaggagaagggtttgagggattgccttgtatttccacaaaaaggacataggcctcatccaaatgaatgctctggaggtgatctcgatggagatttgtttttcataagttgggacaaagatctaatcccatgtcaaactgaggctccaatggactacacaggaaggaggccccgtataatggaccataaagtgaccctagaggaaatccaacaattctttgttgattacatgatcaatgatactttgggtgctatctctactgctcatctagttcacgctgaccgtgaacaagataaggccaagagtagaaaatgtctggaattggcagagcttcattccatggctgtcgactttgcaaagactggagcacctgctgcaatgcctagagttctgaaaccaagagagtttccagatttcatggagagggttgacaagcctatgtacatctccaagggggtactgggaaaactttatcgcgccataattgagtcacaaatgcaaataagatatagctttgtgtggtcagagaagcatgctgaagaagcatatgaccgtagccttgaagtgaatggttttgaggccttccttgagacagcatcaactcacaaagaaatgtatgcagagaagatgagcagtttaatggacttctatggtgcagagaccgaggatgaaatgctacttggtaacttgcaaaaccgtgcttcatatttgcagcgtgataacaggagatatggtgatatgaaggatcggattctgctctcagtgaagaaccttcagcgtgaagctaaagaatggtttgaaactagttgcgaaccgcatgaatataagcctatggcatctgcatggtatcatgtgacctatcaccccagctattattgccgggaaagcccatgctttctaagctttccatggatagttggtgagattttgctgcaaataaggtctgtgagcaaaggagttcacaaatgaaggcttcctctaatgctgtgtgcatttttattttgaaaaaagaagaaaaaatctgaagccgtttgtggtggataacatgtatatgcagatgttgattgaaggtaccaccttgtctgcgagagtttccttttgcaaaatattattgttatcaatatttggcattataaaaatttactagccgtatatgtgatgttgatgccagtggcttcatctataaccaggttcagcgaatcaagtgggttgggttactccaaaaccgtttcaccaaaattccgggtttgtaggatctggttacaccctgttcgagtttattaaagtcaatttaaaacgagtat

SEQ ID NO: 124 - DNA, 4136 bp, Glycine max
  source 1..4136: mol_type = genomic DNA
gggcgaggacacatgcgtctttccgttacgagaaagtatttcacttcacttgggagttgggacaagtgaggaagtcaagagttggttctttaccccatatacccctccctatcacgccagaaacatttcatttctcttccagcaaatcgaaacggctcgcgttgttcacagtcacactctcactctcacactctctcactcacactcacactcacaccattgtatagaagattagagagagagaaccctaaactaaaaccctaaaattccattgcagcaagcaaaggcattgatcgatctgcatgggtcacgtaggttccagcaaggacggcaccgaggctgggccttccgccgccgcgatgggcatcgacgacgacgaagacatcgacctcggcgacgtcgatctcgacccgaccaacgccgaaatcctcgaagagctcggtgaagacattgtgaaatactggtgcaagaaagcgtcgatgctcttcttcaacgagtacggtctgatcagccaccagatcaactcctttaaccacttcatccacacaggcctccaaaaaaccttcgaatccttcggagacctagtcgtaacgcccgggttcgacccttccaagaagggagaaaacgaacacttccgttacgcctccgttaagttcggcaatgtgaagctcgataaacctatgttctggggcggtgaagggaacgcgcaggagtttaagatgcttcccagacacgcgagaatccagaggatgacctacgcttccaaagtcaaaatccaagttaaagttcaggtgtatgttccgaagaaggtacggagtgataagttcaagactgggaaagcggaattccttgacagggaggttatgaaggaagacgagagggaaatcatcattgggagattgccagtcatggtcaagtctgatttatgctggatgaaagaggcggagaaggaggatgatgaatttgaccatggaggttattttatcgttaagggtgcagagaagacttttattgcacaggagcaactgtatttaaagaggctatgggttatgaatagtccaggttggatgattgcctacaagtcacagatgaagagaaacaggatggttattaaactggtaggaaattccaggggtgaagaagtggagaatggggacatgtctcttgctgtatattttttgtctgttgaggttcctgtgtgggtactgtttttcgctctcggtgtctcatctgacaaagagattgtagatctcattggttgtggcaatgatgatgtcagaattcagaatattctctttgcatctgttcgggatgctgatgagaaatgtggagcatttcgaagaggtaggcatgcagttcaatatttagaaaaatgtgtaaaaagtgttcaatttccaccttcggagtctatgcaggagtgccttgaaatgtatgtcttccctggaattagtggtttgaatagaaaggcgcgcttccttgcatatatggtgaaaggtctcttgctggcttatactggccgccgaaaatgcgacaacagggatgattttcgaaataagaggcttgaattggccagtgagcttcttgaccgtgagttgaaagtgcacattgcacatgcccggaagcgaatggcaaaagctttgcagagagacctttatggagatagggatgtacgcccaattgagcattatctcgacgcgtccataattacaaatggcttgcaaagggcattttcaacaggagcgtggtctcatccatacaagaggatggaaaggatctcaggtgtggttgcaaatgttgggcgcactaatcccttacaaaccatggctgagttaagaagagcgaggcagcaggtccagtacacaggaaaagttggggatgctagatatccgcatccttctcactggggcaaggtttgtttcctctctaccccagatggtgaaaattgtggactagtaaaaaatttggctgtcacaggattagtaagtactgatgtatcggcagtatctgaatatatactgcctaaattgctggattgtggaatggaagaacttgttgatgatacttccactcatcttgggaacaaggacaaagttctcctaaatggcgattgggttggagtgtgtcctgattccagttcatttgtggcagagctacgaagcagaagacgtagaaatgaactgcctcatcaggtggaaatcaagagagaccaatctcaacatgaagtgcgcatatactcggatgcaggaaggattctacgtcctcttttggtggttggtaatctactcaagattaaaggatttaaatcagactgtaactctttccagtctctattggataaaggtgtgattgagctgattggaccggaagaagaggaagactgttgtacagcctggggtgttgagtatttatttggaaaagaaggaaaacgatctgtaaagtacactcattgtgaacttgatatgtcattcttattgggtttaagctgttcacttgtaccatttgctaatcatgaccatgcgaggagggtactctaccagtctcagaagcactcctcacaggcaattggcttttctacaacaaacccgaacattagagttgatactttgtctcaccagttacactatccccaaaagcccctttttcgaacaatggcttcagattgtcttggaaaaccagacaattcacttggtcaaaataaaataagtaaaatacctccaaaggcagaattctataatgggcagaatgcaattgtggctgttaatgtacatctgggatacaatcaagaggattcccttgtgatgaaccgtgcttcactgcagcgtggtatgttcaggtctgagcacataaggagttacaaatctgaaatcgataataaggaatcttcagataagaagcgaaaacctgaagacattgtaaattttgcaaagctacaaagtaaaattggccgagttgatagccttgatgatgatggctttccatatgttggtgctaatttgcagagcggtgatattattattgggaagggtgctgaatctggtgcagacaatagtgtaaagttaaagcacactgaaaggggttatgtgcaaaaggttgtgctgtcttcaaatgacgaagggaaaaattttgctgtggtttcattaagacaggttcgaagtcccgttcttggagacaagttctccagtatgcatggacaaaagggagttttgggatttctggagtctcaggaaaattttcctttcacaagacaaggcattgttcctgatattgtcataaatccacatgcatttccctcacgacaaactcctgggcaactcctagaggctgctttaggaaaggggattgcttgtggtggcatactgagacaagctacgcctttctccacaccttctgttgatgccattactgaacagcttcacagagctgggttttcaagatggggaaatgagagggtatacaatggaaggactggtgagatggttcgatcactcatttttatgggaccaacattttaccaacgtctgcaccatatgtctgaagacaaagtgaaattccggaacactggtccagttcacccgttgacccgacagcctgtagctgacagaaaacgatttggaggtatcaagttcggtgagatggagcgtgattgcctaatagctcatggtgcatcagccaacctgtatgaacgcctgtttacactcagtgactcctctcagattcatatctgcagcaaatgcaaaaatgttgcaaatgtgatcttgcggcctgtctctggtggccggaaaatacgaggaccttattgccgccactgtgaatctgcggatgacattgtggtggctcatgtcccgtatggagcaaagttattatgccaggagctctttagcatgggcataaatcttaaatttgaaacccaactttgctagacaaacactaatggtctcttttgttcatttctcccttaaatgaatttcagtgtagatattactttcgttcgccgatgtttctttgaatgcctggcaattagaagtactggatctcttttatcttgttactgatgcatgtttctctattatttacgggctagttagtgtatccttgtgaaaagttgaagacaagaaatttaaaaatgattattaaca

SEQ ID NO: 125 - DNA, 3780 bp, Glycine max
  source 1..3780: mol_type = genomic DNA
atgggtcacgtaggttccagcaaggacggcaccaaggtggggctgtccgctgctgcgatggacatcgacgacgacgacgacgacgacgacgacgacctcggcgacgtcgacctagaccctacgaactccgaaatccttgaagaactcggcgaagacatggtgaaatactggtgcaagaaagcgtcgatgctgttcttcgacgagtacggtctgatcagccaccagatcaactcctttaaccacttcgtcgccatcggcctccaaaacaccttcgactccttcggagacctagtcgtaactcccggttttgacccctccaagaagggagaaaacgaacacttccgttacgcctccgttaagttcggcaaggtgaagctcgacaagcccatgttctggggcggtgaagggaatgcgcaggagttcaagatgcttccgagacacgcgagaatccagaggatgacctacgcttccaaagtcaaaatccaagttaaagttcaggtgtatgttccgaagaaggttcggagtgataagttcaagactgggaaagaggagttccttgatagagagattatgaaggaagacgagagggaaatcatcattgggagattgccagtcatggtcaagtctgatttgtgctggatgaaagacgcggaaaaagatgatgatgaatttgaccatggaggttattttatcgttaagggtgcagagaagacttttattgcacaggagcaactgtatttaaagaggctatgggttatgaacagtccagggtggatgattgcctacaagtcacagatgaagagaaacaggatggttattaaactggtaggcaattccaggagtgaagaagtggagaatggggacatgtgtcttactgtatattttttgtctgttgaggttcctgtgtgggtactgttttttgctctcggtgtctcatctgacaaagagattgtagatctcattggttgtggcaatgatgatgtcagaattcagaatatcctctttgcatctgttcgtgatgctgatgagaaatgtggagcatttcgaagagttaggaatgctgttcaatatttagaaaaatgtgtaaaaagtgttcaatttccaccttcggaatctatgcaggagtgccttgaaatgtatgtctttcctggaattagtggtttaaatagaaaggcgcgcttccttgcatatatggtgaaaggtctcttgctggcttatactggccgcagaaaatgcgacaacagggatgattttcgaaataagaggcttgaattggccagtgagcttcttgaccgtgagttgaaagtgcatgttgcacatgctcggaagcgaatggcaaaggctttgcagagagacctttatggagatagggacgtacgcccaattgaacattatcttgacgcgtccataattacaaatggcttgcaaagggcattttcaacaggagcgtggtcacatccgtataagaggatggaaaggatctcaggtgtggttgcaaatgttgggcgcactaatcccttgcaaaccatggctgagttaagaagagcaaggcagcaggtccagtacacaggaaaagttggggatgctagatatccgcatccttctcactggggcaaggtttgtttcctcactaccccagatggtgaaaattgtggactagtaaaaaatttgtctgtcacaggattagtaagtactgatgtaactgacgtaactgaatctatactgctaaaattggtggattgtggaatgcaagaacttgttgatgatacttccactcatcttggcagcatggacaaagtcctcctaaatggtgattgggttggagtgtgtcccgattccagttcgtttgtggcagagctacgaagtagaagacgcagaaatgagctgcctcatcaggtggaaatcaagagagaccaatctcagcatgaagtgcgcatatactctgatgcaggaaggattctacgtcctcttttggttgttggtaatctactgaagattaaaggatttaaatcagaccgttactctttccagtctctattggacaaaggtgttattgagctgattggacctgaagaagaggaagactgttgtactgcctggggtgttgagtatttatttggaaaagaaggaaaacgatctgtaaagtacactcactgtgaacttgatatgtcattcttattgggtttaagctgttcacttgtaccatttgctaatcatgaccatgcaaggagggtgctctaccagtctcagaagcactcctcacaggcaattggcttttctacaacaaacccgaacattagagttgatactttgtctcaccagttacactatccccaaaagcccctttttcgaacaatgacttcagattgtcttggaaaaccagaccattcactgggtcaaagtaaaatacctccaaaggcagaattctataatgggcagaatgcaattgtggctgtcaatgtacatctgggatacaatcaagaggattccctggtgatgaaccgtgcttcactgcagcgtggtatgttcaggtctgagcacataaggagttacaaatctgaaattgacaataaggaatcttcagataagaagcgaaaacctgaagacattgtaaattttgcaaagctacaaagtaaaattggccgagttgatagccttgatgatgatggctttccatatgttggcgctaatctccaaagcggtgatattattattgggaagtgtgctgaatccggtgcagacaatagtgtaaagttaaagcacactgaaaggggttatgtgcaaaaggttgtgctgtcttcaaatgacgagggtaaaaattttgctgtggtttcattaagacaggttcgtagtccagttcttggagacaagttctccagtatgcatggtcaaaagggagttttgggatttctggagtctcaggaaaattttcctttcacaagacaaggcattgttcctgatattgtcataaatccgcatgcatttccctcacgacaaactcctgggcaactcctagaggctgctttaggaaaggggattgcttgtggtggtatactgaaacaagctacgcctttctccactccttctgttgatgccattactgaacagcttcacagagctgggttttcaagatggggaaatgagagggtatacaatggaaggactggtgagatggttcgatcactcatttttatgggaccaacattttaccaacgtctgcaccatatgtctgaagacaaagtgaaattccggaacactggtccagttcacccgttgacccgacagcctgtagctgacagaaaacgatttggaggtatcaagttcggtgagatggagcgtgattgcctaatagctcatggtgcatcagccaacctgtatgaacgcctgtttacactcagtgactcctctcagattcacatctgcagcaaatgcaaaaaagttgcaaatgtgatcttgcggccagtgtctggtggacggaaaatacgaggaccttattgccgtcactgtgaatctgcggatgacattgtggtggcccatgtcccgtatggggcaaagttattatgccaggagctctttagcatgggcataaatcttaaatttgaaacccaactttgttagacaacactattagtgtctcttttgtacatttcctttaacttaatgaattcagtgtagatatcactctcgttcgtggatgtttctttgaatgccagcgagttaggagtactgcatgatatcctgagcttaacttgaatgtcattgcatctcttttatcttgtt

SEQ ID NO: 126 - DNA, 5351 bp, Glycine max
  source 1..5351: mol_type = genomic DNA
cttttatcaaggcctgggtctacacaagtgccccttctcaactcggcgtttgtctcgtggtcgcgtggaaagtgaccggcggtgttccattttgctattcattcgtctttactttactgcgctttctctctcactcactcactccaattcgttcttgggtttcgattttggtcttcgcagagcattgccgcgtagctcgcacacacacacaccaccagtgtctgcgttcgtgctggttaagtcgatcattcgttcttttcactcaaattacttgaaattttctgccgagtgcaaggttaccaagtttgatggatgatgaccttttccagaggaacaaaacaccatctggtgtcataaaagcgataaagtttgatgtcttaactgaagaagatatagagaatatcgctgttttggagataaatgcagccgggcaggtcactgggtcaagtttgggtttcccaaatgcatctgatgagtgtgccacatgtggctctaaagacaaaaggttctgtgaaggtcattttggagtaatcaaatttcctactcccatactccatccatattttatgtcagaaattgcgcacatcttgaacaagatttgccctgtttgtaaatctattcgtcacaaatccaagggtgttcgattgatctatggaaccaagcggtctaatgattgcaattattgttctgcgtatccatcaatgaaattcagagtttcttccaacgatctctttagaagaactgcaattattgttgaagtaaaggcttcaaagaaaactttggggacagaaatacctgctgattattggaattttattccttgtgatgctcaacaagaagaaaactatgtaaatagaagggttttatctcctgcacaggttcttaatttgttgaatggtgttgatccagactttattgaaaaatatattccaagaaagaatttgctgtatcttaattgcttcccggtgactccaaattgtcatcgtgtgacagaagttccttatgcaatttctagtggaagccgattgagttttgatgacaggactcgatcttgtaagaaattggttgatttcaggggtacgcccaatgaattaagttctcgtgttttggattgcttgaggatctctaagctaaatcccgataaaacaccaaatagtatttttgctgatatccagcaaagaaagattggagaaaatgcttgcaattcttctggtttaagatggataaaagatgtggttcttggaaaacgcaatgatagttcattacgtactgtggttgttggtgatccagaccttgagcttagtgaagttggtataccttgtcatattgctgaaagtttgcaggtttctgagtatgtgaataggcagaatagggagaagctgctttattgttgtgagctacgcttgttagagaaggggaaaatagatgtctgcagaaatggtagtaaagttcatctgtataaaaaggaagatctacaaataggtgacaaaatttataggcctcttgctgatggggataaagtgctgataaataggcccccttccatacatcaacattctatgattgctctcacagttagggtccttccaatatcttctgtagtgtgtattaacccactctgttgttccccattacgtggggattttgatggtgattgccttcacgggtatattccacaatcagttactgcaagaattgagcttaatgagctggttgctttagataggcaattgattaacgggcaaagtggtagaaatctgctttcactttcccaggatagtttgactgctgcttatttgctaatggaagatggggtccttttgaatgtttatcaaatgcagcagcttcaaatgctttctatttctgacaaaagattaatacctcctgcagttgttaaagctccttcaagtaatagctcactttggagtgggaagcaaatattcagcatgctcttgccttatgattttgactattcttttccttcagatggtgttgttgttagtgatggggagcttgtatcttcttctgaggcttctggttggttacgcgattctgactacaatgttttccagagtcttgtggaacattatcaagggaagactctaaactttttgtatacagcgcaaaaagttctgtgtgagtggctgtctatgacaggttttagtgtttcactctcagatttgtacctttcttctgattcctatgcacggaaaaacatgatagaggaaatcttttatggcttacaagatgcagagcaggcttgtaatttcaagcagctattgttggattgttattgtgattttctgtcaggaagtatccaagagagtgaaaatgctatcactgttgatgctgatcgtctgaattatgaaagacaaatatctgctgctctcagtcaagcgtcagttgatgcttttaggcaagtttttcgcaatattcaaagtttagctgacaaatatgcatgtaaggacaatgctttccttgcaatgtttaaggctggaagcaagggtaatttgttgaaattagttcaacattccatgtgccttggcatgcaaaattctctggtccgcttgtcatacagattaccccgtcatctttcatgtgctgcttggaatagtcaaaagtggcttgattcaatccagatgtcttctggtacccttgaatctgttcagtcttacattccatatgctgtggttgaaagctcatttttaactgggttgaatccacttgaatgttttgttcattcagtgacaaatcgtgatagctctttcagtgaccatgcagaccttcctggaacactgacacgtagacttatgttcttcatgcgtgatttgcatgatgcatatgatggaactgtgagaaatttatatggtaatcaacttattcagttttcttatgatattgaagaggactcttcatgtgataaaggtttccaagagtatgctataggtggtgaaccagttggggcaatttctgcttgtgcaatttctgaagctgcatacagtgctttgggtcaaccagttagtctactcgaaacatcacctttgctgaatttgaaaaatgttttggagtgtggttcaaggaaaagaaatggtgatcagactgtgtctttatttttgtctgaaaagcttggtaaacagagacatgggtttgaatatgcagctttagaagtcaagaattatttggaaagattgttgttctcaaacattgtttctacagtgatgataatattcaccccacatgacggcagcagccaagaaaaatacagtccttgggtctgccactttcatttagacaaggaaattgtaactagaagaaaattgaaagtgcattctatcattgactctctctaccagagatattactcacagagaaaagactcaaaagtctgttttaccaatttgaaaatttcaagcaagaagtgttctgctgattccatggctaaggaaggtgaagacacttctatagataaaaaagagggtgatgattgcatcacagtcacaattgttgaaaactctaagaatcctatacaactggattctgttcgggatttggtgataccttttcttctaggaacagcaataaaaggatttctggatgtcaagaaggttgatgttctctggaataatcagtcaaaagtaaaaaattcttgtaatggtttttctggtgaactgtacttgagggtaactttgtccagcgagggtagcagaggaagattttggggtgtactcctaaatctttgtcacaagataatgcatataattgactggacacgcagtcatccagataacatcaatcatttctcatcagcatatggaattgatgcagggtggcaatactttttcaatagtttggcatctgcaacatctgataccggcaagtccatccttcctaagcatttgtgtcttgttgccaatagtctgtcatgtagtggagagtttgtgggattaaatgctaaaggcatggcactacaaagaaaacatgcgtcagtttcatcaccattcgtgcaagcatgctttgcgaatccaggtagttgctttataaaagctgctaagtctggagtcactgataatctccagggcagtctggatgcgttggcttggggaaactgtctatctatggggacaagtggaatgtttgatatcatatattcagagaaggtagctaagtctgggaatgtgtatgagctgctagaagccagttttgacaagccgaacaataaagctggtactcatttgcacaaatattcatctgacaaatgcggttctgagtttaggcataaaaatggttatgccttgaaagagggaaaacagtggaaaaccattttaagaaattttgtgacggtaaatgatatccagaagctgacttttgcttcgaggtgcatattgaacaagtattcaattgatgagctgctaagtgagagtgacaggtcaacaatgctaagggttttgaattttcatcctcgtaaaagtgagaagtttggcattggaccacaggacattaaggttggatggcatccaaaatacaaggatagccggtgcttccatatagtaagaattgatgggacggttgaagatttttcataccgcaaatgcattcttggtgctcttgatatcgttgatccaaaaaagtcaaagatccaggagaaaaaatggtcaggacatggtaacacgtaatatctatgcatgtccaagcataataagtgactatcatttgatctggtgacagtcacagactataaaaatagagtcggaagggtaatagtagtgccacaactctacaatcacaaaaagcaacgttgtttttctacctttgatttagaaggatgtccggaatcagtggtagagagcactgttctcttttgcgagtttagagttatgttattggcattactccagctaattggtggaaatagtttgcagccttcttttgttgtattttactatcttcaaggctagactgggtgatagcttactcaaatgttgctcgatggatttagaggcagagcagcgaatccagcgtaaagtcataacattttgaaagaagaaaggagaagatgcatagaagggaggatacaagatggaacaatgatagtatatattttttcaatatgaacaaattaaattttattttatatgttaaaagatggcgtgggttcttaccctgagcttctttttgcttcttccactaatactttatttgccaacgattacgtaaggcaaagaaagatctagtggaagcagcaacgagaagcttgtaaagacttatacccccagaccatttgtattgatgcggcagttaaatataagatatgtttaggttatgccgggttcaaatgtcatgcgtatctctgc

SEQ ID NO: 127 - DNA, 5252 bp, Glycine max
  source 1..5252: mol_type = genomic DNA
cttttatcaaggcctgggtctacacaagtgccccttctcaactcggcgtttgtctcgtggtcgcgtggaaagtgaccggcgagcattgccgcgtagctcgcacacacacacaccaccagtgtctgcgttcgtgctggttaagtcgatcattcgttcttttcactcaaattacttgaaattttctgccgagtgcaaggttaccaagtttgatggatgatgaccttttccagaggaacaaaacaccatctggtgtcataaaagcgataaagtttgatgtcttaactgaagaagatatagagaatatcgctgttttggagataaatgcagccgggcaggtcactgggtcaagtttgggtttcccaaatgcatctgatgagtgtgccacatgtggctctaaagacaaaaggttctgtgaaggtcattttggagtaatcaaatttcctactcccatactccatccatattttatgtcagaaattgcgcacatcttgaacaagatttgccctgtttgtaaatctattcgtcacaaatccaagggtgttcgattgatctatggaaccaagcggtctaatgattgcaattattgttctgcgtatccatcaatgaaattcagagtttcttccaacgatctctttagaagaactgcaattattgttgaagtaaaggcttcaaagaaaactttggggacagaaatacctgctgattattggaattttattccttgtgatgctcaacaagaagaaaactatgtaaatagaagggttttatctcctgcacaggttcttaatttgttgaatggtgttgatccagactttattgaaaaatatattccaagaaagaatttgctgtatcttaattgcttcccggtgactccaaattgtcatcgtgtgacagaagttccttatgcaatttctagtggaagccgattgagttttgatgacaggactcgatcttgtaagaaattggttgatttcaggggtacgcccaatgaattaagttctcgtgttttggattgcttgaggatctctaagctaaatcccgataaaacaccaaatagtatttttgctgatatccagcaaagaaagattggagaaaatgcttgcaattcttctggtttaagatggataaaagatgtggttcttggaaaacgcaatgatagttcattacgtactgtggttgttggtgatccagaccttgagcttagtgaagttggtataccttgtcatattgctgaaagtttgcaggtttctgagtatgtgaataggcagaatagggagaagctgctttattgttgtgagctacgcttgttagagaaggggaaaatagatgtctgcagaaatggtagtaaagttcatctgtataaaaaggaagatctacaaataggtgacaaaatttataggcctcttgctgatggggataaagtgctgataaataggcccccttccatacatcaacattctatgattgctctcacagttagggtccttccaatatcttctgtagtgtgtattaacccactctgttgttccccattacgtggggattttgatggtgattgccttcacgggtatattccacaatcagttactgcaagaattgagcttaatgagctggttgctttagataggcaattgattaacgggcaaagtggtagaaatctgctttcactttcccaggatagtttgactgctgcttatttgctaatggaagatggggtccttttgaatgtttatcaaatgcagcagcttcaaatgctttctatttctgacaaaagattaatacctcctgcagttgttaaagctccttcaagtaatagctcactttggagtgggaagcaaatattcagcatgctcttgccttatgattttgactattcttttccttcagatggtgttgttgttagtgatggggagcttgtatcttcttctgaggcttctggttggttacgcgattctgactacaatgttttccagagtcttgtggaacattatcaagggaagactctaaactttttgtatacagcgcaaaaagttctgtgtgagtggctgtctatgacaggttttagtgtttcactctcagatttgtacctttcttctgattcctatgcacggaaaaacatgatagaggaaatcttttatggcttacaagatgcagagcaggcttgtaatttcaagcagctattgttggattgttattgtgattttctgtcaggaagtatccaagagagtgaaaatgctatcactgttgatgctgatcgtctgaattatgaaagacaaatatctgctgctctcagtcaagcgtcagttgatgcttttaggcaagtttttcgcaatattcaaagtttagctgacaaatatgcatgtaaggacaatgctttccttgcaatgtttaaggctggaagcaagggtaatttgttgaaattagttcaacattccatgtgccttggcatgcaaaattctctggtccgcttgtcatacagattaccccgtcatctttcatgtgctgcttggaatagtcaaaagtggcttgattcaatccagatgtcttctggtacccttgaatctgttcagtcttacattccatatgctgtggttgaaagctcatttttaactgggttgaatccacttgaatgttttgttcattcagtgacaaatcgtgatagctctttcagtgaccatgcagaccttcctggaacactgacacgtagacttatgttcttcatgcgtgatttgcatgatgcatatgatggaactgtgagaaatttatatggtaatcaacttattcagttttcttatgatattgaagaggactcttcatgtgataaaggtttccaagagtatgctataggtggtgaaccagttggggcaatttctgcttgtgcaatttctgaagctgcatacagtgctttgggtcaaccagttagtctactcgaaacatcacctttgctgaatttgaaaaatgttttggagtgtggttcaaggaaaagaaatggtgatcagactgtgtctttatttttgtctgaaaagcttggtaaacagagacatgggtttgaatatgcagctttagaagtcaagaattatttggaaagattgttgttctcaaacattgtttctacagtgatgataatattcaccccacatgacggcagcagccaagaaaaatacagtccttgggtctgccactttcatttagacaaggaaattgtaactagaagaaaattgaaagtgcattctatcattgactctctctaccagagatattactcacagagaaaagactcaaaagtctgttttaccaatttgaaaatttcaagcaagaagtgttctgctgattccatggctaaggaaggtgaagacacttctatagataaaaaagagggtgatgattgcatcacagtcacaattgttgaaaactctaagaatcctatacaactggattctgttcgggatttggtgataccttttcttctaggaacagcaataaaaggatttctggatgtcaagaaggttgatgttctctggaataatcagtcaaaagtaaaaaattcttgtaatggtttttctggtgaactgtacttgagggtaactttgtccagcgagggtagcagaggaagattttggggtgtactcctaaatctttgtcacaagataatgcatataattgactggacacgcagtcatccagataacatcaatcatttctcatcagcatatggaattgatgcagggtggcaatactttttcaatagtttggcatctgcaacatctgataccggcaagtccatccttcctaagcatttgtgtcttgttgccaatagtctgtcatgtagtggagagtttgtgggattaaatgctaaaggcatggcactacaaagaaaacatgcgtcagtttcatcaccattcgtgcaagcatgctttgcgaatccaggtagttgctttataaaagctgctaagtctggagtcactgataatctccagggcagtctggatgcgttggcttggggaaactgtctatctatggggacaagtggaatgtttgatatcatatattcagagaaggtagctaagtctgggaatgtgtatgagctgctagaagccagttttgacaagccgaacaataaagctggtactcatttgcacaaatattcatctgacaaatgcggttctgagtttaggcataaaaatggttatgccttgaaagagggaaaacagtggaaaaccattttaagaaattttgtgacggtaaatgatatccagaagctgacttttgcttcgaggtgcatattgaacaagtattcaattgatgagctgctaagtgagagtgacaggtcaacaatgctaagggttttgaattttcatcctcgtaaaagtgagaagtttggcattggaccacaggacattaaggttggatggcatccaaaatacaaggatagccggtgcttccatatagtaagaattgatgggacggttgaagatttttcataccgcaaatgcattcttggtgctcttgatatcgttgatccaaaaaagtcaaagatccaggagaaaaaatggtcaggacatggtaacacgtaatatctatgcatgtccaagcataataagtgactatcatttgatctggtgacagtcacagactataaaaatagagtcggaagggtaatagtagtgccacaactctacaatcacaaaaagcaacgttgtttttctacctttgatttagaaggatgtccggaatcagtggtagagagcactgttctcttttgcgagtttagagttatgttattggcattactccagctaattggtggaaatagtttgcagccttcttttgttgtattttactatcttcaaggctagactgggtgatagcttactcaaatgttgctcgatggatttagaggcagagcagcgaatccagcgtaaagtcataacattttgaaagaagaaaggagaagatgcatagaagggaggatacaagatggaacaatgatagtatatattttttcaatatgaacaaattaaattttattttatatgttaaaagatggcgtgggttcttaccctgagcttctttttgcttcttccactaatactttatttgccaacgattacgtaaggcaaagaaagatctagtggaagcagcaacgagaagcttgtaaagacttatacccccagaccatttgtattgatgcggcagttaaatataagatatgtttaggttatgccgggttcaaatgtcatgcgtatctctgc

SEQ ID NO: 128 - DNA, 5419 bp, Glycine max
  source 1..5419: mol_type = genomic DNA
ttatcgcgtcctcggtctacacaaagtgccccttctcaactcggcgtttgtctcgtggtcgcgtggaaagtgatcagcggtgttccatttcgctattcattcgtctttactttactgcgctctctctctctccaattctctcttcggtttcgattttggtcttcgcagagcattgccgcgtagctcacacgcaccaccaccattgtctgcgtgctggtttagtcgatcattcgttcctttcactcaagttaccttgaaattctgagtgcgcgaatttcttcgcacacgtgtggtgctattggcggcacaaaccggggagcgcagcttatcactgtgcccaaccctttttgattacttgaaattttctgccgagtgcaaggttaccaagtttcatggatgatgaccttttacagaggaacaaaacaccatctgttgtcataaaagcgataaagttcgatgtcttaactgaagaagatatagagaatatctctgttttggagataaatgcagccgggcaggtcactgggtcaaatttgggattgccaaatgcatctgatgagtgtgccacatgtggcactaaagacaaaaagttctgtgaaggtcattttggagtaatcaaatttcctactcccatactccatccatattttatgttagaaattgcgcacatcttgaacaagatttgccctgtttgtaaatctattcgtcacaaatccaagggtgctcgattaatctatggaaccaagcggtctaatgattgcaattattgttctgtgtatccatcaatgcaatttagagtttcctccaacgatctctttagaagaactgcaattattgttgaagtaaaggcttcaaagaaaactttgggaacagaaatacctgctgatttttggaattttattccttgtgatgctcaacaagaagaaaattatgtaaatagaagggttttatcacctgtgcaggttaattatttgttgaatgatgttgatccagactttattgaaaaatatattccaagaaagaatttgctgtgtcttaattgcttcccggtgactccaaattgtcatcgtgtgacagaagtcccttatgcaatttctagtggaagccggttgagttttgatgacaggactcgatcttgtaagaaattggttgatttcaggggtacagctaatgaattaagttctcgtgttttggattgcctgaggatctctaagctaaatcctgataaaaccccaaatagtatttttgctgatatccagcaaagaaagattggagaaaatgctttcaattcttctggtttaagatggataaaagatgtggttcttggaaaacgcaatgacagttcattccgtactgtggttgttggtgatccagaccttgagcttagtgaaattggtataccttgtcatattgctgaaagtttgcaggtttctgagtatgtgaataggcagaatagggagaagctgctttattgttgtgagctacacttgttagagaaggggaaaataaatgtctgcagaaagggtagtatagttcatctgtataaaaaggaagatctacaaataggtgacaaattttataggcctcttgctgatggggataaagtgctgataaataggcccccttctatacatcaacattctatgatttctctcacagttagggtccttccaatatcttctgtagtgtgtattaacccactctgttgttccccactacgtggggattttgatggtgattgccttcacgggtatattccacaatcggttactgcaagaattgagcttaatgagctggttgctttagataggcaattgattaatgggcaaagtggtagaaatcttctttcactttcccaagatagtttgactgctgcatatttgctaatggaagatggggtccttttgaatgtttatcaaatgcagcagcttcaaatgctttctatttctaacaaaagattaatacctcctgcagttgttaaagctccctctagtaatagctcactttggaatgggaagcaattattcagcatgcttttgccgtatgattttgactattcttttccttcagatggtgttgttgttagtgatggagagcttgtatcttcttctgaggcttctggttggttacgcgattctgactacaatgtttttcagagtcttgtggaacattatcaagggaagactctaaactttttgtatgcagcacaaaaagttctgtgtgagtggctgtctatgacaggttttagtgtttcactctctgatttgtacctttcttctgattcgtatgcacgggaaaacatgatagaggaaatcttttatggcttacaagatgcagagcgggcttgtaatttcaagcagctattgttggattattattgtgattttctgtcaggaagtcttcaagagagtgaaaatgctatcactgttaatgcagatcgtctgaattatgaaagacaaatatctgcttctctcagtcaagcgtcagttgatgcttttaggcaagtttttcgcaatattcaaagtttagctgataaatatgcatgcaagggaaattctttccttgcaatgtttaaggctggaagcaagggtaatttgctgaaattagttcaacattccatgtgccttggcatgcaaaattctctggtccgcttgtcatacagactaccccgtcatctttcatgtgctgactggaatagtcaaaagtgggttgattcaatccagatgtcttctggtacccttgaatctgttcagtcatacattccatatgctgtagttgaaagttcttttttaactgggttgaatccacttgaatgttttgttcattcagtgacaaatcgtgatagctctttcagtgaccatgcggaccttcctggtacactgacacgtagacttatgttcttcatgcgtgatttgtatgatgcatatgatggaacggtgagaaatttatatggtaatcaacttattcagttttcttatgatattgaagaggactcttcatgcaataaaggtttccagcagtatgctttaggtggtgaatcagttggggctatttctgcctgtgcaatttctgaagctgcatacagtgctttgggtcaaccagttagtctactcgaaacatcacctttgctgaatttgaaaaatgttctggagtgtggttcaaggaaaagaaatggtgatcagactgtgtctttatttttgtctgaaaagcttggtaaacagagacatgggtttgaatatgcagctttagaagtcaagaattatttggaaagattgttgttctcaaacattgtttctaaagtgatgataatattcaccccacatgacagcaggagccaagaaaaatacagtccttgggtctgccactttcatttagacaaggaaattgtaacaagaagaaaattgaaagtgcattctatcattgactctctctatcagagatattactctcagagaaaagactcaaaagtctgttttaccaatttgaaaatttcaagcaggaagtgttctgctgattccatggttaaggaaggtgaagacacttctatagataaagaagagggtgatgattgcatcatggtcacaattgttgaaaactctaagaatcctatacaactggattctgttcgggacttggtgataccttttcttctaggaacagcaatacaaggatttctggatgtcaagaaggttgatattctctggaataatcagtcaaaagtaacaaattctcgtaatggtttttctggtgaactgtacttgagggtaactttgtccagcgagggtagcagaggaagattttggggtgtcctcctaaagctttgtcacaagataatgcatataattgactggacacgaagtcatacagataacatcaatcatttctcatcagcatatggaattgatgcagggtggcaatactttttcaatagtttggcatgtgcaacatctgataccggcaagtccatccttcctaagcatttgtgtcttgttgccaatagtctgtcatgtagtggagagtttgtaggattaaatgctaaaggcatggcactacaaagaaaacatgcgtccgtttcatcaccatttgtgcaagcatgctttgcgaatccaggtagttgctttataaaagctgctaagtctggagccacggataatctccagggcagcctggatgggttggcttggggaaactgtctatctatggggacaagtggaatgtttgatgtcatatattcagagaagggacatcaggtagctaagtctgtagatgtgtatgagctgctagaagccagttttgacaagccgaacaataaaattggtactcatttgcacaaatattcatctgacaaatgcggttctgagtttaggcataaaaatggttatgccttgaaagagggaaaacagtggaaaaccattttaagaaattttgtgacagtaaatgatattcagaagctgacttttgcatcgaggtgcatattgaacaagtattcaattgatgagctgctaagtgagagtgacaggtcaacaatgctaagggttttgaattttcatcctcataaaagtgagaagtttggcattggaccacaggacattaaggttggatggcatccaaaatacaaggatagccggtgcttccatataataagaactgatgggacggttgaagatttttcataccgcaaatgcattcttggtgctcttgatatcgttgatccaaaaaaatcaaagatccaggagaaaaaatggtcaggacatggtgacacgtaatatctatgcatatccaagcataataagtgactgtcatttgatctggtgacagtcacagactctataaaatatgaagtgatgttttcgccgaagaaatcgttgtaaaaatacagtgggaagggtaatagtagtgccacaactctacaatcacaaaaagcaacgttgtttttctgcctttgttgtattatactatctcaaggctagactgggtgatagcttattcaaatgtcgctcgatggatttagctcgtctgatagaggtagtgcagcaaatcaagagtaaagtcataacttttgtgcagcagcacattttgaaagaaaggagataattcatagatgggagtatacaagatggaacaatggtagtattttttttttcttttcaatctgaacaatttaaattttattttgtataataaagatggagtgggttcttacccttagcttctttttgcttcttccactaatactttatttgccaacgattacgtaaggcaaagaaagatctagtggaagcagcaacgagaagcttgtaaaaacttgtacccccagaccatttgtattgatgaatatgtggcagttaaatataagatatgcctgattcaaatgtcatgcttatctctgcatatctctaacgcgcatattgaatgcgag

SEQ ID NO: 129 - DNA, 5410 bp, Glycine max
  source 1..5410: mol_type = genomic DNA
ttatcgcgtcctcggtctacacaaagtgccccttctcaactcggcgtttgtctcgtggtcgcgtggaaagtgatcagcggtgttccatttcgctattcattcgtctttactttactgcgctctctctctctccaattctctcttcggtttcgattttggtcttcgcagagcattgccgcgtagctcacacgcaccaccaccattgtctgcgtgctggtttagtcgatcattcgttcctttcactcaagttaccttgaaattctgagtgcgcgaatttcttcgcacacgtgtggtgctattggcggcacaaaccggggagcgcagcttatcactgtgcccaaccctttttgattacttgaaattttctgccgagtgcaaggttaccaagtttcatggatgatgaccttttacagaggaacaaaacaccatctgttgtcataaaagcgataaagttcgatgtcttaactgaagaagatatagagaatatctctgttttggagataaatgcagccgggcaggtcactgggtcaaatttgggattgccaaatgcatctgatgagtgtgccacatgtggcactaaagacaaaaagttctgtgaaggtcattttggagtaatcaaatttcctactcccatactccatccatattttatgttagaaattgcgcacatcttgaacaagatttgccctgtttgtaaatctattcgtcacaaatccaagggtgctcgattaatctatggaaccaagcggtctaatgattgcaattattgttctgtgtatccatcaatgcaatttagagtttcctccaacgatctctttagaagaactgcaattattgttgaagtaaaggcttcaaagaaaactttgggaacagaaatacctgctgatttttggaattttattccttgtgatgctcaacaagaagaaaattatgtaaatagaagggttttatcacctgtgcaggttaattatttgttgaatgatgttgatccagactttattgaaaaatatattccaagaaagaatttgctgtgtcttaattgcttcccggtgactccaaattgtcatcgtgtgacagaagtcccttatgcaatttctagtggaagccggttgagttttgatgacaggactcgatcttgtaagaaattggttgatttcaggggtacagctaatgaattaagttctcgtgttttggattgcctgaggatctctaagctaaatcctgataaaaccccaaatagtatttttgctgatatccagcaaagaaagattggagaaaatgctttcaattcttctggtttaagatggataaaagatgtggttcttggaaaacgcaatgacagttcattccgtactgtggttgttggtgatccagaccttgagcttagtgaaattggtataccttgtcatattgctgaaagtttgcaggtttctgagtatgtgaataggcagaatagggagaagctgctttattgttgtgagctacacttgttagagaaggggaaaataaatgtctgcagaaagggtagtatagttcatctgtataaaaaggaagatctacaaataggtgacaaattttataggcctcttgctgatggggataaagtgctgataaataggcccccttctatacatcaacattctatgatttctctcacagttagggtccttccaatatcttctgtagtgtgtattaacccactctgttgttccccactacgtggggattttgatggtgattgccttcacgggtatattccacaatcggttactgcaagaattgagcttaatgagctggttgctttagataggcaattgattaatgggcaaagtggtagaaatcttctttcactttcccaagatagtttgactgctgcatatttgctaatggaagatggggtccttttgaatgtttatcaaatgcagcagcttcaaatgctttctatttctaacaaaagattaatacctcctgcagttgttaaagctccctctagtaatagctcactttggaatgggaagcaattattcagcatgcttttgccgtatgattttgactattcttttccttcagatggtgttgttgttagtgatggagagcttgtatcttcttctgaggcttctggttggttacgcgattctgactacaatgtttttcagagtcttgtggaacattatcaagggaagactctaaactttttgtatgcagcacaaaaagttctgtgtgagtggctgtctatgacaggttttagtgtttcactctctgatttgtacctttcttctgattcgtatgcacgggaaaacatgatagaggaaatcttttatggcttacaagatgcagagcgggcttgtaatttcaagcagctattgttggattattattgtgattttctgtcaggaagtcttcaagagagtgaaaatgctatcactgttaatgcagatcgtctgaattatgaaagacaaatatctgcttctctcagtcaagcgtcagttgatgcttttaggcaagtttttcgcaatattcaaagtttagctgataaatatgcatgcaagggaaattctttccttgcaatgtttaaggctggaagcaagggtaatttgctgaaattagttcaacattccatgtgccttggcatgcaaaattctctggtccgcttgtcatacagactaccccgtcatctttcatgtgctgactggaatagtcaaaagtgggttgattcaatccagatgtcttctggtacccttgaatctgttcagtcatacattccatatgctgtagttgaaagttcttttttaactgggttgaatccacttgaatgttttgttcattcagtgacaaatcgtgatagctctttcagtgaccatgcggaccttcctggtacactgacacgtagacttatgttcttcatgcgtgatttgtatgatgcatatgatggaacggtgagaaatttatatggtaatcaacttattcagttttcttatgatattgaagaggactcttcatgcaataaaggtttccagcagtatgctttaggtggtgaatcagttggggctatttctgcctgtgcaatttctgaagctgcatacagtgctttgggtcaaccagttagtctactcgaaacatcacctttgctgaatttgaaaaatgttctggagtgtggttcaaggaaaagaaatggtgatcagactgtgtctttatttttgtctgaaaagcttggtaaacagagacatgggtttgaatatgcagctttagaagtcaagaattatttggaaagattgttgttctcaaacattgtttctaaagtgatgataatattcaccccacatgacagcaggagccaagaaaaatacagtccttgggtctgccactttcatttagacaaggaaattgtaacaagaagaaaattgaaagtgcattctatcattgactctctctatcagagatattactctcagagaaaagactcaaaagtctgttttaccaatttgaaaatttcaagcaggaagtgttctgctgattccatggttaaggaaggtgaagacacttctatagataaagaagagggtgatgattgcatcatggtcacaattgttgaaaactctaagaatcctatacaactggattctgttcgggacttggtgataccttttcttctaggaacagcaatacaaggatttctggatgtcaagaaggttgatattctctggaataatcagtcaaaagtaacaaattctcgtaatggtttttctggtgaactgtacttgagggtaactttgtccagcgagggtagcagaggaagattttggggtgtcctcctaaagctttgtcacaagataatgcatataattgactggacacgaagtcatacagataacatcaatcatttctcatcagcatatggaattgatgcagggtggcaatactttttcaatagtttggcatgtgcaacatctgataccggcaagtccatccttcctaagcatttgtgtcttgttgccaatagtctgtcatgtagtggagagtttgtaggattaaatgctaaaggcatggcactacaaagaaaacatgcgtccgtttcatcaccatttgtgcaagcatgctttgcgaatccaggtagttgctttataaaagctgctaagtctggagccacggataatctccagggcagcctggatgggttggcttggggaaactgtctatctatggggacaagtggaatgtttgatgtcatatattcagagaaggtagctaagtctgtagatgtgtatgagctgctagaagccagttttgacaagccgaacaataaaattggtactcatttgcacaaatattcatctgacaaatgcggttctgagtttaggcataaaaatggttatgccttgaaagagggaaaacagtggaaaaccattttaagaaattttgtgacagtaaatgatattcagaagctgacttttgcatcgaggtgcatattgaacaagtattcaattgatgagctgctaagtgagagtgacaggtcaacaatgctaagggttttgaattttcatcctcataaaagtgagaagtttggcattggaccacaggacattaaggttggatggcatccaaaatacaaggatagccggtgcttccatataataagaactgatgggacggttgaagatttttcataccgcaaatgcattcttggtgctcttgatatcgttgatccaaaaaaatcaaagatccaggagaaaaaatggtcaggacatggtgacacgtaatatctatgcatatccaagcataataagtgactgtcatttgatctggtgacagtcacagactctataaaatatgaagtgatgttttcgccgaagaaatcgttgtaaaaatacagtgggaagggtaatagtagtgccacaactctacaatcacaaaaagcaacgttgtttttctgcctttgttgtattatactatctcaaggctagactgggtgatagcttattcaaatgtcgctcgatggatttagctcgtctgatagaggtagtgcagcaaatcaagagtaaagtcataacttttgtgcagcagcacattttgaaagaaaggagataattcatagatgggagtatacaagatggaacaatggtagtattttttttttcttttcaatctgaacaatttaaattttattttgtataataaagatggagtgggttcttacccttagcttctttttgcttcttccactaatactttatttgccaacgattacgtaaggcaaagaaagatctagtggaagcagcaacgagaagcttgtaaaaacttgtacccccagaccatttgtattgatgaatatgtggcagttaaatataagatatgcctgattcaaatgtcatgcttatctctgcatatctctaacgcgcatattgaatgcgag

SEQ ID NO: 130 - DNA, 6907 bp, Glycine max
  source 1..6907: mol_type = genomic DNA
aaaaaaatttaatttttcatttcatttcacactcactcgcttactcacttcattccatttctctccgaaaaccctctttctctcacgctcgttgttgtttcgatcggtttcgtgtaatgatggttttgcggtgagctaagtgagacgctcgaattgaacagcttttgtttcgctcctgaggcactataattgatcacgaaagtaatggaggataatcccccttcaagtgttttagatgggaccgttgttgggatcaaatttggtatggctacacgtcaggaaatttgtacagcatccattagtgagtcttcaattagtcatgctagtcagctgtcaaatccattccttgggctgccccttgaatttggcagatgtgaatcttgtggtacctctgaagttggaaaatgcgaaggtcattttggatatgtggaactaccggttcctatataccatccgagccatatcagtgaattgaaacggatgctgagcgtggtctgcttaaattgcttaaaaatgaggaaaaccaagtttccagcttcaagcagtggcttagcacaaagattaatatctccatgttgccaggatgttaatgctgctctagtttctattcgggaagttaaaacaagtgacggggcttgttatttggcgctgaaagtatccaaatccaagattcatgatggtttttggagtttcttagaaaaatatggctatcgctatgagggtgatgaaactcgagccttgcttccttgtgaggcaatggaaattattaagagaattccgatagagacaaaaaaaaagcttgctggaaaaggattttttcctcaagatggatatgttttgaagtatcttccggtgccaccaaattgcttgtctgtgccagaagtttcagacggtgccagtgtcatgtcgtcggatccttccatgacaattctcagaaaattgctcaggaaggttgaaatcataaaaagctctagatctggtgaaccaaatttcgagtctcatcacgtggaagcaaatgatttgcagtctgtggttgatcaatattttcaaattaggggcacttctaagccagcacgtgatatagagacacattttggggtcaataaagagcttactgcatcctcaacaaaagcatggcttgagaaaatgaggacattatttataagaaagggttcaggtttttcgtcccggaatgtaattactggagattgttataagaggataaatgaagtaggaattccggttgaagttgcccagcggataacatttgaggagagagttaacatccacaacatcagatatttacagaagttggttgatgaacatttgtgcctgacctacaaggaaggtgtgtcaacttattcactcagggagggctctaaggggcacatatatctcaagcctggtcagatagtgcatcggaggattatggatggggatattgtcttcatcaacagaccacctacaacacacaaacattccttacaagccctttatgtttacatccatgaagaccacactgtgaagattaatcctttaatttgtggaccgcttggggctgattttgatggtgactgtgtccatctgttttatccgcagtcacttgctgctaaagctgaagttgtggagctatttgctgtggagaatcagctgctcagctctcacagtggtaatttgaacctacagttatccacagactcattgttggcactgaagatgttggtcaagagatgttttttgggtagagcggcagctaatcaattggcgatgtttcttttgcttcctttgcctcggcctgctttgctcaaggccagttctgatgatgcttgttggacttccatccaaattttacagggtgcattacctatgggttttgattgcactgggggacgatatttgattaggcagagtgaaatcttagaatttgatttcagcagggatgctctgcctgcaaccataaatgaaatagcagcttcaattttctttggcaagggtcccatggaggcacttaaattcttcgatgtattgcaaccctttttgatggaaagcttatttgcggaagggtttagtgttagcctggaagagttttcaatatccagggcaatcaaaaggataataagaagaagcattggaaaggcttcttctctgctgtatcagctgaggtccttatacaatgagctggtggcgcagcaactggagaagcacattcaagatgttgaacttcctatcattaattttgctctaaagtcgactaaattaggagatttaattgattcgaagagtaaatctactattgataaggttgttcagcaggttgggttcttagggcagcaactttttgataggggaagattctactcaaagggattggtagatgatgtggcatcacattttcatgcaaagtgttgttatgatggggatggttatccctctgctgagtatggactgctcaaagggtgtttttttaatggtttggatccatatgaagagatggtgcattcaatttcaactagggaaataatggtgcgttcttcaagaggattatctgaaccaggaactctctttaagaatttgatggccatccttcgggatgttgttatctgttatgatggaactgtcagaaacatttgtagtaattccatcatccagtttgaatatgggatacaagctggagacaaaactgagcacttattccctgctggtgagcctgtaggtgtcttggcagcaactgctatgtcgaatcctgcttacaaggctgttcttgatgctagtcctaatagcaactcttcatgggagttgatgaaggaaatattactctgcaaggttaattttaggaatgaacctgttgatcggcgtgtcattttgtacttgaatgactgtgattgtggagggagttgttgccgagaaaatgcagcatattcagttaaaaatcaattgagaaaagtcagtctcaagaatgcagctgtggagttcattattgaataccaacaacagcgaactcaaaaggaaaattctgaaactgatgctggacttgttggtcatatttatctggatgagatgatgttagaggagctgaagatcagcatggccaatgtttttgaaaaatgcctagaaagactcaagtcttttagtcggaaaaagaaagttaatcaatatttgaagaacattgaattatcatttagtgagtcttgctcatcttcacatcctgctgcaccatgtttaacattttggctaaagaatcatgatagtgatttagataatgctgtaaaggtcctgtctgaaaatatctgccctgttctgttcgaaacaataatcaaaggagacccgcgcattagctctgcaagtataatctgggttagtccagatacaaacacatgggtccgaaacccttataaatcatctaatggtgaattggcacttgacatcgttcttgaggaggaagctgtcaagcagagtggcgatgcttggagaattgtacttgattcctgccttcctgttcttcacttgattgataccaggcgttccatcccttacgctattaagcagattcaggaattactggggatatcatgtacttttgatcaagcgattcagcgtgttgcagcatctgtgaaaatggtggcgaaaggtgtacttagggagcatctaattctgttagctagtagtatgacatgtggtgggaacttggttggctttaatacaggtggatataaagctctctctcgtcaattaaatatacaagtaccgttcacagatgcaacactctttacacctaaaaagtgttttgagagagctgctgagaaatgccatactgattctctgtcaagcatagttgcctcctgttcctggggtaaacatgtggcagttggtacaggatcaaaatttgacattgtttgggattcaagtgagataaaatcaaatgaaattgaagggatggatgtttacagttttcttcacatggtgaaaagtgtaaccaatggggaagaagaaactgatgcttgtttgggtgaagatattgatgatttgctggaagaagaatatatggacttgggcatgtccccacaacacaactctggttttgaagctgtatttgaagagaatcctgaagtactgaatggttcaacatccaatggttgggatgtaagttcaaatcagactcaatcaaaaaccaatgagtggtcaggttgggcaagtagtaacaaagatggtagatctgaaactgcccaagagaattcttgggggaaaactgtcaaccaagaagactcttccaagtctaacgcttggaatacaagcaccacagcagatcagacaaaaactaaatctaatgaatggtctgactggggtagtaacaagtctgaaataccagctggtggatctaaagcagttcaagaagactcttccaagtctaacgcttggaatacaagcaccacatcaaatcagacaaaaactaaatctaaggaatggtctgcctggggaagtaacaagtctgaaataccagcttgtggatctaaagcagttcaagaagactcttccaagtctaacacttggaatacaagcaccacagcagatcagacaaaaactaaatctaatgaatggtctgcctggggaagtaacaagtctgaaataccagctggtggatctaaagcagttcaagaggactcttccaagtctaacgcttggaatagaagcaccacagcagatcagacaaaaactaaatctaatgaatggtctgcctggggaagtaacaagtctgaaataccagctggtggatctaaagcagttcaagaggactcttccaagtctaatgcttggaatacaagcaccacagcagatcagacaaaaactaaatctaatgaatggtctgcctggggaagtaacaagtctgaaataccagctggtggatctaaagcagttcaagaagattcttccaaagcttggaatacaagcaccacagcagatcagacaaaaactaaatctaatgaatggtctgcccgggtaagtaacaagtctgaaataccagctggtggatctaaagcagttcaagaagattcttggggctccagtaagtggaaggctgatgttgcccaagaagacaattccaggcttggtgcttgggatgcaaatgcagcagatcagacaaaatctaatgaatggtcgggctggggaaagaagaaagatgttacccaagaagacaatgtgcaacattcttggggctctggtaagaggaaagacaaagttacccaagaagacaattctggctctggtgattggggtgccaacagaacagatctggcaattaccaaatctagtgaatggtccagctggggaaagaacaagactgaaataccagctggtggatctgcaaatgtgcagaatgactcatggggcttgggtaaattgaatgatacccaaaaagataattctggttgtggtgcttggggtgaaaattctgggtctgcatgggtgagaaataaagctgaaacaatagatggtggatcagaaaagccccaagaggatgcttggaactctggcaattggaaagctgaatcaaaagttggcaataccacttggggaaaacccaagtcttcagaaagtcatgcatgggattcccataatcagtcaaatcaaaattcaagttcacaggggtgggaatcacatattgcttcagctaattcagaaaatgagaaaggttttcagtggggaaaaggtagagactcgtttaagaaaaatcgatttgaaggttcgcaaggtcggggttcaaatgctggtgactggaaaaataggaatcgcccgcctagagcacctggacagagattggacatttactcatctgaggagcaggatgttctgaaggatattgaacccattatgcagtctatcagacgaatcatgcaacaacaggggtacagtgatggggatccactggctgctgaagatcaactttttgtacttgagaatgtctttgagcaccacccagataaagaaaccaaaatgggtgctggaattgattatgtcatggttaacaaacacagtagcttccaggaaagtagatgcttttatgtggtttgtaaagatggtcaaagcaaagacttttcctaccggaagtgtttggccaactatataagcaagaagtatcctgaccttgctgaatcattccttggcaaatattttcggaaacctcgtgctaggggggaccagactgcaacactagggggagaccagactgcaacaccagcgcaggatgaagcagccacttcgggtgagtagattagggttgtgtccataatattgtacagaaacggtgtagttgaggccactgaatagttcgtcatagctgaccaattttcctgtaggaaagtgttcctctttttggtgacagttagatggtaattttttttcacatgcgaatgatgatagcaaacacccttttgccgatgttaatattgttctaatgattacagcacttatgatgtgcctagcaaactttgctcatcattttatttaaaccatcaattgcacctgggtttcagacattgattggaccactgatacaaaaatggcatccttctgattagagtttcatgaatcagttgtggcttatatttttgtttaataggtttctaggcatttccgagttatatttaaaccggtagaatttctttgatttagttttttcttgtctcatctttgtaatacagactgcgatggtttagtatctcgatttttaaaggtcctggtcaaaggcaggaatgactttaactgcccattttgttaaccacactgttctttataattcctggtaaatttttttttcaaaatatcatttagcgtaacgaaaccttttgggtgtaatttctatgatgacaagtattgctcaaatttatgtgaaagaacgagttggcttcgg

SEQ ID NO: 131 - DNA, 6910 bp, Glycine max
  source 1..6910: mol_type = genomic DNA
aaaaaaatttaatttttcatttcatttcacactcactcgcttactcacttcattccatttctctccgaaaaccctctttctctcacgctcgttgttgtttcgatcggtttcgtgtaatgatggttttgcggtgagctaagtgagacgctcgaattgaacagcttttgtttcgctcctgagcaggcactataattgatcacgaaagtaatggaggataatcccccttcaagtgttttagatgggaccgttgttgggatcaaatttggtatggctacacgtcaggaaatttgtacagcatccattagtgagtcttcaattagtcatgctagtcagctgtcaaatccattccttgggctgccccttgaatttggcagatgtgaatcttgtggtacctctgaagttggaaaatgcgaaggtcattttggatatgtggaactaccggttcctatataccatccgagccatatcagtgaattgaaacggatgctgagcgtggtctgcttaaattgcttaaaaatgaggaaaaccaagtttccagcttcaagcagtggcttagcacaaagattaatatctccatgttgccaggatgttaatgctgctctagtttctattcgggaagttaaaacaagtgacggggcttgttatttggcgctgaaagtatccaaatccaagattcatgatggtttttggagtttcttagaaaaatatggctatcgctatgagggtgatgaaactcgagccttgcttccttgtgaggcaatggaaattattaagagaattccgatagagacaaaaaaaaagcttgctggaaaaggattttttcctcaagatggatatgttttgaagtatcttccggtgccaccaaattgcttgtctgtgccagaagtttcagacggtgccagtgtcatgtcgtcggatccttccatgacaattctcagaaaattgctcaggaaggttgaaatcataaaaagctctagatctggtgaaccaaatttcgagtctcatcacgtggaagcaaatgatttgcagtctgtggttgatcaatattttcaaattaggggcacttctaagccagcacgtgatatagagacacattttggggtcaataaagagcttactgcatcctcaacaaaagcatggcttgagaaaatgaggacattatttataagaaagggttcaggtttttcgtcccggaatgtaattactggagattgttataagaggataaatgaagtaggaattccggttgaagttgcccagcggataacatttgaggagagagttaacatccacaacatcagatatttacagaagttggttgatgaacatttgtgcctgacctacaaggaaggtgtgtcaacttattcactcagggagggctctaaggggcacatatatctcaagcctggtcagatagtgcatcggaggattatggatggggatattgtcttcatcaacagaccacctacaacacacaaacattccttacaagccctttatgtttacatccatgaagaccacactgtgaagattaatcctttaatttgtggaccgcttggggctgattttgatggtgactgtgtccatctgttttatccgcagtcacttgctgctaaagctgaagttgtggagctatttgctgtggagaatcagctgctcagctctcacagtggtaatttgaacctacagttatccacagactcattgttggcactgaagatgttggtcaagagatgttttttgggtagagcggcagctaatcaattggcgatgtttcttttgcttcctttgcctcggcctgctttgctcaaggccagttctgatgatgcttgttggacttccatccaaattttacagggtgcattacctatgggttttgattgcactgggggacgatatttgattaggcagagtgaaatcttagaatttgatttcagcagggatgctctgcctgcaaccataaatgaaatagcagcttcaattttctttggcaagggtcccatggaggcacttaaattcttcgatgtattgcaaccctttttgatggaaagcttatttgcggaagggtttagtgttagcctggaagagttttcaatatccagggcaatcaaaaggataataagaagaagcattggaaaggcttcttctctgctgtatcagctgaggtccttatacaatgagctggtggcgcagcaactggagaagcacattcaagatgttgaacttcctatcattaattttgctctaaagtcgactaaattaggagatttaattgattcgaagagtaaatctactattgataaggttgttcagcaggttgggttcttagggcagcaactttttgataggggaagattctactcaaagggattggtagatgatgtggcatcacattttcatgcaaagtgttgttatgatggggatggttatccctctgctgagtatggactgctcaaagggtgtttttttaatggtttggatccatatgaagagatggtgcattcaatttcaactagggaaataatggtgcgttcttcaagaggattatctgaaccaggaactctctttaagaatttgatggccatccttcgggatgttgttatctgttatgatggaactgtcagaaacatttgtagtaattccatcatccagtttgaatatgggatacaagctggagacaaaactgagcacttattccctgctggtgagcctgtaggtgtcttggcagcaactgctatgtcgaatcctgcttacaaggctgttcttgatgctagtcctaatagcaactcttcatgggagttgatgaaggaaatattactctgcaaggttaattttaggaatgaacctgttgatcggcgtgtcattttgtacttgaatgactgtgattgtggagggagttgttgccgagaaaatgcagcatattcagttaaaaatcaattgagaaaagtcagtctcaagaatgcagctgtggagttcattattgaataccaacaacagcgaactcaaaaggaaaattctgaaactgatgctggacttgttggtcatatttatctggatgagatgatgttagaggagctgaagatcagcatggccaatgtttttgaaaaatgcctagaaagactcaagtcttttagtcggaaaaagaaagttaatcaatatttgaagaacattgaattatcatttagtgagtcttgctcatcttcacatcctgctgcaccatgtttaacattttggctaaagaatcatgatagtgatttagataatgctgtaaaggtcctgtctgaaaatatctgccctgttctgttcgaaacaataatcaaaggagacccgcgcattagctctgcaagtataatctgggttagtccagatacaaacacatgggtccgaaacccttataaatcatctaatggtgaattggcacttgacatcgttcttgaggaggaagctgtcaagcagagtggcgatgcttggagaattgtacttgattcctgccttcctgttcttcacttgattgataccaggcgttccatcccttacgctattaagcagattcaggaattactggggatatcatgtacttttgatcaagcgattcagcgtgttgcagcatctgtgaaaatggtggcgaaaggtgtacttagggagcatctaattctgttagctagtagtatgacatgtggtgggaacttggttggctttaatacaggtggatataaagctctctctcgtcaattaaatatacaagtaccgttcacagatgcaacactctttacacctaaaaagtgttttgagagagctgctgagaaatgccatactgattctctgtcaagcatagttgcctcctgttcctggggtaaacatgtggcagttggtacaggatcaaaatttgacattgtttgggattcaagtgagataaaatcaaatgaaattgaagggatggatgtttacagttttcttcacatggtgaaaagtgtaaccaatggggaagaagaaactgatgcttgtttgggtgaagatattgatgatttgctggaagaagaatatatggacttgggcatgtccccacaacacaactctggttttgaagctgtatttgaagagaatcctgaagtactgaatggttcaacatccaatggttgggatgtaagttcaaatcagactcaatcaaaaaccaatgagtggtcaggttgggcaagtagtaacaaagatggtagatctgaaactgcccaagagaattcttgggggaaaactgtcaaccaagaagactcttccaagtctaacgcttggaatacaagcaccacagcagatcagacaaaaactaaatctaatgaatggtctgactggggtagtaacaagtctgaaataccagctggtggatctaaagcagttcaagaagactcttccaagtctaacgcttggaatacaagcaccacatcaaatcagacaaaaactaaatctaaggaatggtctgcctggggaagtaacaagtctgaaataccagcttgtggatctaaagcagttcaagaagactcttccaagtctaacacttggaatacaagcaccacagcagatcagacaaaaactaaatctaatgaatggtctgcctggggaagtaacaagtctgaaataccagctggtggatctaaagcagttcaagaggactcttccaagtctaacgcttggaatagaagcaccacagcagatcagacaaaaactaaatctaatgaatggtctgcctggggaagtaacaagtctgaaataccagctggtggatctaaagcagttcaagaggactcttccaagtctaatgcttggaatacaagcaccacagcagatcagacaaaaactaaatctaatgaatggtctgcctggggaagtaacaagtctgaaataccagctggtggatctaaagcagttcaagaagattcttccaaagcttggaatacaagcaccacagcagatcagacaaaaactaaatctaatgaatggtctgcccgggtaagtaacaagtctgaaataccagctggtggatctaaagcagttcaagaagattcttggggctccagtaagtggaaggctgatgttgcccaagaagacaattccaggcttggtgcttgggatgcaaatgcagcagatcagacaaaatctaatgaatggtcgggctggggaaagaagaaagatgttacccaagaagacaatgtgcaacattcttggggctctggtaagaggaaagacaaagttacccaagaagacaattctggctctggtgattggggtgccaacagaacagatctggcaattaccaaatctagtgaatggtccagctggggaaagaacaagactgaaataccagctggtggatctgcaaatgtgcagaatgactcatggggcttgggtaaattgaatgatacccaaaaagataattctggttgtggtgcttggggtgaaaattctgggtctgcatgggtgagaaataaagctgaaacaatagatggtggatcagaaaagccccaagaggatgcttggaactctggcaattggaaagctgaatcaaaagttggcaataccacttggggaaaacccaagtcttcagaaagtcatgcatgggattcccataatcagtcaaatcaaaattcaagttcacaggggtgggaatcacatattgcttcagctaattcagaaaatgagaaaggttttcagtggggaaaaggtagagactcgtttaagaaaaatcgatttgaaggttcgcaaggtcggggttcaaatgctggtgactggaaaaataggaatcgcccgcctagagcacctggacagagattggacatttactcatctgaggagcaggatgttctgaaggatattgaacccattatgcagtctatcagacgaatcatgcaacaacaggggtacagtgatggggatccactggctgctgaagatcaactttttgtacttgagaatgtctttgagcaccacccagataaagaaaccaaaatgggtgctggaattgattatgtcatggttaacaaacacagtagcttccaggaaagtagatgcttttatgtggtttgtaaagatggtcaaagcaaagacttttcctaccggaagtgtttggccaactatataagcaagaagtatcctgaccttgctgaatcattccttggcaaatattttcggaaacctcgtgctaggggggaccagactgcaacactagggggagaccagactgcaacaccagcgcaggatgaagcagccacttcgggtgagtagattagggttgtgtccataatattgtacagaaacggtgtagttgaggccactgaatagttcgtcatagctgaccaattttcctgtaggaaagtgttcctctttttggtgacagttagatggtaattttttttcacatgcgaatgatgatagcaaacacccttttgccgatgttaatattgttctaatgattacagcacttatgatgtgcctagcaaactttgctcatcattttatttaaaccatcaattgcacctgggtttcagacattgattggaccactgatacaaaaatggcatccttctgattagagtttcatgaatcagttgtggcttatatttttgtttaataggtttctaggcatttccgagttatatttaaaccggtagaatttctttgatttagttttttcttgtctcatctttgtaatacagactgcgatggtttagtatctcgatttttaaaggtcctggtcaaaggcaggaatgactttaactgcccattttgttaaccacactgttctttataattcctggtaaatttttttttcaaaatatcatttagcgtaacgaaaccttttgggtgtaatttctatgatgacaagtattgctcaaatttatgtgaaagaacgagttggcttcgg

SEQ ID NO: 132 - DNA, 6963 bp, Glycine max
  source 1..6963: mol_type = genomic DNA
tcatgttcatttcacactcactcgcttactcactctcagtctcacacactctctctcatttcatttctctccggaaaacctttccccttcgaaaccctctttctctctcgctctttgttgtttcgatcggtttcgcgcaacgaggttctttgcattttctagggttttgcgagctgagcgagacgtttgaattgaacagcttttgtttcgctcctgaggtagaatcaggcactgtaattgaccacgaaagtaatggaggataatcccccttcaagtgttttagatgggaccgttgttgggatcaaatttggtatggctacacgccaggaaatttgtacagcatccattagtgactcttcaattagtcatgctagtcagctgtcaaatccattccttgggctgccccttgagtttggcagatgtgaatcttgtggtacttctgaagttggaaaatgcgaaggtcacttcggatatattgagttgccaattccaatatatcacccaagtcatatcagtgacttgaaacggatgctgagcatggtctgcttaaactgcctaaaattaaggaaaaccaagcttccagcttcaagcagtggtttagcccagagattaatatctccttgttgtcaggaggataaggctgctctagtttctattcgggaagttaaaacaagtgatggggcttgttatctggcgttgaaagtatccaaatccaagatgcaaaatggtttttggagtttcttagaaaaatatggttatcgctatgggggtgatcacactcgagccttgcttccttgtgaggcaatggaaattattaagagaattccgatagagacaaaaaaaaagcttgctggaaaaggatattttcctcaagatggatatgttttgaagtatcttccggtgccaccaaattgcttgtctgtgccagaagtttcagacggtgtcagtgtcatgtcgtcggatccttccataacaattctcagaaaattgctcaggaaggttgaaatcataaaaagctctagatctggtgaaccaaatttcgagtctcatcacgtagaagcaaatgatttgcagtctgtggttgatcaatattttcaaattagaggaacttctaagccagcacgtgatatagagacacattttggggtcaataaagagcttactgcatcctcaacaaaagcatggcttgagaaaatgaggacattatttataagaaagggttcaggtttttcttcccggaatgtaattactggagattgttataagaggataaatgaagtaggaattccggttgaagttgcccaacggataacgtttgaggagagagttaacatccacaacatcagatatttacagaagttggttgatgaacatttgtgcctgacctacaaggaaggtgggtcaacttattcactcagggagggctcaaaggggcacatatatctcaagcctggtcagatagtgcatcggaggattatggatggggatattgtcttcatcaacagaccacctacaacacacaagcactccttacaagccctttatgtttacatccatgaagaccacactgtgaagataaatcctttaatttgtggaccacttggggctgattttgatggtgactgtgtccatctgttttatccgcaatcacttgctgctaaagctgaagttgtggagctattttctgtggagaatcaactgctcagctctcacagtggtaatttgaacctacagttatccacagactcgttgttgtcactgaagatgttggtcaagagatgtttttttgatagagcagcagctaatcaattggcgatgtttattttgcttcctttgcctcggcctgctttgctcaaggccagttctggtgatgcttgttggacttccatccaaattttacagtgtgctttacctttgggttttgattgcactgggggacggtatttgattaggcagagtgagatcttagaatttgaattcagcagggatgttctgcctgcaaccgtaaatgaaatagcagcttcagttttctttggcaagggtcccaaggaggcacttaatttctttgatgtattgcaaccctttttgatggaaagcttatttgcggaagggtttagtgttagcctggaagagttttcaatatccagggcaattaaaaggataataagaaaaagcattggaaaagtttcttctctgctgtatcagctgaggtccttgtacaatgagctggtggcgcagcaactggagaagcacattcgagatgttgaacttcctatcattaattttgctctaaagtcaactaaattaggagatttaattgattcaaagagtaaatctgctattgataaggttgttcagcagattgggtttttagggcagcaactttttgataggggaagattctactcaaagggattggtagatgatgtggcatcacattttcatgcaaagtgttgttatgacggggatggttatccctctgctgagtatggactgctcaaagggtgtttttttaatggtttggatccatacgaagagatggtgcattcgatttcaacaagggaaataatggtgcgttcttcgagaggattatctgaaccaggaacactctttaagaatttgatggccatccttcgggatgttgttatctgttatgatggaactgtcagaaacatttgtagtaattccatcatccagtttgaatacgggatacaagctggagacaaaagtgagcacttattccctgctggtgagcctgtaggtgtgttggctgcaactgctatgtcaaatcctgcttacaaggctgtccttgatgctagtcctagtagcaactcttcatgggagttgatgaaggaaatattactctgcaaggttaattttaggaatgaacttgttgatcggcgtgtcattttgtacttgaatgactgtgattgtggagggagttattgccgagaaaatgcagcatattcagttaaagatcaattgagaaaagtcagtctcaaggatgcagctgtggagttcattattgaataccaacaacagcgaactcaaaaggaaaattctgaaactgatgttggacttgttggtcatatttatttggatgagatgatgttagaggagctgaagatcagcatggcctatgttttcgacaaatgccatgaaagactcaagtcttttagtcagaaaaagaaagttaatcaatctttgaagaacattgaattatcatttagtttatttgttggtctatatcactttctgattatgttccatcttagcagtgagtcttgctcatcttcacatcctgctgcaccatgtttaacattttggctaaagaattatgatagtgatttggataatgctgtaaaggtcctggctgaaaagatctgccctgttctgtttaaaacaataatccaaggagacccgcgcattagctctgcgagtataatctgggttagtccagatacaaacacatgggtccgaaacccttataaatcttctaatggtgaattggcacttgacatcattctcgagaaggaagctgtcaagcagagtggcgatgcttggagagttgtacttgatgcctgccttcctgttcttcacttgattgataccaggcgttccatcccttacgctattaagcagattcaggaattactggggatatcatgtacttttgatcaagcgattcagcgtgttgcagcatctgtgaaaatggtggcgaaaggtgtacttagggagcatctaattctgttagctagtagtatgacttgtggtgggaacttggttggctttaatataggtggatataaagctctgtctcgtcaattaaatatacaagtaccattcacagatgcaacactctttacacctaaaaagtgttttgagagagctgctgagaaatgccatactgattctctgtcaagcatagttgcctcctgttcctggggtaaacatgtggcagttggtacaggatcaaaatttgatgttgtttgggatgcaaatgagataaaatcaaatgaaattgaagggatggatgtttacagttttcttcacatggtgaaaagctttaccaatggcgaagaagaaaccgatgcttgtttgggtgaagatattgatgatttgctggaagaagaatatatggacttgggcatgtccccacaacataactctggttttgaagctgtctttgaagagaatcctgaagtactgaatggttcaacatccaatggttgggatgtaagttcaaatcagggtgaatcaaaaaccaatgagtggtcaggttgggcaagtagtaacaaagctgaaataaaagatggtagatctgaaattgcccccaagaattcttgggggaaaactgtcaaccaagaagactcttccaagtctaacccttggagtacaagcaccatagcagatcagacaaaaactaaatctaatgaatggtctgcctggggaagtaacaagtctgaaataccagttggttgggcaagtagtaacaaaactgaaataaaagatggtagatctgaaactgcccaagagaattcttgggggaaaactgtcaaccaagaagactcttccaagtctaatgcttggaatacaagcaccacagtagatcatgcaaacactaaatctaatgaatggtctgcctggggaagtaaccagtctgaaataccagctggtggatctaaagcagttcaagaagattcttggggctcaagtaagtggaaggctgatgttgcccaagaagacaattccaggcttggtgcttgggatgcaaatgcagcagatcagacaaaatctagtgaatggtcgggttggggaaagaagaaagatgttacccaagaagacaattccaggcttggtgcttgggatgcaaatgcagcagatcagacaaaatctagagactggtcgggttggggaaagaagaaagatattacccaagaagacaattccaggcttggtgcttgggatgcaaatgcagcagatcagacaaaatctagtgaatggtcgggttggggaaagaagaaagatgttacccaagaagacaattccaggcttggtgcttgggatgcaaatacagcagatcagacaaaatctaatgaatggtcaggttggggaaagaagaaagaagttacccaagaagacaattccaggcttggtgcttgggatgcaaatacagcagatcagacaaaatctaatgaatggtcaggttggggaaagaagaaagaagttacccaagaagacaattccaggtttggtgcttgggatgcaaatgcagaagatcagacaaaatctaatgaatggtcaggttggggaaagaagaaagatgttacccaagaagacaattccaggcttggtgcttgggatgcaaatgcagcagatcagacaaaatctaatgaatggtcagactggggaaagaagaaagaagttacccaagaagacaatgtccaagattcttggggctccggtaagaggaaagacaaagttacccaagaagacaattctgggtctggtggttggggtgccaacagaacagatctggcaaaatccaaatctagtgaatggtccagctggggaaagaacaagtctgaaataccagctggtggatctgaaaatgtgcagaatgactcatggggctcgggtaaattggaagatgatacccaaaaagaaaattctgggtctgcatgggtgagaaataaagctgaaacaatagatggtgggtcagaaaagccccaagaggatgcttggaattctggtaattggaaagctgaatcaaaagtcggcaatgcctcttggggaaaacccaaatcctcagaaagtcaagcatgggattcccataatcagtcaaatcaaaattcaagttcacagggatgggaatcacatattgcttcagctaattcagaaagtgaaaaaggttttcagtggggaaagcaaggtagagactcgtttaagaaaaatcgatttgaaggttcgcaaggccggggttcaaatgctggtgactggaaaaataggaatcgcccacctagagcccctggacagagattggacatttattcatctggtgagcaggatgttctgaaggatattgaacccattatgcagtctatcagacgaatcatgcaacaacaggggtacaatgatggggacccactggctgctgaagatcaactttttgtactggagaatgtctttgagcaccacccagataaagaaaccaaaatgggcactggaattgattatgtcatggttaacaaacacagtagtttccaggaaagtagatgcttttatgtggtttgtaaagatggtgaaagcaaggacttttcctaccggaagtgtttggccaactatataagcaagaagtatcctgaccttgctgaatcattccttggaaaatattttcggaaacctcgtgcacggggggaccagactgcaacaccagggcgggatgaagcagccactccgggcgagcagacagcaacgccaggccgggatgaagcagcaactccggctgagcagatctcaacacccacccctatggaaaccaatgagtagattacagttgtgtccataatattgtacagaaacagtgcagttgaggccactgaatagtttgtcatagctgaccaattttcctgtaggaaagtgttcctctttttggtgaacagttagatggtaatttttttagcatgtgaatgatgatagcaaacacccttgtgcagatgttaatattgttctgatgattacagcacatatgatgtgcctagcaaactttgctcatcattttgtttaatcatcaatggcacctgggtttcagaccttgattggaccactgatgcaaaaatggcatccttgtgattagagtttcatgaatcagattgtggcttatattctgtttaataggttactaagcatttccgagttatatttaaactggtaaaatttctttgatttagttttttcttgtct

SEQ ID NO: 133 - DNA, 6943 bp, Glycine max
  source 1..6943: mol_type = genomic DNA
aaaaaagaagtaaaatttcatttcatgttcatgttcatttcacactcactcgcttactcactctcagtctcacacactctctctcatttcatttctctccggaaaacctttccccttcgaaaccctctttctctctcgctctttgttgtttcgatcggtttcgcgcaacgaggttctttgcattttctagggttttgcgagctgagcgagacgtttgaattgaacagcttttgtttcgctcctgaggtagaatcaggcactgtaattgaccacgaaagtaatggaggataatcccccttcaagtgttttagatgggaccgttgttgggatcaaatttggtatggctacacgccaggaaatttgtacagcatccattagtgactcttcaattagtcatgctagtcagctgtcaaatccattccttgggctgccccttgagtttggcagatgtgaatcttgtggtacttctgaagttggaaaatgcgaaggtcacttcggatatattgagttgccaattccaatatatcacccaagtcatatcagtgacttgaaacggatgctgagcatggtctgcttaaactgcctaaaattaaggaaaaccaagcttccagcttcaagcagtggtttagcccagagattaatatctccttgttgtcaggaggataaggctgctctagtttctattcgggaagttaaaacaagtgatggggcttgttatctggcgttgaaagtatccaaatccaagatgcaaaatggtttttggagtttcttagaaaaatatggttatcgctatgggggtgatcacactcgagccttgcttccttgtgaggcaatggaaattattaagagaattccgatagagacaaaaaaaaagcttgctggaaaaggatattttcctcaagatggatatgttttgaagtatcttccggtgccaccaaattgcttgtctgtgccagaagtttcagacggtgtcagtgtcatgtcgtcggatccttccataacaattctcagaaaattgctcaggaaggttgaaatcataaaaagctctagatctggtgaaccaaatttcgagtctcatcacgtagaagcaaatgatttgcagtctgtggttgatcaatattttcaaattagaggaacttctaagccagcacgtgatatagagacacattttggggtcaataaagagcttactgcatcctcaacaaaagcatggcttgagaaaatgaggacattatttataagaaagggttcaggtttttcttcccggaatgtaattactggagattgttataagaggataaatgaagtaggaattccggttgaagttgcccaacggataacgtttgaggagagagttaacatccacaacatcagatatttacagaagttggttgatgaacatttgtgcctgacctacaaggaaggtgggtcaacttattcactcagggagggctcaaaggggcacatatatctcaagcctggtcagatagtgcatcggaggattatggatggggatattgtcttcatcaacagaccacctacaacacacaagcactccttacaagccctttatgtttacatccatgaagaccacactgtgaagataaatcctttaatttgtggaccacttggggctgattttgatggtgactgtgtccatctgttttatccgcaatcacttgctgctaaagctgaagttgtggagctattttctgtggagaatcaactgctcagctctcacagtggtaatttgaacctacagttatccacagactcgttgttgtcactgaagatgttggtcaagagatgtttttttgatagagcagcagctaatcaattggcgatgtttattttgcttcctttgcctcggcctgctttgctcaaggccagttctggtgatgcttgttggacttccatccaaattttacagtgtgctttacctttgggttttgattgcactgggggacggtatttgattaggcagagtgagatcttagaatttgaattcagcagggatgttctgcctgcaaccgtaaatgaaatagcagcttcagttttctttggcaagggtcccaaggaggcacttaatttctttgatgtattgcaaccctttttgatggaaagcttatttgcggaagggtttagtgttagcctggaagagttttcaatatccagggcaattaaaaggataataagaaaaagcattggaaaagtttcttctctgctgtatcagctgaggtccttgtacaatgagctggtggcgcagcaactggagaagcacattcgagatgttgaacttcctatcattaattttgctctaaagtcaactaaattaggagatttaattgattcaaagagtaaatctgctattgataaggttgttcagcagattgggtttttagggcagcaactttttgataggggaagattctactcaaagggattggtagatgatgtggcatcacattttcatgcaaagtgttgttatgacggggatggttatccctctgctgagtatggactgctcaaagggtgtttttttaatggtttggatccatacgaagagatggtgcattcgatttcaacaagggaaataatggtgcgttcttcgagaggattatctgaaccaggaacactctttaagaatttgatggccatccttcgggatgttgttatctgttatgatggaactgtcagaaacatttgtagtaattccatcatccagtttgaatacgggatacaagctggagacaaaagtgagcacttattccctgctggtgagcctgtaggtgtgttggctgcaactgctatgtcaaatcctgcttacaaggctgtccttgatgctagtcctagtagcaactcttcatgggagttgatgaaggaaatattactctgcaaggttaattttaggaatgaacttgttgatcggcgtgtcattttgtacttgaatgactgtgattgtggagggagttattgccgagaaaatgcagcatattcagttaaagatcaattgagaaaagtcagtctcaaggatgcagctgtggagttcattattgaataccaacaacagcgaactcaaaaggaaaattctgaaactgatgttggacttgttggtcatatttatttggatgagatgatgttagaggagctgaagatcagcatggcctatgttttcgacaaatgccatgaaagactcaagtcttttagtcagaaaaagaaagttaatcaatctttgaagaacattgaattatcatttagtgagtcttgctcatcttcacatcctgctgcaccatgtttaacattttggctaaagaattatgatagtgatttggataatgctgtaaaggtcctggctgaaaagatctgccctgttctgtttaaaacaataatccaaggagacccgcgcattagctctgcgagtataatctgggttagtccagatacaaacacatgggtccgaaacccttataaatcttctaatggtgaattggcacttgacatcattctcgagaaggaagctgtcaagcagagtggcgatgcttggagagttgtacttgatgcctgccttcctgttcttcacttgattgataccaggcgttccatcccttacgctattaagcagattcaggaattactggggatatcatgtacttttgatcaagcgattcagcgtgttgcagcatctgtgaaaatggtggcgaaaggtgtacttagggagcatctaattctgttagctagtagtatgacttgtggtgggaacttggttggctttaatataggtggatataaagctctgtctcgtcaattaaatatacaagtaccattcacagatgcaacactctttacacctaaaaagtgttttgagagagctgctgagaaatgccatactgattctctgtcaagcatagttgcctcctgttcctggggtaaacatgtggcagttggtacaggatcaaaatttgatgttgtttgggatgcaaatgagataaaatcaaatgaaattgaagggatggatgtttacagttttcttcacatggtgaaaagctttaccaatggcgaagaagaaaccgatgcttgtttgggtgaagatattgatgatttgctggaagaagaatatatggacttgggcatgtccccacaacataactctggttttgaagctgtctttgaagagaatcctgaagtactgaatggttcaacatccaatggttgggatgtaagttcaaatcagggtgaatcaaaaaccaatgagtggtcaggttgggcaagtagtaacaaagctgaaataaaagatggtagatctgaaattgcccccaagaattcttgggggaaaactgtcaaccaagaagactcttccaagtctaacccttggagtacaagcaccatagcagatcagacaaaaactaaatctaatgaatggtctgcctggggaagtaacaagtctgaaataccagttggttgggcaagtagtaacaaaactgaaataaaagatggtagatctgaaactgcccaagagaattcttgggggaaaactgtcaaccaagaagactcttccaagtctaatgcttggaatacaagcaccacagtagatcatgcaaacactaaatctaatgaatggtctgcctggggaagtaaccagtctgaaataccagctggtggatctaaagcagttcaagaagattcttggggctcaagtaagtggaaggctgatgttgcccaagaagacaattccaggcttggtgcttgggatgcaaatgcagcagatcagacaaaatctagtgaatggtcgggttggggaaagaagaaagatgttacccaagaagacaattccaggcttggtgcttgggatgcaaatgcagcagatcagacaaaatctagagactggtcgggttggggaaagaagaaagatattacccaagaagacaattccaggcttggtgcttgggatgcaaatgcagcagatcagacaaaatctagtgaatggtcgggttggggaaagaagaaagatgttacccaagaagacaattccaggcttggtgcttgggatgcaaatacagcagatcagacaaaatctaatgaatggtcaggttggggaaagaagaaagaagttacccaagaagacaattccaggcttggtgcttgggatgcaaatacagcagatcagacaaaatctaatgaatggtcaggttggggaaagaagaaagaagttacccaagaagacaattccaggtttggtgcttgggatgcaaatgcagaagatcagacaaaatctaatgaatggtcaggttggggaaagaagaaagatgttacccaagaagacaattccaggcttggtgcttgggatgcaaatgcagcagatcagacaaaatctaatgaatggtcagactggggaaagaagaaagaagttacccaagaagacaatgtccaagattcttggggctccggtaagaggaaagacaaagttacccaagaagacaattctgggtctggtggttggggtgccaacagaacagatctggcaaaatccaaatctagtgaatggtccagctggggaaagaacaagtctgaaataccagctggtggatctgaaaatgtgcagaatgactcatggggctcgggtaaattggaagatgatacccaaaaagaaaattctgggtctgcatgggtgagaaataaagctgaaacaatagatggtgggtcagaaaagccccaagaggatgcttggaattctggtaattggaaagctgaatcaaaagtcggcaatgcctcttggggaaaacccaaatcctcagaaagtcaagcatgggattcccataatcagtcaaatcaaaattcaagttcacagggatgggaatcacatattgcttcagctaattcagaaagtgaaaaaggttttcagtggggaaagcaaggtagagactcgtttaagaaaaatcgatttgaaggttcgcaaggccggggttcaaatgctggtgactggaaaaataggaatcgcccacctagagcccctggacagagattggacatttattcatctggtgagcaggatgttctgaaggatattgaacccattatgcagtctatcagacgaatcatgcaacaacaggggtacaatgatggggacccactggctgctgaagatcaactttttgtactggagaatgtctttgagcaccacccagataaagaaaccaaaatgggcactggaattgattatgtcatggttaacaaacacagtagtttccaggaaagtagatgcttttatgtggtttgtaaagatggtgaaagcaaggacttttcctaccggaagtgtttggccaactatataagcaagaagtatcctgaccttgctgaatcattccttggaaaatattttcggaaacctcgtgcacggggggaccagactgcaacaccagggcgggatgaagcagccactccgggcgagcagacagcaacgccaggccgggatgaagcagcaactccggctgagcagatctcaacacccacccctatggaaaccaatgagtagattacagttgtgtccataatattgtacagaaacagtgcagttgaggccactgaatagtttgtcatagctgaccaattttcctgtaggaaagtgttcctctttttggtgaacagttagatggtaatttttttagcatgtgaatgatgatagcaaacacccttgtgcagatgttaatattgttctgatgattacagcacatatgatgtgcctagcaaactttgctcatcattttgtttaatcatcaatggcacctgggtttcagaccttgattggaccactgatgcaaaaatggcatccttgtgattagagtttcatgaatcagattgtggcttatattctgtttaataggttactaagcatttccgagttatatttaaactggtaaaatttctttgatttagttttttcttgtct

SEQ ID NO: 134 - DNA, 6933 bp, Glycine max
  source 1..6933: mol_type = genomic DNA
aaaaaagaagtaaaatttcatttcatgttcatgttcatttcacactcactcgcttactcactctcagtctcacacactctctctcatttcatttctctccggaaaacctttccccttcgaaaccctctttctctctcgctctttgttgtttcgatcggtttcgcgcaacgaggttctttgcattttctagggttttgcgagctgagcgagacgtttgaattgaacagcttttgtttcgctcctgaggcactgtaattgaccacgaaagtaatggaggataatcccccttcaagtgttttagatgggaccgttgttgggatcaaatttggtatggctacacgccaggaaatttgtacagcatccattagtgactcttcaattagtcatgctagtcagctgtcaaatccattccttgggctgccccttgagtttggcagatgtgaatcttgtggtacttctgaagttggaaaatgcgaaggtcacttcggatatattgagttgccaattccaatatatcacccaagtcatatcagtgacttgaaacggatgctgagcatggtctgcttaaactgcctaaaattaaggaaaaccaagcttccagcttcaagcagtggtttagcccagagattaatatctccttgttgtcaggaggataaggctgctctagtttctattcgggaagttaaaacaagtgatggggcttgttatctggcgttgaaagtatccaaatccaagatgcaaaatggtttttggagtttcttagaaaaatatggttatcgctatgggggtgatcacactcgagccttgcttccttgtgaggcaatggaaattattaagagaattccgatagagacaaaaaaaaagcttgctggaaaaggatattttcctcaagatggatatgttttgaagtatcttccggtgccaccaaattgcttgtctgtgccagaagtttcagacggtgtcagtgtcatgtcgtcggatccttccataacaattctcagaaaattgctcaggaaggttgaaatcataaaaagctctagatctggtgaaccaaatttcgagtctcatcacgtagaagcaaatgatttgcagtctgtggttgatcaatattttcaaattagaggaacttctaagccagcacgtgatatagagacacattttggggtcaataaagagcttactgcatcctcaacaaaagcatggcttgagaaaatgaggacattatttataagaaagggttcaggtttttcttcccggaatgtaattactggagattgttataagaggataaatgaagtaggaattccggttgaagttgcccaacggataacgtttgaggagagagttaacatccacaacatcagatatttacagaagttggttgatgaacatttgtgcctgacctacaaggaaggtgggtcaacttattcactcagggagggctcaaaggggcacatatatctcaagcctggtcagatagtgcatcggaggattatggatggggatattgtcttcatcaacagaccacctacaacacacaagcactccttacaagccctttatgtttacatccatgaagaccacactgtgaagataaatcctttaatttgtggaccacttggggctgattttgatggtgactgtgtccatctgttttatccgcaatcacttgctgctaaagctgaagttgtggagctattttctgtggagaatcaactgctcagctctcacagtggtaatttgaacctacagttatccacagactcgttgttgtcactgaagatgttggtcaagagatgtttttttgatagagcagcagctaatcaattggcgatgtttattttgcttcctttgcctcggcctgctttgctcaaggccagttctggtgatgcttgttggacttccatccaaattttacagtgtgctttacctttgggttttgattgcactgggggacggtatttgattaggcagagtgagatcttagaatttgaattcagcagggatgttctgcctgcaaccgtaaatgaaatagcagcttcagttttctttggcaagggtcccaaggaggcacttaatttctttgatgtattgcaaccctttttgatggaaagcttatttgcggaagggtttagtgttagcctggaagagttttcaatatccagggcaattaaaaggataataagaaaaagcattggaaaagtttcttctctgctgtatcagctgaggtccttgtacaatgagctggtggcgcagcaactggagaagcacattcgagatgttgaacttcctatcattaattttgctctaaagtcaactaaattaggagatttaattgattcaaagagtaaatctgctattgataaggttgttcagcagattgggtttttagggcagcaactttttgataggggaagattctactcaaagggattggtagatgatgtggcatcacattttcatgcaaagtgttgttatgacggggatggttatccctctgctgagtatggactgctcaaagggtgtttttttaatggtttggatccatacgaagagatggtgcattcgatttcaacaagggaaataatggtgcgttcttcgagaggattatctgaaccaggaacactctttaagaatttgatggccatccttcgggatgttgttatctgttatgatggaactgtcagaaacatttgtagtaattccatcatccagtttgaatacgggatacaagctggagacaaaagtgagcacttattccctgctggtgagcctgtaggtgtgttggctgcaactgctatgtcaaatcctgcttacaaggctgtccttgatgctagtcctagtagcaactcttcatgggagttgatgaaggaaatattactctgcaaggttaattttaggaatgaacttgttgatcggcgtgtcattttgtacttgaatgactgtgattgtggagggagttattgccgagaaaatgcagcatattcagttaaagatcaattgagaaaagtcagtctcaaggatgcagctgtggagttcattattgaataccaacaacagcgaactcaaaaggaaaattctgaaactgatgttggacttgttggtcatatttatttggatgagatgatgttagaggagctgaagatcagcatggcctatgttttcgacaaatgccatgaaagactcaagtcttttagtcagaaaaagaaagttaatcaatctttgaagaacattgaattatcatttagtgagtcttgctcatcttcacatcctgctgcaccatgtttaacattttggctaaagaattatgatagtgatttggataatgctgtaaaggtcctggctgaaaagatctgccctgttctgtttaaaacaataatccaaggagacccgcgcattagctctgcgagtataatctgggttagtccagatacaaacacatgggtccgaaacccttataaatcttctaatggtgaattggcacttgacatcattctcgagaaggaagctgtcaagcagagtggcgatgcttggagagttgtacttgatgcctgccttcctgttcttcacttgattgataccaggcgttccatcccttacgctattaagcagattcaggaattactggggatatcatgtacttttgatcaagcgattcagcgtgttgcagcatctgtgaaaatggtggcgaaaggtgtacttagggagcatctaattctgttagctagtagtatgacttgtggtgggaacttggttggctttaatataggtggatataaagctctgtctcgtcaattaaatatacaagtaccattcacagatgcaacactctttacacctaaaaagtgttttgagagagctgctgagaaatgccatactgattctctgtcaagcatagttgcctcctgttcctggggtaaacatgtggcagttggtacaggatcaaaatttgatgttgtttgggatgcaaatgagataaaatcaaatgaaattgaagggatggatgtttacagttttcttcacatggtgaaaagctttaccaatggcgaagaagaaaccgatgcttgtttgggtgaagatattgatgatttgctggaagaagaatatatggacttgggcatgtccccacaacataactctggttttgaagctgtctttgaagagaatcctgaagtactgaatggttcaacatccaatggttgggatgtaagttcaaatcagggtgaatcaaaaaccaatgagtggtcaggttgggcaagtagtaacaaagctgaaataaaagatggtagatctgaaattgcccccaagaattcttgggggaaaactgtcaaccaagaagactcttccaagtctaacccttggagtacaagcaccatagcagatcagacaaaaactaaatctaatgaatggtctgcctggggaagtaacaagtctgaaataccagttggttgggcaagtagtaacaaaactgaaataaaagatggtagatctgaaactgcccaagagaattcttgggggaaaactgtcaaccaagaagactcttccaagtctaatgcttggaatacaagcaccacagtagatcatgcaaacactaaatctaatgaatggtctgcctggggaagtaaccagtctgaaataccagctggtggatctaaagcagttcaagaagattcttggggctcaagtaagtggaaggctgatgttgcccaagaagacaattccaggcttggtgcttgggatgcaaatgcagcagatcagacaaaatctagtgaatggtcgggttggggaaagaagaaagatgttacccaagaagacaattccaggcttggtgcttgggatgcaaatgcagcagatcagacaaaatctagagactggtcgggttggggaaagaagaaagatattacccaagaagacaattccaggcttggtgcttgggatgcaaatgcagcagatcagacaaaatctagtgaatggtcgggttggggaaagaagaaagatgttacccaagaagacaattccaggcttggtgcttgggatgcaaatacagcagatcagacaaaatctaatgaatggtcaggttggggaaagaagaaagaagttacccaagaagacaattccaggcttggtgcttgggatgcaaatacagcagatcagacaaaatctaatgaatggtcaggttggggaaagaagaaagaagttacccaagaagacaattccaggtttggtgcttgggatgcaaatgcagaagatcagacaaaatctaatgaatggtcaggttggggaaagaagaaagatgttacccaagaagacaattccaggcttggtgcttgggatgcaaatgcagcagatcagacaaaatctaatgaatggtcagactggggaaagaagaaagaagttacccaagaagacaatgtccaagattcttggggctccggtaagaggaaagacaaagttacccaagaagacaattctgggtctggtggttggggtgccaacagaacagatctggcaaaatccaaatctagtgaatggtccagctggggaaagaacaagtctgaaataccagctggtggatctgaaaatgtgcagaatgactcatggggctcgggtaaattggaagatgatacccaaaaagaaaattctgggtctgcatgggtgagaaataaagctgaaacaatagatggtgggtcagaaaagccccaagaggatgcttggaattctggtaattggaaagctgaatcaaaagtcggcaatgcctcttggggaaaacccaaatcctcagaaagtcaagcatgggattcccataatcagtcaaatcaaaattcaagttcacagggatgggaatcacatattgcttcagctaattcagaaagtgaaaaaggttttcagtggggaaagcaaggtagagactcgtttaagaaaaatcgatttgaaggttcgcaaggccggggttcaaatgctggtgactggaaaaataggaatcgcccacctagagcccctggacagagattggacatttattcatctggtgagcaggatgttctgaaggatattgaacccattatgcagtctatcagacgaatcatgcaacaacaggggtacaatgatggggacccactggctgctgaagatcaactttttgtactggagaatgtctttgagcaccacccagataaagaaaccaaaatgggcactggaattgattatgtcatggttaacaaacacagtagtttccaggaaagtagatgcttttatgtggtttgtaaagatggtgaaagcaaggacttttcctaccggaagtgtttggccaactatataagcaagaagtatcctgaccttgctgaatcattccttggaaaatattttcggaaacctcgtgcacggggggaccagactgcaacaccagggcgggatgaagcagccactccgggcgagcagacagcaacgccaggccgggatgaagcagcaactccggctgagcagatctcaacacccacccctatggaaaccaatgagtagattacagttgtgtccataatattgtacagaaacagtgcagttgaggccactgaatagtttgtcatagctgaccaattttcctgtaggaaagtgttcctctttttggtgaacagttagatggtaatttttttagcatgtgaatgatgatagcaaacacccttgtgcagatgttaatattgttctgatgattacagcacatatgatgtgcctagcaaactttgctcatcattttgtttaatcatcaatggcacctgggtttcagaccttgattggaccactgatgcaaaaatggcatccttgtgattagagtttcatgaatcagattgtggcttatattctgtttaataggttactaagcatttccgagttatatttaaactggtaaaatttctttgatttagttttttcttgtct

SEQ ID NO: 135 - DNA, 6864 bp, Glycine max
  source 1..6864: mol_type = genomic DNA
tcatgttcatttcacactcactcgcttactcactctcagtctcacacactctctctcatttcatttctctccggaaaacctttccccttcgaaaccctctttctctctcgctctttgttgtttcgatcggtttcgcgcaacgaggttctttgcattttctagggttttgcgagctgagcgagacgtttgaattgaacagcttttgtttcgctcctgaggtagaatcaggcactgtaattgaccacgaaagtaatggaggataatcccccttcaagtgttttagatgggaccgttgttgggatcaaatttggtatggctacacgccaggaaatttgtacagcatccattagtgactcttcaattagtcatgctagtcagctgtcaaatccattccttgggctgccccttgagtttggcagatgtgaatcttgtggtacttctgaagttggaaaatgcgaaggtcacttcggatatattgagttgccaattccaatatatcacccaagtcatatcagtgacttgaaacggatgctgagcatggtctgcttaaactgcctaaaattaaggaaaaccaagcttccagcttcaagcagtggtttagcccagagattaatatctccttgttgtcaggaggataaggctgctctagtttctattcgggaagttaaaacaagtgatggggcttgttatctggcgttgaaagtatccaaatccaagatgcaaaatggtttttggagtttcttagaaaaatatggttatcgctatgggggtgatcacactcgagccttgcttccttgtgaggcaatggaaattattaagagaattccgatagagacaaaaaaaaagcttgctggaaaaggatattttcctcaagatggatatgttttgaagtatcttccggtgccaccaaattgcttgtctgtgccagaagtttcagacggtgtcagtgtcatgtcgtcggatccttccataacaattctcagaaaattgctcaggaaggttgaaatcataaaaagctctagatctggtgaaccaaatttcgagtctcatcacgtagaagcaaatgatttgcagtctgtggttgatcaatattttcaaattagaggaacttctaagccagcacgtgatatagagacacattttggggtcaataaagagcttactgcatcctcaacaaaagcatggcttgagaaaatgaggacattatttataagaaagggttcaggtttttcttcccggaatgtaattactggagattgttataagaggataaatgaagtaggaattccggttgaagttgcccaacggataacgtttgaggagagagttaacatccacaacatcagatatttacagaagttggttgatgaacatttgtgcctgacctacaaggaaggtgggtcaacttattcactcagggagggctcaaaggggcacatatatctcaagcctggtcagatagtgcatcggaggattatggatggggatattgtcttcatcaacagaccacctacaacacacaagcactccttacaagccctttatgtttacatccatgaagaccacactgtgaagataaatcctttaatttgtggaccacttggggctgattttgatggtgactgtgtccatctgttttatccgcaatcacttgctgctaaagctgaagttgtggagctattttctgtggagaatcaactgctcagctctcacagtggtaatttgaacctacagttatccacagactcgttgttgtcactgaagatgttggtcaagagatgtttttttgatagagcagcagctaatcaattggcgatgtttattttgcttcctttgcctcggcctgctttgctcaaggccagttctggtgatgcttgttggacttccatccaaattttacagtgtgctttacctttgggttttgattgcactgggggacggtatttgattaggcagagtgagatcttagaatttgaattcagcagggatgttctgcctgcaaccgtaaatgaaatagcagcttcagttttctttggcaagggtcccaaggaggcacttaatttctttgatgtattgcaaccctttttgatggaaagcttatttgcggaagggtttagtgttagcctggaagagttttcaatatccagggcaattaaaaggataataagaaaaagcattggaaaagtttcttctctgctgtatcagctgaggtccttgtacaatgagctggtggcgcagcaactggagaagcacattcgagatgttgaacttcctatcattaattttgctctaaagtcaactaaattaggagatttaattgattcaaagagtaaatctgctattgataaggttgttcagcagattgggtttttagggcagcaactttttgataggggaagattctactcaaagggattggtagatgatgtggcatcacattttcatgcaaagtgttgttatgacggggatggttatccctctgctgagtatggactgctcaaagggtgtttttttaatggtttggatccatacgaagagatggtgcattcgatttcaacaagggaaataatggtgcgttcttcgagaggattatctgaaccaggaacactctttaagaatttgatggccatccttcgggatgttgttatctgttatgatggaactgtcagaaacatttgtagtaattccatcatccagtttgaatacgggatacaagctggagacaaaagtgagcacttattccctgctggtgagcctgtaggtgtgttggctgcaactgctatgtcaaatcctgcttacaaggctgtccttgatgctagtcctagtagcaactcttcatgggagttgatgaaggaaatattactctgcaaggttaattttaggaatgaacttgttgatcggcgtgtcattttgtacttgaatgactgtgattgtggagggagttattgccgagaaaatgcagcatattcagttaaagatcaattgagaaaagtcagtctcaaggatgcagctgtggagttcattattgaataccaacaacagcgaactcaaaaggaaaattctgaaactgatgttggacttgttggtcatatttatttggatgagatgatgttagaggagctgaagatcagcatggcctatgttttcgacaaatgccatgaaagactcaagtcttttagtcagaaaaagaaagttaatcaatctttgaagaacattgaattatcatttagtttatttgttggtctatatcactttctgattatgttccatcttagcagtgagtcttgctcatcttcacatcctgctgcaccatgtttaacattttggctaaagaattatgatagtgatttggataatgctgtaaaggtcctggctgaaaagatctgccctgttctgtttaaaacaataatccaaggagacccgcgcattagctctgcgagtataatctgggttagtccagatacaaacacatgggtccgaaacccttataaatcttctaatggtgaattggcacttgacatcattctcgagaaggaagctgtcaagcagagtggcgatgcttggagagttgtacttgatgcctgccttcctgttcttcacttgattgataccaggcgttccatcccttacgctattaagcagattcaggaattactggggatatcatgtacttttgatcaagcgattcagcgtgttgcagcatctgtgaaaatggtggcgaaaggtgtacttagggagcatctaattctgttagctagtagtatgacttgtggtgggaacttggttggctttaatataggtggatataaagctctgtctcgtcaattaaatatacaagtaccattcacagatgcaacactctttacacctaaaaagtgttttgagagagctgctgagaaatgccatactgattctctgtcaagcatagttgcctcctgttcctggggtaaacatgtggcagttggtacaggatcaaaatttgatgttgtttgggatgcaaatgagataaaatcaaatgaaattgaagggatggatgtttacagttttcttcacatggtgaaaagctttaccaatggcgaagaagaaaccgatgcttgtttgggtgaagatattgatgatttgctggaagaagaatatatggacttgggcatgtccccacaacataactctggttttgaagctgtctttgaagagaatcctgaagtactgaatggttcaacatccaatggttgggatgtaagttcaaatcagggtgaatcaaaaaccaatgagtggtcaggttgggcaagtagtaacaaagctgaaataaaagatggtagatctgaaattgcccccaagaattcttgggggaaaactgtcaaccaagaagactcttccaagtctaacccttggagtacaagcaccatagcagatcagacaaaaactaaatctaatgaatggtctgcctggggaagtaacaagtctgaaataccagttggttgggcaagtagtaacaaaactgaaataaaagatggtagatctgaaactgcccaagagaattcttgggggaaaactgtcaaccaagaagactcttccaagtctaatgcttggaatacaagcaccacagtagatcatgcaaacactaaatctaatgaatggtctgcctggggaagtaaccagtctgaaataccagctggtggatctaaagcagttcaagaagattcttggggctcaagtaagtggaaggctgatgttgcccaagaagacaattccaggcttggtgcttgggatgcaaatgcagcagatcagacaaaatctagtgaatggtcgggttggggaaagaagaaagatgttacccaagaagacaattccaggcttggtgcttgggatgcaaatgcagcagatcagacaaaatctagagactggtcgggttggggaaagaagaaagatattacccaagaagacaattccaggcttggtgcttgggatgcaaatgcagcagatcagacaaaatctagtgaatggtcgggttggggaaagaagaaagatgttacccaagaagacaattccaggcttggtgcttgggatgcaaatacagcagatcagacaaaatctaatgaatggtcaggttggggaaagaagaaagaagttacccaagaagacaattccaggcttggtgcttgggatgcaaatacagcagatcagacaaaatctaatgaatggtcaggttggggaaagaagaaagaagttacccaagaagacaattccaggcttggtgcttgggatgcaaatgcagcagatcagacaaaatctaatgaatggtcagactggggaaagaagaaagaagttacccaagaagacaatgtccaagattcttggggctccggtaagaggaaagacaaagttacccaagaagacaattctgggtctggtggttggggtgccaacagaacagatctggcaaaatccaaatctagtgaatggtccagctggggaaagaacaagtctgaaataccagctggtggatctgaaaatgtgcagaatgactcatggggctcgggtaaattggaagatgatacccaaaaagaaaattctgggtctgcatgggtgagaaataaagctgaaacaatagatggtgggtcagaaaagccccaagaggatgcttggaattctggtaattggaaagctgaatcaaaagtcggcaatgcctcttggggaaaacccaaatcctcagaaagtcaagcatgggattcccataatcagtcaaatcaaaattcaagttcacagggatgggaatcacatattgcttcagctaattcagaaagtgaaaaaggttttcagtggggaaagcaaggtagagactcgtttaagaaaaatcgatttgaaggttcgcaaggccggggttcaaatgctggtgactggaaaaataggaatcgcccacctagagcccctggacagagattggacatttattcatctggtgagcaggatgttctgaaggatattgaacccattatgcagtctatcagacgaatcatgcaacaacaggggtacaatgatggggacccactggctgctgaagatcaactttttgtactggagaatgtctttgagcaccacccagataaagaaaccaaaatgggcactggaattgattatgtcatggttaacaaacacagtagtttccaggaaagtagatgcttttatgtggtttgtaaagatggtgaaagcaaggacttttcctaccggaagtgtttggccaactatataagcaagaagtatcctgaccttgctgaatcattccttggaaaatattttcggaaacctcgtgcacggggggaccagactgcaacaccagggcgggatgaagcagccactccgggcgagcagacagcaacgccaggccgggatgaagcagcaactccggctgagcagatctcaacacccacccctatggaaaccaatgagtagattacagttgtgtccataatattgtacagaaacagtgcagttgaggccactgaatagtttgtcatagctgaccaattttcctgtaggaaagtgttcctctttttggtgaacagttagatggtaatttttttagcatgtgaatgatgatagcaaacacccttgtgcagatgttaatattgttctgatgattacagcacatatgatgtgcctagcaaactttgctcatcattttgtttaatcatcaatggcacctgggtttcagaccttgattggaccactgatgcaaaaatggcatccttgtgattagagtttcatgaatcagattgtggcttatattctgtttaataggttactaagcatttccgagttatatttaaactggtaaaatttctttgatttagttttttcttgtct

SEQ ID NO: 136 - DNA, 6834 bp, Glycine max
  source 1..6834: mol_type = genomic DNA
aaaaaagaagtaaaatttcatttcatgttcatgttcatttcacactcactcgcttactcactctcagtctcacacactctctctcatttcatttctctccggaaaacctttccccttcgaaaccctctttctctctcgctctttgttgtttcgatcggtttcgcgcaacgaggttctttgcattttctagggttttgcgagctgagcgagacgtttgaattgaacagcttttgtttcgctcctgaggcactgtaattgaccacgaaagtaatggaggataatcccccttcaagtgttttagatgggaccgttgttgggatcaaatttggtatggctacacgccaggaaatttgtacagcatccattagtgactcttcaattagtcatgctagtcagctgtcaaatccattccttgggctgccccttgagtttggcagatgtgaatcttgtggtacttctgaagttggaaaatgcgaaggtcacttcggatatattgagttgccaattccaatatatcacccaagtcatatcagtgacttgaaacggatgctgagcatggtctgcttaaactgcctaaaattaaggaaaaccaagcttccagcttcaagcagtggtttagcccagagattaatatctccttgttgtcaggaggataaggctgctctagtttctattcgggaagttaaaacaagtgatggggcttgttatctggcgttgaaagtatccaaatccaagatgcaaaatggtttttggagtttcttagaaaaatatggttatcgctatgggggtgatcacactcgagccttgcttccttgtgaggcaatggaaattattaagagaattccgatagagacaaaaaaaaagcttgctggaaaaggatattttcctcaagatggatatgttttgaagtatcttccggtgccaccaaattgcttgtctgtgccagaagtttcagacggtgtcagtgtcatgtcgtcggatccttccataacaattctcagaaaattgctcaggaaggttgaaatcataaaaagctctagatctggtgaaccaaatttcgagtctcatcacgtagaagcaaatgatttgcagtctgtggttgatcaatattttcaaattagaggaacttctaagccagcacgtgatatagagacacattttggggtcaataaagagcttactgcatcctcaacaaaagcatggcttgagaaaatgaggacattatttataagaaagggttcaggtttttcttcccggaatgtaattactggagattgttataagaggataaatgaagtaggaattccggttgaagttgcccaacggataacgtttgaggagagagttaacatccacaacatcagatatttacagaagttggttgatgaacatttgtgcctgacctacaaggaaggtgggtcaacttattcactcagggagggctcaaaggggcacatatatctcaagcctggtcagatagtgcatcggaggattatggatggggatattgtcttcatcaacagaccacctacaacacacaagcactccttacaagccctttatgtttacatccatgaagaccacactgtgaagataaatcctttaatttgtggaccacttggggctgattttgatggtgactgtgtccatctgttttatccgcaatcacttgctgctaaagctgaagttgtggagctattttctgtggagaatcaactgctcagctctcacagtggtaatttgaacctacagttatccacagactcgttgttgtcactgaagatgttggtcaagagatgtttttttgatagagcagcagctaatcaattggcgatgtttattttgcttcctttgcctcggcctgctttgctcaaggccagttctggtgatgcttgttggacttccatccaaattttacagtgtgctttacctttgggttttgattgcactgggggacggtatttgattaggcagagtgagatcttagaatttgaattcagcagggatgttctgcctgcaaccgtaaatgaaatagcagcttcagttttctttggcaagggtcccaaggaggcacttaatttctttgatgtattgcaaccctttttgatggaaagcttatttgcggaagggtttagtgttagcctggaagagttttcaatatccagggcaattaaaaggataataagaaaaagcattggaaaagtttcttctctgctgtatcagctgaggtccttgtacaatgagctggtggcgcagcaactggagaagcacattcgagatgttgaacttcctatcattaattttgctctaaagtcaactaaattaggagatttaattgattcaaagagtaaatctgctattgataaggttgttcagcagattgggtttttagggcagcaactttttgataggggaagattctactcaaagggattggtagatgatgtggcatcacattttcatgcaaagtgttgttatgacggggatggttatccctctgctgagtatggactgctcaaagggtgtttttttaatggtttggatccatacgaagagatggtgcattcgatttcaacaagggaaataatggtgcgttcttcgagaggattatctgaaccaggaacactctttaagaatttgatggccatccttcgggatgttgttatctgttatgatggaactgtcagaaacatttgtagtaattccatcatccagtttgaatacgggatacaagctggagacaaaagtgagcacttattccctgctggtgagcctgtaggtgtgttggctgcaactgctatgtcaaatcctgcttacaaggctgtccttgatgctagtcctagtagcaactcttcatgggagttgatgaaggaaatattactctgcaaggttaattttaggaatgaacttgttgatcggcgtgtcattttgtacttgaatgactgtgattgtggagggagttattgccgagaaaatgcagcatattcagttaaagatcaattgagaaaagtcagtctcaaggatgcagctgtggagttcattattgaataccaacaacagcgaactcaaaaggaaaattctgaaactgatgttggacttgttggtcatatttatttggatgagatgatgttagaggagctgaagatcagcatggcctatgttttcgacaaatgccatgaaagactcaagtcttttagtcagaaaaagaaagttaatcaatctttgaagaacattgaattatcatttagtgagtcttgctcatcttcacatcctgctgcaccatgtttaacattttggctaaagaattatgatagtgatttggataatgctgtaaaggtcctggctgaaaagatctgccctgttctgtttaaaacaataatccaaggagacccgcgcattagctctgcgagtataatctgggttagtccagatacaaacacatgggtccgaaacccttataaatcttctaatggtgaattggcacttgacatcattctcgagaaggaagctgtcaagcagagtggcgatgcttggagagttgtacttgatgcctgccttcctgttcttcacttgattgataccaggcgttccatcccttacgctattaagcagattcaggaattactggggatatcatgtacttttgatcaagcgattcagcgtgttgcagcatctgtgaaaatggtggcgaaaggtgtacttagggagcatctaattctgttagctagtagtatgacttgtggtgggaacttggttggctttaatataggtggatataaagctctgtctcgtcaattaaatatacaagtaccattcacagatgcaacactctttacacctaaaaagtgttttgagagagctgctgagaaatgccatactgattctctgtcaagcatagttgcctcctgttcctggggtaaacatgtggcagttggtacaggatcaaaatttgatgttgtttgggatgcaaatgagataaaatcaaatgaaattgaagggatggatgtttacagttttcttcacatggtgaaaagctttaccaatggcgaagaagaaaccgatgcttgtttgggtgaagatattgatgatttgctggaagaagaatatatggacttgggcatgtccccacaacataactctggttttgaagctgtctttgaagagaatcctgaagtactgaatggttcaacatccaatggttgggatgtaagttcaaatcagggtgaatcaaaaaccaatgagtggtcaggttgggcaagtagtaacaaagctgaaataaaagatggtagatctgaaattgcccccaagaattcttgggggaaaactgtcaaccaagaagactcttccaagtctaacccttggagtacaagcaccatagcagatcagacaaaaactaaatctaatgaatggtctgcctggggaagtaacaagtctgaaataccagttggttgggcaagtagtaacaaaactgaaataaaagatggtagatctgaaactgcccaagagaattcttgggggaaaactgtcaaccaagaagactcttccaagtctaatgcttggaatacaagcaccacagtagatcatgcaaacactaaatctaatgaatggtctgcctggggaagtaaccagtctgaaataccagctggtggatctaaagcagttcaagaagattcttggggctcaagtaagtggaaggctgatgttgcccaagaagacaattccaggcttggtgcttgggatgcaaatgcagcagatcagacaaaatctagtgaatggtcgggttggggaaagaagaaagatgttacccaagaagacaattccaggcttggtgcttgggatgcaaatgcagcagatcagacaaaatctagagactggtcgggttggggaaagaagaaagatattacccaagaagacaattccaggcttggtgcttgggatgcaaatgcagcagatcagacaaaatctagtgaatggtcgggttggggaaagaagaaagatgttacccaagaagacaattccaggcttggtgcttgggatgcaaatacagcagatcagacaaaatctaatgaatggtcaggttggggaaagaagaaagaagttacccaagaagacaattccaggcttggtgcttgggatgcaaatacagcagatcagacaaaatctaatgaatggtcaggttggggaaagaagaaagaagttacccaagaagacaattccaggcttggtgcttgggatgcaaatgcagcagatcagacaaaatctaatgaatggtcagactggggaaagaagaaagaagttacccaagaagacaatgtccaagattcttggggctccggtaagaggaaagacaaagttacccaagaagacaattctgggtctggtggttggggtgccaacagaacagatctggcaaaatccaaatctagtgaatggtccagctggggaaagaacaagtctgaaataccagctggtggatctgaaaatgtgcagaatgactcatggggctcgggtaaattggaagatgatacccaaaaagaaaattctgggtctgcatgggtgagaaataaagctgaaacaatagatggtgggtcagaaaagccccaagaggatgcttggaattctggtaattggaaagctgaatcaaaagtcggcaatgcctcttggggaaaacccaaatcctcagaaagtcaagcatgggattcccataatcagtcaaatcaaaattcaagttcacagggatgggaatcacatattgcttcagctaattcagaaagtgaaaaaggttttcagtggggaaagcaaggtagagactcgtttaagaaaaatcgatttgaaggttcgcaaggccggggttcaaatgctggtgactggaaaaataggaatcgcccacctagagcccctggacagagattggacatttattcatctggtgagcaggatgttctgaaggatattgaacccattatgcagtctatcagacgaatcatgcaacaacaggggtacaatgatggggacccactggctgctgaagatcaactttttgtactggagaatgtctttgagcaccacccagataaagaaaccaaaatgggcactggaattgattatgtcatggttaacaaacacagtagtttccaggaaagtagatgcttttatgtggtttgtaaagatggtgaaagcaaggacttttcctaccggaagtgtttggccaactatataagcaagaagtatcctgaccttgctgaatcattccttggaaaatattttcggaaacctcgtgcacggggggaccagactgcaacaccagggcgggatgaagcagccactccgggcgagcagacagcaacgccaggccgggatgaagcagcaactccggctgagcagatctcaacacccacccctatggaaaccaatgagtagattacagttgtgtccataatattgtacagaaacagtgcagttgaggccactgaatagtttgtcatagctgaccaattttcctgtaggaaagtgttcctctttttggtgaacagttagatggtaatttttttagcatgtgaatgatgatagcaaacacccttgtgcagatgttaatattgttctgatgattacagcacatatgatgtgcctagcaaactttgctcatcattttgtttaatcatcaatggcacctgggtttcagaccttgattggaccactgatgcaaaaatggcatccttgtgattagagtttcatgaatcagattgtggcttatattctgtttaataggttactaagcatttccgagttatatttaaactggtaaaatttctttgatttagttttttcttgtct

SEQ ID NO: 137 - DNA, 6844 bp, Glycine max
  source 1..6844: mol_type = genomic DNA
aaaaaagaagtaaaatttcatttcatgttcatgttcatttcacactcactcgcttactcactctcagtctcacacactctctctcatttcatttctctccggaaaacctttccccttcgaaaccctctttctctctcgctctttgttgtttcgatcggtttcgcgcaacgaggttctttgcattttctagggttttgcgagctgagcgagacgtttgaattgaacagcttttgtttcgctcctgaggtagaatcaggcactgtaattgaccacgaaagtaatggaggataatcccccttcaagtgttttagatgggaccgttgttgggatcaaatttggtatggctacacgccaggaaatttgtacagcatccattagtgactcttcaattagtcatgctagtcagctgtcaaatccattccttgggctgccccttgagtttggcagatgtgaatcttgtggtacttctgaagttggaaaatgcgaaggtcacttcggatatattgagttgccaattccaatatatcacccaagtcatatcagtgacttgaaacggatgctgagcatggtctgcttaaactgcctaaaattaaggaaaaccaagcttccagcttcaagcagtggtttagcccagagattaatatctccttgttgtcaggaggataaggctgctctagtttctattcgggaagttaaaacaagtgatggggcttgttatctggcgttgaaagtatccaaatccaagatgcaaaatggtttttggagtttcttagaaaaatatggttatcgctatgggggtgatcacactcgagccttgcttccttgtgaggcaatggaaattattaagagaattccgatagagacaaaaaaaaagcttgctggaaaaggatattttcctcaagatggatatgttttgaagtatcttccggtgccaccaaattgcttgtctgtgccagaagtttcagacggtgtcagtgtcatgtcgtcggatccttccataacaattctcagaaaattgctcaggaaggttgaaatcataaaaagctctagatctggtgaaccaaatttcgagtctcatcacgtagaagcaaatgatttgcagtctgtggttgatcaatattttcaaattagaggaacttctaagccagcacgtgatatagagacacattttggggtcaataaagagcttactgcatcctcaacaaaagcatggcttgagaaaatgaggacattatttataagaaagggttcaggtttttcttcccggaatgtaattactggagattgttataagaggataaatgaagtaggaattccggttgaagttgcccaacggataacgtttgaggagagagttaacatccacaacatcagatatttacagaagttggttgatgaacatttgtgcctgacctacaaggaaggtgggtcaacttattcactcagggagggctcaaaggggcacatatatctcaagcctggtcagatagtgcatcggaggattatggatggggatattgtcttcatcaacagaccacctacaacacacaagcactccttacaagccctttatgtttacatccatgaagaccacactgtgaagataaatcctttaatttgtggaccacttggggctgattttgatggtgactgtgtccatctgttttatccgcaatcacttgctgctaaagctgaagttgtggagctattttctgtggagaatcaactgctcagctctcacagtggtaatttgaacctacagttatccacagactcgttgttgtcactgaagatgttggtcaagagatgtttttttgatagagcagcagctaatcaattggcgatgtttattttgcttcctttgcctcggcctgctttgctcaaggccagttctggtgatgcttgttggacttccatccaaattttacagtgtgctttacctttgggttttgattgcactgggggacggtatttgattaggcagagtgagatcttagaatttgaattcagcagggatgttctgcctgcaaccgtaaatgaaatagcagcttcagttttctttggcaagggtcccaaggaggcacttaatttctttgatgtattgcaaccctttttgatggaaagcttatttgcggaagggtttagtgttagcctggaagagttttcaatatccagggcaattaaaaggataataagaaaaagcattggaaaagtttcttctctgctgtatcagctgaggtccttgtacaatgagctggtggcgcagcaactggagaagcacattcgagatgttgaacttcctatcattaattttgctctaaagtcaactaaattaggagatttaattgattcaaagagtaaatctgctattgataaggttgttcagcagattgggtttttagggcagcaactttttgataggggaagattctactcaaagggattggtagatgatgtggcatcacattttcatgcaaagtgttgttatgacggggatggttatccctctgctgagtatggactgctcaaagggtgtttttttaatggtttggatccatacgaagagatggtgcattcgatttcaacaagggaaataatggtgcgttcttcgagaggattatctgaaccaggaacactctttaagaatttgatggccatccttcgggatgttgttatctgttatgatggaactgtcagaaacatttgtagtaattccatcatccagtttgaatacgggatacaagctggagacaaaagtgagcacttattccctgctggtgagcctgtaggtgtgttggctgcaactgctatgtcaaatcctgcttacaaggctgtccttgatgctagtcctagtagcaactcttcatgggagttgatgaaggaaatattactctgcaaggttaattttaggaatgaacttgttgatcggcgtgtcattttgtacttgaatgactgtgattgtggagggagttattgccgagaaaatgcagcatattcagttaaagatcaattgagaaaagtcagtctcaaggatgcagctgtggagttcattattgaataccaacaacagcgaactcaaaaggaaaattctgaaactgatgttggacttgttggtcatatttatttggatgagatgatgttagaggagctgaagatcagcatggcctatgttttcgacaaatgccatgaaagactcaagtcttttagtcagaaaaagaaagttaatcaatctttgaagaacattgaattatcatttagtgagtcttgctcatcttcacatcctgctgcaccatgtttaacattttggctaaagaattatgatagtgatttggataatgctgtaaaggtcctggctgaaaagatctgccctgttctgtttaaaacaataatccaaggagacccgcgcattagctctgcgagtataatctgggttagtccagatacaaacacatgggtccgaaacccttataaatcttctaatggtgaattggcacttgacatcattctcgagaaggaagctgtcaagcagagtggcgatgcttggagagttgtacttgatgcctgccttcctgttcttcacttgattgataccaggcgttccatcccttacgctattaagcagattcaggaattactggggatatcatgtacttttgatcaagcgattcagcgtgttgcagcatctgtgaaaatggtggcgaaaggtgtacttagggagcatctaattctgttagctagtagtatgacttgtggtgggaacttggttggctttaatataggtggatataaagctctgtctcgtcaattaaatatacaagtaccattcacagatgcaacactctttacacctaaaaagtgttttgagagagctgctgagaaatgccatactgattctctgtcaagcatagttgcctcctgttcctggggtaaacatgtggcagttggtacaggatcaaaatttgatgttgtttgggatgcaaatgagataaaatcaaatgaaattgaagggatggatgtttacagttttcttcacatggtgaaaagctttaccaatggcgaagaagaaaccgatgcttgtttgggtgaagatattgatgatttgctggaagaagaatatatggacttgggcatgtccccacaacataactctggttttgaagctgtctttgaagagaatcctgaagtactgaatggttcaacatccaatggttgggatgtaagttcaaatcagggtgaatcaaaaaccaatgagtggtcaggttgggcaagtagtaacaaagctgaaataaaagatggtagatctgaaattgcccccaagaattcttgggggaaaactgtcaaccaagaagactcttccaagtctaacccttggagtacaagcaccatagcagatcagacaaaaactaaatctaatgaatggtctgcctggggaagtaacaagtctgaaataccagttggttgggcaagtagtaacaaaactgaaataaaagatggtagatctgaaactgcccaagagaattcttgggggaaaactgtcaaccaagaagactcttccaagtctaatgcttggaatacaagcaccacagtagatcatgcaaacactaaatctaatgaatggtctgcctggggaagtaaccagtctgaaataccagctggtggatctaaagcagttcaagaagattcttggggctcaagtaagtggaaggctgatgttgcccaagaagacaattccaggcttggtgcttgggatgcaaatgcagcagatcagacaaaatctagtgaatggtcgggttggggaaagaagaaagatgttacccaagaagacaattccaggcttggtgcttgggatgcaaatgcagcagatcagacaaaatctagagactggtcgggttggggaaagaagaaagatattacccaagaagacaattccaggcttggtgcttgggatgcaaatgcagcagatcagacaaaatctagtgaatggtcgggttggggaaagaagaaagatgttacccaagaagacaattccaggcttggtgcttgggatgcaaatacagcagatcagacaaaatctaatgaatggtcaggttggggaaagaagaaagaagttacccaagaagacaattccaggcttggtgcttgggatgcaaatacagcagatcagacaaaatctaatgaatggtcaggttggggaaagaagaaagaagttacccaagaagacaattccaggcttggtgcttgggatgcaaatgcagcagatcagacaaaatctaatgaatggtcagactggggaaagaagaaagaagttacccaagaagacaatgtccaagattcttggggctccggtaagaggaaagacaaagttacccaagaagacaattctgggtctggtggttggggtgccaacagaacagatctggcaaaatccaaatctagtgaatggtccagctggggaaagaacaagtctgaaataccagctggtggatctgaaaatgtgcagaatgactcatggggctcgggtaaattggaagatgatacccaaaaagaaaattctgggtctgcatgggtgagaaataaagctgaaacaatagatggtgggtcagaaaagccccaagaggatgcttggaattctggtaattggaaagctgaatcaaaagtcggcaatgcctcttggggaaaacccaaatcctcagaaagtcaagcatgggattcccataatcagtcaaatcaaaattcaagttcacagggatgggaatcacatattgcttcagctaattcagaaagtgaaaaaggttttcagtggggaaagcaaggtagagactcgtttaagaaaaatcgatttgaaggttcgcaaggccggggttcaaatgctggtgactggaaaaataggaatcgcccacctagagcccctggacagagattggacatttattcatctggtgagcaggatgttctgaaggatattgaacccattatgcagtctatcagacgaatcatgcaacaacaggggtacaatgatggggacccactggctgctgaagatcaactttttgtactggagaatgtctttgagcaccacccagataaagaaaccaaaatgggcactggaattgattatgtcatggttaacaaacacagtagtttccaggaaagtagatgcttttatgtggtttgtaaagatggtgaaagcaaggacttttcctaccggaagtgtttggccaactatataagcaagaagtatcctgaccttgctgaatcattccttggaaaatattttcggaaacctcgtgcacggggggaccagactgcaacaccagggcgggatgaagcagccactccgggcgagcagacagcaacgccaggccgggatgaagcagcaactccggctgagcagatctcaacacccacccctatggaaaccaatgagtagattacagttgtgtccataatattgtacagaaacagtgcagttgaggccactgaatagtttgtcatagctgaccaattttcctgtaggaaagtgttcctctttttggtgaacagttagatggtaatttttttagcatgtgaatgatgatagcaaacacccttgtgcagatgttaatattgttctgatgattacagcacatatgatgtgcctagcaaactttgctcatcattttgtttaatcatcaatggcacctgggtttcagaccttgattggaccactgatgcaaaaatggcatccttgtgattagagtttcatgaatcagattgtggcttatattctgtttaataggttactaagcatttccgagttatatttaaactggtaaaatttctttgatttagttttttcttgtct

SEQ ID NO: 138 - DNA, 5601 bp, Glycine max
  source 1..5601: mol_type = genomic DNA
atgcactaagtaatccaaaatcctatgaaggtggaagggaaattccaaaatgcaatgaccattttgatttccatgtaagttttgtaaccaaagcttttgcaattttccttttctaattttcaaatttgctaaaatttcagtttgagggttcatgagcggcaaacaaacaaaaaaccctccctccctccctcccaaaatttgggtccctcccgccaaagaaaatggtccaatcttaaataggtgtgtagaggtaaccctaaattcaaaatatgcccgtgcaacccatttcctctgaaaccctaaactgaggttctttgctcagtgctagccctaatttgttcaggcagatggagcagtagcaagagggtggtgacagaggtttttcccggagacgcagactgagtagtagccgcaaagcccggaacacgccgtgaaggtagcgcgacaactgcgactgcctctattttcatttctgtttctttcgactcgcaggggatcgccgatctcactatcgagcgagcgcggaagatcgtggaagacatgggttccgcttctcttctgaatccttctcaaccaggcgttaagaagaacagcaagagcaaacagaaatctgttgtttccaaaaccgaagagaaagttatggttaaagataaacaaaagaagcggagtttgttggagagcagtgagcagcctgctgctacacgcaaaatgccaaaacgtgctgcagcgtgtaaaaatttgaaggagaaatcctttttgatatctgagaagtcctgcctcattgaaatggagaaagatcagattgtagaagaagaaagtctagctgtccgcatgacagctggacaggatgatggtcgtccaaataggcgcatcacggagttcattcttcatgatgcaactggtaaagcccagccacttgaggtgctggaggttaatgaattatttatcactggacttatattgccgcttgaagtcagcacaggcaagaaaaaagagaaaggtgttaagtgtgaaggctttggtcgagtggaatcatgggatatatctggctatgaagatggctctccagtgatatggctttctactgatattgctgattatgattgccagaaacctgctgctagttacaaaaaagtttatgatcttttccttgaaaaggcccgtgcatgtatcgaagtatacctgaaacttgcgaagtcctctgggggtgaccctgatatcagtcttgatgagttacttgctggcatggtgcggtctatgagtggtagcaaatgcttttctggaactgcatctataaaggattttgttatttctcatggtgagttcatttataagcaactaattggtttggacatgacatccaaggccaatgacaggacgtttgcagatatccctgctcttattgctcttagagatgagagtaagaaacaagcaaactatgtacatgcacaagtaatgccctcaaatgggagtttaaggattgattcaggagttggagatgaagaaaacaagaatcagatggattcagtagcttctgtaaacgaggaagatgaggatgcaaagctggcacgactgttgcaggaagaagagtattggcaatctatgaagcagaagaaaaactctagaccaacctctgtatcgaacaaatactatataaaaattaatgaagatgagattgccaatgattatcctctacctgcttattataaaacctcccttcaagaaacagatgagtttatagtctttgataatgactatgacatatatgacactcaagatctccctcgaagcatgctgcataattggtctttatacaactcagatgcaagattggtttccttggaacttctgcctatgaaaccttgttcagatattgatgttgcaatctttggatcaggtataatgacttcagatgatgggagtgggtttcatcttgatactgaggctggccaatcttcttctgttggttctggagcccaggttgctgatggaatgccaatttatctgagtgccataaaggaatggatgattgaatttggatcagctatgattttcatatccatccgaactgatttggcctggtatagacttggcaaaccagcaaagcagtatgctccttggtatgacacagtattgaaaactgcaaggcttgctataagcattatcaccttgctgaaggagcagagccgagtatcacgcctttcctttggagatgtcatcaggaaagtatctgagtttaatcagaaagatggttcttacatttcttctgatccattgactgttgagagatatgttgttgtccatggacagataattctgcaactgtttgcagaatttcctgatgataatatcagaaagtcttcatttgtgactggtcttacaaataaaatggaagagcgccaccataccaaatggttagtgaagaagaagaaagttgtgccaaggagtgaaccaaatttaaatcctagagcagcagtgggtcctgttgtatccaagaggaaagctatgcaagctacaacgacaaggctgatcaatagaatatggggagagtattactcaaaccacttgccagaagattcaaaagagggaattgctagtgagttaaaggatgaggatgaagtggaggaacaagaagaaaatgaagatgatgataatgaggaggaaacaatacttttggagggaactccaaaggcacattcagcttcaaagcaaaccaaaaaaatttctgctgacacagaaataagatgggaaggggaacctgaagggaagactagttctggatatcctgtttataaacaggcaattattcgtggtgaagttatttctgtaggaagatctgtgttggtggaagttgacgaaacagatgaatttccagatatatattatgttgaatatatgtttgaatcaaagattggaagaaaaatgttccatggtaggatgatgcaatgtggttgtcagactgttcttggcaatgctgctaatgagagagaggtgtttttgactaatgagtgcagggatttgggactgcatgatgtcaaacagacagttgttgtaaatatccaaaataggccttgggggcatcagcatcgaaaggataatatcattgcagatagagttgacaggactcaagcagaagaaaggaagaagaaaggactacctactgactattactgtaaaagcttgtactggcctgaaagaggtgctttcttcacccttccacatgatacattgggtctagggtctggtgtctgcccatcttgcaaaatacaggatgctgaaaaggagaaggatgttttcaaagtaaattcctccaagtctggtttcctatttaatggaactgagtattctcttgatgattatgtttatgtaagtccttttgaatttgaggaaaagatagagcaaggaactcataaaagtgggaggaatgtggggttgaaagcttatgttgtgtgccaagtgcttgagattgttgtcaaaaaggaaataaaacaagctgaaataaaatctacacaagtcaaaatcaggaggttcttccgaccagaagatttatcaaatgagaaggcatattgctctgatatacgagaggtgtattacagtgatgaaacatatataatctctgtagaatccatagaagggaaatgtcaagtcagaaaaaagaatgatattcccgaatgcagtgctcttggtggaatcttccaaaatgtttttttctgcgagctcttgtatgatcctgccactgggtcactgaagaagttgccggctcatataaaagtaaaatattcaagtggacaaacatctgatgctgcagctagaaagaggaaaggaaaatgtatagagggagatggtgtttcagagtccacaaaggaaggaaaaacattaaatgataaacgtttagcaaccttggacatttttgcaggctgtggtggcttatcagaggggttgcagcagtcaggagtttcatcaactaaatgggctattgagtatgaagaaccagccggggatgcatttaaagctaatcatcctgaggcattggtgttcattaacaattgcaatgttattcttagggctgtaatggagaagtgtggggacacagatgattgtatctcaacatctgaggctgcagaattggctgcaaagcttgatgagaaggaaataagtagtttaccaatgcctggacaagttgatttcattaatggtggtcctccatgccagggtttctctgggatgaataggtttaaccagagcagttggagtaaagtccagtgtgagatgatattggcattcttatcctttgctgattatttccggccaaggtatttcttgttggagaatgtgaggaactttgtgtctttcaataaaggacagacattccgtttaactttggcttcacttcttgagatgggttatcaggtgaggtttggtatccttgaggctggagcatttggggtttctcagtcaagaaaaagggcattcatatgggctgcttctcctgaggatgtgcttcctgaatggccagaaccagtgcacgtcttttcggcccctgagttgaagatcacattatcagaaaatgtccagtatgctgctgtccgcagtactgcaaatggtgctcctttacgtgcaataactgttcgagatactattggtgatctcccagctgttggcaatggagcctcaaaaggaaacatggagtatcaaaatgatccagtctcatggtttcaaaagaagattcgaggtgatatggttgtcttgactgatcatatatcaaaggagatgaacgaattgaacttgattcgatgccagaaaattcccaagagaccaggtgctgattggcgtgaccttccagaagaaaagataaaactgtctagtggacaagttgttgatttgataccatggtgcttgccaaacacggctaagcggcacaatcaatggaagggactgtttggcaggttggattggcaaggaaatttcccaacttccgttacagaccctcagccaatggggaaggttggaatgtgcttccaccctgaccaagataggattcttactgttcgtgaatgtgctcggtctcaaggcttcccagatagctatgaatttgctggcaatatcatacacaagcaccggcagattggtaatgctgtgcctcctcctctagcatcagcattggggagaaagctcaaggaagcagtggacagtaagagctccacttagaagatgggccttctacattaggtcatgcttattgtattcataacagtcaccaagatattgcaaatcatcattccgggttccaaaaactagaaacccttgtatatagtgatatccattggtcatttgttgaggctaattccttgtttaactttcctcaaccaaggaattgaatggatgatgctcattttctatcaactaggattttcttgattagatggtattttggctgtttatgaaagaaatggttgggaattgattacctcccaatgtgtagttgaaaattgagaccaattttttttaacctgttatgaatatttgttgttgcaactatttggctaagaactaccaaaaaaaactatttacctaggaaacttgcataatatttaatcgagg

SEQ ID NO: 139 - DNA, 5375 bp, Glycine max
  source 1..5375: mol_type = genomic DNA
atttttaaattcctaaaatttcagtttgaggggcgggaaaaaaaaaaattctctcttccaaaatttgcgtccctcccgccaaagaaaatggtccaatcttatatagttgtgtggaggtaaccctaaattcaaaatatgcccctgcaacccaaatcttctgaaatcctaaactaagtttctgtgctaagtgctaaccctaattcgttatggcagatggagcggtagcaagagggaggtgacggacgcttttcggagacgcaaattgaggagtagccgcaaagcccagaaaacgccctgaaccctaattcgtggaagacatgggttcagcttctcttctaaatccttctcaaccaggcgttaagaagaatgacaagagcaaacagaaatcggtcgtttccaaaactgaagaggaagttatgtttaaagataaacaaaagaaacggagtttgtcggagagcagtgagcagactgctgctatgcgcaaaatgccaaaacgtgctgcggcatgtaaaaatttgaaggagaaatcctttttgatatatgagaagtcctgcctcattgaaacagagaaggatcatattgtagaagaagaaagtctggctgtccgcatgacagctggacaggataatggttgtccaaataggcgcattacagagtttatccttcatgatgaaactggtaaatcccagccacttgaggtgctggaggttgatgatttgtttatcactggacttgtattgccacttgaagccagctctggcaagaaaaaagagaaaggtgttaagtgtgaaggctttggtcgaattgaatcatgggatatatctggttatgaagatggctctccagtgatatggctttctactgaagttgctgattatgattgccagaaacctgctgctagttacaaaaaagtttacgatcttttccttgaaaaggcccgtgcatgtgtagaagtatacaagaaacttgcaaagtcctctggtggtgaccctgatataagtcttgatgagttacttgctggcatggtgcggtctatgagtggtagcaaatgcttttctggagctgcatctataaaggattttgttatttcacagggtgagttcatttataagcaacttgttggtttggatatgacatccaaggcaaatgacaggatgtttgcagatattcctgctcttattgctcttagagatgagagtaagaaacaagtacatgcacaggtaatgccctcaaatgggagtttaaggattgattcaggagttggagatgaagaaaacaagaatcagatggattcagtagcttctgtaaacgaggaagatgaggatgcaaagctggcacggctgttgcaggaagaagagtattggcaatctatgaaccagaagaaaaactccagatcagcctctgcatcgaacaaatactatatcaaaattaatgaagatgagattgccaatgattatcctctacctgtttattataaaacctcccttcaagaaacagatgagtttatagtttttgataatgactatgacatatatgacactcaagatctccctcgaagcatgctgcataattggtctttatacaactcagatgcaagattggtttccttggaacttctgcctatgaaaccttgttcagatatcgatgttgcaatctttggatcaggtataatgacttcagatgatggaagtgggtttcatcttgatactgaggctggcaaatcttcttccgttggttctggagcacaggttgctgatggaatgccaatttatctgagtgccataaaggaatggatgattgaatttggatcatctatgattttcatatccatccgaactgatttggcctggtatagacttggcaaaccagcaaagcagtatgctccttggtatgacacagtattgaaaactgcaaggcttgctataagcattatcaccttgctgaaggagcagagccgagtatcacgactttcctttggagatgtcatcaggaaagtatctgagtttgataagaaagacggttcttacatttcttctgatccattgactgttgagagatatgttgttgtccatggacagataattctgcaactgtttgcagaatttcctgatgataagatcagaaagtctgcatttgtgacgggtcttacaaacaaaatggaagagcgccaccataccaaatggttggtgaagaagaagaaagttgtgccaaggagtgaaccaaatttaaatcctagagcagcagtgggtcctgttgtatccaagaggaaagctatgcaagctacaacgacaaggctgatcaatagaatatggggagagtattactcaaaccacttgccagaggatgcaaaagagggaattgctagtgagttaaaggatgaggatgaagtggaggaacaagaagaaaatgaagatgatgacaatgaggagacaatacttttggagggaaccccaaaggcacattcagcttcaaagcaaaccaaaaaattttctgctgaaacagaaataaggtgggaaggggaacctgaagggaagactagttctggatatcctgtttataaacaggcaattattcgtggggaagttatttctgtaggaagatctgtgttggtggaggttgatgaaacagatgaatttccagacatatattatgttgaatatatgtttgaatcaaagatcggaagaaaaatgttccatggtaggatgatgcagcgtggttgtcagactgttcttggcaatgctgctaatgagagagaggtgtttttgactaatgagtgcagggatttgggactgcatgatgtcaatcagacagttgttgtaaatattcaaaataggccttggggacatcagcatcgaaaggataatatcattgcagatagagttgacagggctcaagcagaagaaaggaagaagaaaggactacctactgaatattactgtaaaagcctgtactggcctgaaagaggtgctttctttagccttccacttgatactttggggctagggtctggtgtttgcccatcttgcaaaatacaggatgctgaaaaggagaaggatgttttcaaagtaaattcctccaagtctggtttcctattgaaaggaactgagtattctcttaatgattatatttatgtaagtcccttcgaatttgaggaaatgatagagcaaggaactcataagagtgggaggaatgtggggttgaaagcttatgttgtgtgccaagtgcttgagattgttgtcaaaaaggaaattaaagaagctgaaataaagtctacacaagtcaaaatcaggaggttcttccgaccagaagatgtatcaaatgagaaggcatactgttctgatatacaagaggtgtattacagtgatgaaacacatataatctctgtagaatccatagaagggaaatgtcaagtcagaaaaaagaatgatattcccgaatgcagtgcccttggcagaatgttccaaaatgtttttttctgcgagctcttgtatgatcctgccactgggtcactgaagaagttgccggctcatgtaaaagtaaaatattcaagtggacaaacatctgatgctgcagctagaaagaggaaaggaaaatgtatagagggagatgatgttttagagtccccaaatgaaggaaaaacattaaatgaaaaacgtttagcaaccttggacatttttgcaggttgtggtggcttatcagaggggttgcagcagtcaggagtttcatcaactaaatgggctattgagtatgaagaacctgctggggatgcatttaaagctaatcatcctgaggcattggtgtttattaacaattgcaatgttattcttagggctgtaatggagaagtgtggggacacagatgattgtatctcaacatccgaagctgcagaattggctgcaaagcttgatgagaaggaaataagtagtttaccaatgcctggacaagttgatttcatcaatggtggtcctccatgtcagggtttctctgggatgaataggtttaaccagagcagttggagtaaagtccagtgtgagatgatattggcattcttatcctttgccgattatttccggccaaggtatttcttgttggagaatgtgaggaactttgtgtctttcaataaagggcagacattccgtttaactttggcttcacttcttgagatgggctatcaggtgaggtttggtatccttgaggctggagcatatggggtttcccagtcaagaaaaagggcattcatatgggcagcctctcctgaggatgtgcttcctgaatggcctgaaccaatgcatgtcttttcggcccctgagttgaagattacattatcagaaaatgtccagtatgctgctgtccgcagtactgcaaatggtgctccattacgttcaataactgttcaagatactattggtgatctcccagctgttggcaatggagcctcaaaaggaaacatggagtatcaaaatgatccagtctcatggtttcaaaagaagattcgaggtgatatggttgtcttgactgatcatatatcaaaggagatgaatgaattgaacttgattcgatgccagaaaattcccaagagaccaggcgctgattggcgtgaccttccagaagaaaagataaaattgtctactggacaagttgttgatttgataccatggtgcttgccaaacacggctaagcggcacaatcagtggaagggactgtttggcaggttggattggcaagggaatttcccaacttccattactgaccctcagccaatggggaaggttggaatgtgcttccaccctgaccaagataggattcttactgttcgtgaatgtgctcggtctcaaggcttcccagatagctatcaatttgctggcaatatcatacacaagcaccggcagattggtaatgctgtgcctcctcctctggcatctgcattggggagaaagctcaaggaagcagtggacagtaagagctccacttagaagatggggcttctacattttttgaaatatcatgcttattgtattcatatcagtcaccaagatattgcaaatcattattcagggttccagaaactagaaacccttgtatatagtgatatccattggtcatttgttttgaggctaattccttgtttaactttcctcaaccaaggaattgtatggatgatgttatgatgttcattttctatcaactagtattttcttgattagataatattttggctgtttatgacagaaatggctgggaatttagaattacctcccaatgtatatagttgacaattgagaccaattttgtcattttttttaacttgttatgaatatttgttgttgcaagtatttggctaagaactaaaaaaaaggtaataccttctttccata

SEQ ID NO: 140 - DNA, 3154 bp, Glycine max
  source 1..3154: mol_type = genomic DNA
aataagtattatgcttggttggggatacatactgcccaacaaaaatgcacccaaggcaacatttgtgtgggatcttatgaaagaagttggtggtgaaatggatggtggtatggtgcacagtggtgtggtctctatggtcacagaaaatttctgttttttaaggatggaaacattgatggtgaacaggtatgggagatgtttgaagtccatttgtggtcatggttgtcaaggaaaacaaaggactttaacttgtcgttctatgaatggtcaacaatccctttgaaaggtttgtaggtggctcaatgaaaattcaagtagcagttcatggttacagtgatatcaagactgaagcagcagcagagccttgcacaacaaggcttccttttgttctctgtgatggaaggaagttacatgtcaatactggcagcatagtccatggtaataggacaaattcaatattcatgtccagcaacatcataaagaattctgtttcggtattaagagggaatgactcaactgagatgatatattgctacctgggcgaaatattggggtggttggctttacaagataaatttcagaaagttgtcatttgttggttggttggaatttttgggagatgaagcaaaagggaatgaattcacgaggaacatgttgggatgtctggtagacgagaacgagtccgggagtctgactttgaatactatgaacgcgtgtattatgaagacttgaagagtggttactataagctcaaaatctccaagtcatcatataagtgtcccttttgccaggacaagcgggaatactcattgaatgagctttcgaagcatgcagtaagatttgaaagggactcacggagcatgaagataaaagatttagccaagcactctgctcttcaattgtacattaaaaagtatcttgatgtctatgataaagtaggaagtgttgtccatgataaagtagaaagtgttatccatgataaagcaggaagtgttgttcatgatagaccaggaaaagtggtcctagatagatccggaaaagttgtcaatgatggatccggaaatgtttacagtgatagatttggaaaagttgtgaatgatagaccaagaaatgttgtcattgccaatgatagatcagaaaaagttggcaaagatcaactatttgtctggccttgggtgggcattgttgcaaacattgccactgaatttaaaaacggaatgcgtattggagacagtggttccaaactaagggatgagtttactttgaaaggatttcatcctttgaaagttcaaccattatggaaccgttatggacattcaggctttgccattgtagaattctccaaagactgggatggtttcaccaatgcaatgaactttgaaagaagttttgaggcagaacattgtgctaagagggactacgacaatttaagagaccgaggaggtagactgtatggatgggtagctcgtgatgatgattaccactccaagagtataattggtgatcaccttcggaagacgggggatttgcaatctgtttctggaaaacaagcagaggaaaaaaggaaaacaacgctgcttgtctcagatttagctaaaaccttgatagtgagaaatgagaaattggagcaggtatgcagcaaatatgatgatattagtgtgtccctgaacagagttatggatgagaaagaagcaatgattgaatcatataataatgaaataaaaaagatgcatcaaattacccggaaatattgggaggtgttttatagggatcgtgaaaaggccggattgaaactacatgcgcagaggaaaaaactagagagccgtgagaaggatctgcagagaaatcaagtgcagaatgagaatgagagaaaaaaactgtaccttgaaaggaaaaataatgagatggcaataatggagcaaaacaaagccgatgagaaagtgatgcatttggccgaagaacacaagaaagaaaaggagaaaatgcacaaaaaaattcttgaactacaaaatgaacttgatgccaaacaaaaattggaattggagattcaacaattgaaaggaaatcttcaagtaaggaatcaaataggagaggatgacgaggaggagaaaaataaattggatgcaattaaaacggaactagaagataaggaggaggaattagaagatctggaagcacttcaacaagctctcgttgtcaaggaacgtaaaaccaatgatgagttgcaagatgcccgcaaggagttaatacgttggctgaggaagacaaacagtagtcgggcttttattggtgtcaaaagaatgggggagcttgatgaaaaaccctttttgagtgcagcaaagagaaaatattctggtgatgaagtgaatctgaaagcagtggagttgtgctcacaatacgaggcttatcttagagacccaacctggtttccatttaaagttttaatagataaggaagggaaggccaaggaagtgttagatgaagaagatgaaaaactgagaactttaaaggatgagtttggtgacgatgtctttcaagcagtggttacagctctgaaggagttgaatgagtacaaccctagtggtagatacccgttaccggagttatggcattctaaggaaggaaggaaagccttgttaaaggagggttgttcttttataatcaggcaatggaaagcattaaagcagcgaaagaagtaggactgatgcggaacttacattttcggttcttattccatcaaacctactgttgtcatcgtcaacatcatggtgaaattgatttagttcaactctagtgccaaaggttggttatagtatgttacatgcaatactgatatcatataatgtacttttttcccgtgtgatagaggtttcttctattgccttggaacatttttgtttagaatctatttgaagttatatcagaccttgcttgaaattgaagtggcatattatgttgtttagatttatatttttagttaacactgctatttataaatatactgtactattcaacaatgtcagaaaattgggggttgaattgaaactgactctgccgtcagttattctcttattacgggttcggtgcagtatacccatcattatgggtctgttatcaggtttataaaacagtttgttaatagagattgggaggt

SEQ ID NO: 141 - DNA, 2600 bp, Glycine max
  source 1..2600: mol_type = genomic DNA
taatcggacagcaaaagtgactatttgccccgtaatacaacccaatcgcccaaccggagtatgcgcgcaatcgcatagcagcacctgcaatgcaacaactttgaagcaaaacacctctctctcaacctctttagcttccaattcaaagtagaaaccctaccagttttgtgctcttagtcgagacaaaggttgatcgacgtccgaactcgtcatcgtcaaagctcagttgctattcttccagcgcaagatgtccggtggacgagaacgagttcgggagtctgactttgaatattatgaacgtgaatattataaagacttgaagagtgattactataagctcaaaatctccaagtcatcgtataagtgtcccttttgccaggacaagcgggaatactcattgaatgagcttttgaagcatgcagtaagatttgaaagggactcacggagcatgaagacaaaggatttagctaagcactctgctcttcaattgtacattaaaaagtatcttgatgaaaatgataggccaggaagtgttgtccatgataaagcaggaagcgttgtccttgatagaccaggaaaagtggtccatgatagatccggaaaagtggtcattgatggatctggaaacgtttacaatgatagatttgggaaagttgtgaatgatagaccaggaaatgttgtcattgtcaatgatagatcagaaaaagttggcaaagatcaactatttgtctggccttggatgggcattgttgcaaacattgccactgaatttaaagacggaaggcgtactggagatagtggttccaaactaagggatgagtttactttgaaaggatttcatcctttgaaagttcaaccattatggaaccgttatggacattcaggctttgccattgtagaattctccaaagactgggagggtttcaccaatgcaatgaactttggaagaagttttgaggcagaacattgtggtaagagggattacaacaaattaagagaccgaggggatagactgtatggatgggtagctcgtgatgatgactaccactccaagagtataattggtgatcagcttcggaagacgggggatttgcaatctgtttctggaaaacaagcagaggaaaaaaggaaaacatcgctgcttgtcttagatttagctaaaaccttgaaagtgagaaatgagacattggagcaggtttgcagcaaatatgatgatattagtgtgtccctgaacagagttatggatgagaaagaagcgatgattgaatcatataataatgaaataaaaaagatgcatcaaactacccagaaatattgggaggtgttttataggggtcgtgaaaaggccagattggaactgcatgctcagaggaaagaactagagggccgtgagaaggatctacagagaagtcaagtgaagaatgagaatgagaggagaaaactgtaccttgaaaggaaaaataatgagatggcaataatggagcagaacaaagccgatgagagagtgatgcatttggcagaagaacacaaggaagaaaaggagaaaatgcacaaaaaaattcttgaactacaaaatgaacttgatgccaaacaaaaattggaattagggattcaacaattgaaaggaaatcttcaagtaaggaaacaaataggagaggatgacgaggaggagaaaaataaattggatgcaattaaaacagaactagaagataaggaggaggaattagaaggactggaagcacttcaacaagctcttgttgtcaaggagcgtaaaaccaatgacgagttgcaagatgctcgcaaggagttaatacgttggctggggaagacaaatagtagtcgggcttttattggtgtcaaaagaatgggggagcttgatggaaagccctttttgagtgcagcaaagagaaaatattctggtgatgaagtgaatctgaaagcagtggagttgtgttcacagtacgaggcttatcttagagatccaaactggtttccatttaaagttttaatagatagggaagggaaagccaaggaagttttagatgaagaagatgaaaaactgagaactttaaaggatgagtttggtgacgatgtctttcaagctgtggttacagctctgaaggagttgaatgagttcaaccctagtggtagatacccattacgggagttatggcattctaaagaaggaaggaaagcttccttaaaggagggttgttcttatataatcaagcaatggaaaacgttaaagcgaaagaagtaggactgatgcggaacttaaattttcggttcttattccaatgaggctaatgtagttgtcatcgacatcatggtgaaattgatttagttcaactctatagtgccccaaaggttggttatagacttatagtatgttacatgcaatactgatatcatattgttttttcccttgtgatcgggttcttttattgccttagaacatttttgtttagaatctgtttcaaattaatatcagaccttgcttgaaattgaagtggcatattagatttatatttttagttaacattgttatttgtaaatatactatactattcaacaatgtcagtaaattgtgggttgaattg

SEQ ID NO: 142 - DNA, 1911 bp, Glycine max
  source 1..1911: mol_type = genomic DNA
tttttctctatctctgttccttaaaagcaaactcatacttcacgttcttctgtttcaactctcaattaacaaacccaaaacatgtttctcctttgatcttgttcttctctagtacgcctcatgcagttccacaactacgtgggttcagaaggtgatgatagctctcccagtgactatgattggaacactgatgatgagcttgaggtgtttggaatacctccctcggatccaaccatttctagtcaagagagctgtgaagatagtgtgggggagagtagtgcaagttgctcgagcgctaaacattccaagctgattcatctcttcgtgggaatgggattttccagagagacagtgatcaaagcaattgatgaaaatggaagagataatgaggaggacattatggaagctctgctaacacttactgctgaaaaacccttaacagtagagaaagatgaggcattgtccgtacttgtcaatatgggatacccttttgaggaggctttgacagctatagacaaatgtggtcctaaggcccatatcagtgagctagcggatttcattagtgcttctcagttagaaaagggtcttcactcaccgcaagagtcacctaacaataaacatgatgcatctgattatacgcatgaaaagccctgtcaaccaagtggtgaatattatcttcatacaagtaagaaagtaaaacttggattgggtatatttaatgaagccagtcaagtgatttcaagaaagttcccaagagaagtagcaaataaaccatacttctattttgaaaacgtggctcttgctcctaaaggagtttggaaaactatatcacgttttctttatgagattgaaccagaatatgttgattccaaatacttttgtgctgcaacaagaaaaagaggatatatccataatcttcccacccacaaccgctcccccctgcttcctatcccaccactaactatccaagaggcttttcctacaactaaaaaatggtggccttcatgggatagaagaacaaagctcaattgccttctaactagagtagcccctggcccagttacagagagaataaggaaactccttgagaaatttggtgatgaacctcctctacatgtccaagaaaatgtacttgtagagattagaaagtggaacttggtgtgggttggaaaaaacaaattggcacctcttgaacctgatgaatatgagatgttgctgggattcccaagggatcacaccagaggtggtggagtcacccggacagagagatacaagtcacttggaaatgcatttcaggttaatacagttgcctaccacctttcagtgttgaagggtcgttttccaaatggcatcaatgtcctgtctcttttttctggcatcggaggtgccgaggttgctctgcatcgacttgggatgatgcttaaaaatgtggtatctgtggaaatagctgaggtgaacagaaacatcattcgcagttggtgggaacagactaaccagaggggaaacttaattgaggttgaagatgtacagaaagtctcttcaaatgagctgagccagtggataaccaagtttggtggatttgacctcatcattggaggcagcccctgcaacaacatttctggcagtaatagagttagtagacatggactagagggagagcaatcttcactattttacgaatattttaggattgttgaggcagtaatggaaatacagagagatgagcttctgtgaaacaaaaaaaagtacatcagtggattttgttaattcccatttttgtatggaacaactaaaaattatgtacacataataggaggaggagaatccaatagatccaagaaatgtaacaaaacatttgtaatttcgaatttatcttatattggtaatgtttttatgttctttttgtcacac

SEQ ID NO: 143 - DNA, 1973 bp, Glycine max
  source 1..1973: mol_type = genomic DNA
tttttctctatctctgttccttaaaagcaaactcatacttcacgttcttctgtttcaactctcaattaacaaacccaaaacatgtttctcctttgatcttgttcttctctagtacgcctcatgcagttccacaactacgtgtgctacgaacataggaaacttgtttgtggagtcgagagttcttacttatctgctaagtcatgggttcagaaggtgatgatagctctcccagtgactatgattggaacactgatgatgagcttgaggtgtttggaatacctccctcggatccaaccatttctagtcaagagagctgtgaagatagtgtgggggagagtagtgcaagttgctcgagcgctaaacattccaagctgattcatctcttcgtgggaatgggattttccagagagacagtgatcaaagcaattgatgaaaatggaagagataatgaggaggacattatggaagctctgctaacacttactgctgaaaaacccttaacagtagagaaagatgaggcattgtccgtacttgtcaatatgggatacccttttgaggaggctttgacagctatagacaaatgtggtcctaaggcccatatcagtgagctagcggatttcattagtgcttctcagttagaaaagggtcttcactcaccgcaagagtcacctaacaataaacatgatgcatctgattatacgcatgaaaagccctgtcaaccaagtggtgaatattatcttcatacaagtaagaaagtaaaacttggattgggtatatttaatgaagccagtcaagtgatttcaagaaagttcccaagagaagtagcaaataaaccatacttctattttgaaaacgtggctcttgctcctaaaggagtttggaaaactatatcacgttttctttatgagattgaaccagaatatgttgattccaaatacttttgtgctgcaacaagaaaaagaggatatatccataatcttcccacccacaaccgctcccccctgcttcctatcccaccactaactatccaagaggcttttcctacaactaaaaaatggtggccttcatgggatagaagaacaaagctcaattgccttctaactagagtagcccctggcccagttacagagagaataaggaaactccttgagaaatttggtgatgaacctcctctacatgtccaagaaaatgtacttgtagagattagaaagtggaacttggtgtgggttggaaaaaacaaattggcacctcttgaacctgatgaatatgagatgttgctgggattcccaagggatcacaccagaggtggtggagtcacccggacagagagatacaagtcacttggaaatgcatttcaggttaatacagttgcctaccacctttcagtgttgaagggtcgttttccaaatggcatcaatgtcctgtctcttttttctggcatcggaggtgccgaggttgctctgcatcgacttgggatgatgcttaaaaatgtggtatctgtggaaatagctgaggtgaacagaaacatcattcgcagttggtgggaacagactaaccagaggggaaacttaattgaggttgaagatgtacagaaagtctcttcaaatgagctgagccagtggataaccaagtttggtggatttgacctcatcattggaggcagcccctgcaacaacatttctggcagtaatagagttagtagacatggactagagggagagcaatcttcactattttacgaatattttaggattgttgaggcagtaatggaaatacagagagatgagcttctgtgaaacaaaaaaaagtacatcagtggattttgttaattcccatttttgtatggaacaactaaaaattatgtacacataataggaggaggagaatccaatagatccaagaaatgtaacaaaacatttgtaatttcgaatttatcttatattggtaatgtttttatgttctttttgtcacac

SEQ ID NO: 144 - DNA, 2392 bp, Glycine max
  source 1..2392: mol_type = genomic DNA
tttctttccatttcttttccttactcctcccgaaaacaaaaccagctctagagctggtgttgcaatcaaacggttcagatcaaaacacgtggactgatttgtgagaaactttgtccctgattaacgtgtccccagcgggagtggaacacagaaattttcacagaaaaaactgcgcgagtatggaaagtttttccatgcttgtgttgttgcattgtccctgaatttgtacttgattctgggacgtcactcagtctgagtctgtttctgcaaatttcaaaaccctctctctcgttactcgccatcactagcgagtgctccttcttcctcttcgcgaaattcgtatgcgaagaaggaggtagggattcgcgctcctgctttctcagactgcctaattatcttttattctgcgaagtaactgagagattgaagatgggaggagatgattctggtttggagagtgacaattttgattggaacactgaagatgagcttgaaattcagaactataactcgtcgtcttcatgtttaacccttcctaatggagatgctgttactggctctggagaggcaagctcgtctgcagttttggctaattccaaggtgcttgatcacttcgtcagcatgggattttctagagaaatggtttctaaagtaattcaggaatatggtgaggaaaatgaagataaactacttgaagaacttctcacatacaaggctctagaaagttcttcccgtccacagcagcgaattgagccagatccttgttcttcagagaatgcagggagttcttgggatgatttctcagatactgatattttttctgatgatgaagaaattgcaaaaactatgtctgagaatgatgataccttacggtctttggtgaaaatggggtacaagcaggtggaggctttaattgccatagaaagattaggcccaaacgcctcacttgaagaattggtagattttataggtgttgctcaaatggcaaaggctgaagatgctcttctgcctcctcaagaaaagttacaatacaatgactatgctaagtccaataaacgaagattatatgattatgaagtgctgggaaggaaaaagcctaggggatgtgagaagaaaatcctcaatgaagatgacgaggatgctgaagctcttcatcttccaaatccgatgattgggtttggtgtacctacagagtcaagcttcataacacacagaaggcttccagaagatgccattgggcctccttacttctattacgagaatgtagccttagcaccaaaaggtgtttggcaaacaatttcaagattcttgtatgatgttgaacctgagtttgtagattcgaagtttttctgtgctgcagccaggaaaaggggatatattcacaatctccccatccaaaataggttcccacttctaccacttccaccgcgcacaatacatgaggcttttcccctaacaaagaaatggtggccctcatgggatattaggaccaagcttaattgtttgcaaacatgtattggcagtgcaaaactaacagaaagaattaggaaagctgtagaaatctatgatgaagatccacctgaaagtgtacagaagtatgttcttcatcagtgtaggaaatggaatttggtttgggtgggaagaaataaggttgctccattagagcctgatgaagtagaaacgctgttgggcttcccaaggaaccacaccagaggaggtgggataagtaggactgacagatacaagtcacttggtaattcattccaggttgacactgtggcataccacttgtcagttctgaaggagatgtatcctaatggtatcaatcttctttctctcttttctggaattggtggggcggaggtagctcttcatcggcttggcatccctctcaagaatgttgtgtctgttgaaaaatcggaagttaataggaatattgttagaagttggtgggagcaaacaaaccagaaaggtaatctatatgatatggatgatgtaagggagctagacggtgatcgcttggaacagctgatgagcacatttggtggttttgatctaattgttggtggcagtccatgtaataacctggctggtagcaacagggtcagccgggatggactggagggaaaagaatcttctctcttctttgattattttaggattctagacttggtaaaaaatatgtcggccaaatatcgatgatttttgtcccaagaagcctctttctccggttttgtatttaatccaaacaattaggatcttcgtatataaacctgaaacattagagacagatacttctcattccatttttgttgccaaagaaaggcaacgttttcaaataaaaaaattatcttaaaatttctgattccaggttactattttattaatacgt

SEQ ID NO: 145 - DNA, 2491 bp, Glycine max
  source 1..2491: mol_type = genomic DNA
tttctttccatttcttttccttactcctcccgaaaacaaaaccagctctagagctggtgttgcaatcaaacggttcagatcaaaacacgtggactgatttgtgagaaactttgtccctgattaacgtgtccccagcgggagtggaacacagaaattttcacagaaaaaactgcgcgagtatggaaagtttttccatgcttgtgttgttgcattgtccctgaatttgtacttgattctgggacgtcactcagtctgagtctgtttctgcaaatttcaaaaccctctctctcgttactcgccatcactagcgagtgctccttcttcctcttcgcgaaattcgtatgcgaagaagggttgtgttctctctctttgccgtttttgtttgtttaattttgtgtagttttacgaggttgaatttgagctgacgtgcattttttttgagttttgtgcagaggtagggattcgcgctcctgctttctcagactgcctaattatcttttattctgcgaagtaactgagagattgaagatgggaggagatgattctggtttggagagtgacaattttgattggaacactgaagatgagcttgaaattcagaactataactcgtcgtcttcatgtttaacccttcctaatggagatgctgttactggctctggagaggcaagctcgtctgcagttttggctaattccaaggtgcttgatcacttcgtcagcatgggattttctagagaaatggtttctaaagtaattcaggaatatggtgaggaaaatgaagataaactacttgaagaacttctcacatacaaggctctagaaagttcttcccgtccacagcagcgaattgagccagatccttgttcttcagagaatgcagggagttcttgggatgatttctcagatactgatattttttctgatgatgaagaaattgcaaaaactatgtctgagaatgatgataccttacggtctttggtgaaaatggggtacaagcaggtggaggctttaattgccatagaaagattaggcccaaacgcctcacttgaagaattggtagattttataggtgttgctcaaatggcaaaggctgaagatgctcttctgcctcctcaagaaaagttacaatacaatgactatgctaagtccaataaacgaagattatatgattatgaagtgctgggaaggaaaaagcctaggggatgtgagaagaaaatcctcaatgaagatgacgaggatgctgaagctcttcatcttccaaatccgatgattgggtttggtgtacctacagagtcaagcttcataacacacagaaggcttccagaagatgccattgggcctccttacttctattacgagaatgtagccttagcaccaaaaggtgtttggcaaacaatttcaagattcttgtatgatgttgaacctgagtttgtagattcgaagtttttctgtgctgcagccaggaaaaggggatatattcacaatctccccatccaaaataggttcccacttctaccacttccaccgcgcacaatacatgaggcttttcccctaacaaagaaatggtggccctcatgggatattaggaccaagcttaattgtttgcaaacatgtattggcagtgcaaaactaacagaaagaattaggaaagctgtagaaatctatgatgaagatccacctgaaagtgtacagaagtatgttcttcatcagtgtaggaaatggaatttggtttgggtgggaagaaataaggttgctccattagagcctgatgaagtagaaacgctgttgggcttcccaaggaaccacaccagaggaggtgggataagtaggactgacagatacaagtcacttggtaattcattccaggttgacactgtggcataccacttgtcagttctgaaggagatgtatcctaatggtatcaatcttctttctctcttttctggaattggtggggcggaggtagctcttcatcggcttggcatccctctcaagaatgttgtgtctgttgaaaaatcggaagttaataggaatattgttagaagttggtgggagcaaacaaaccagaaaggtaatctatatgatatggatgatgtaagggagctagacggtgatcgcttggaacagctgatgagcacatttggtggttttgatctaattgttggtggcagtccatgtaataacctggctggtagcaacagggtcagccgggatggactggagggaaaagaatcttctctcttctttgattattttaggattctagacttggtaaaaaatatgtcggccaaatatcgatgatttttgtcccaagaagcctctttctccggttttgtatttaatccaaacaattaggatcttcgtatataaacctgaaacattagagacagatacttctcattccatttttgttgccaaagaaaggcaacgttttcaaataaaaaaattatcttaaaatttctgattccaggttactattttattaatacgt

SEQ ID NO: 146 - DNA, 2349 bp, Glycine max
  source 1..2349: mol_type = genomic DNA
ctttggtgttgcaatcaaacggttcagatcaaaacacgtgctgattggtgagaaactctgtgtcccccaaccgtcggatttccctgattaacgtgtccccagcgagagtggaacagagaaattcccacggaaaaaagtgcgcgagtatggaaagttttttccatgctgcattgtacctgattcagggacttgattctgtctgagtctgtttctacaaatttcaaaaccctctctctctcgtgagttactcgcaccactagcgagttcttcttcttcttcttcttcgcgaaattcgtatgcgaagaaggaggtaggaattcacgctcctgcattctcagaccgttaggattccaattgtgcctaaatatatcttgtattctgcgaagaagaagctgagagaggttgaagatgggaggagatgattttgattggaatactgatgatgagcttgaaattgagaactataactcttcatcttcgtgtttaacccttcctaatggggatgctggagaggcaagctcgtctgcagttttggctaattccaaggtacttgaccacttcgtcaacatgggattttctagagaaatggtttctaaagtaattcaggaatatggtgaagaaaatgaagataaactacttgaagaacttctctcatacaaggctctggaaagttctccccaaccacagcagcgaattgagccagatccttgttcttcagagaatgcagggagctcttgggatgatttctctgatactgatattttttctgatgatgaagaaattgcaaaaactatgtctgagaatgatgataccttacggtctttggtgaaaatgggctacaaacaagaggaagctttagttgccatagaaagattaggcccaaatgcctcacttgaagaattggtagattttataggtgttgctcaaatggcaaaggctgaggatgctcttctgcctcctgaagaaaagttacaatacaatgactatgctaagtccaataaacgaagattttatgattatgaagtgctgggaaggaaaaagcctaggggatgtgagaagaaaatcctcaatgaagatgatgatgaggaagatgaagctcttcatcttccaaacccaatgattgggtttggtgtacctacagagtcgagcttcataacacacagaaggattccagaagatgccattgggcctccttacttctattatgagaatgtagccttagcaccgaaaggtgtttggcaaacaatttcaagattcttgtatgatgttcaacccgagtttgtagattcaaagtttttctgtgctgcagccaggaaaaggggatatattcacaatctccccatccaaaataggttcccacttctaccacttccaccgcgcacaatacacgaggcttttcccctaacaaagaagtggtggccttcatgggatactaggaccaagcttaattgtttgcaaacatgtattggcagtgcaaaactaacagaaagaattaggaaagctgtagaaatctatgatgaagatccacctgaaagtgtacagaagtttgttcttcatcagtgtaggaaatggaatttggtttgggtgggaaggaataaggttgctccattagagcctgatgaagtagaaacgctgctgggcttcccaaggaaccacaccagaggaggtggaataagtaggactgacagatacaagtcacttggtaattcattccaggttgacactgtggcataccacttgtcagttctgaaggagatgtatcctaatggtatcaatcttctttctctcttttctggaattggtggggcagaggtagctcttcatcggctcggcatccctctcaagaatgttgtgtctgttgaaaaatcagaagtgaataggaatattgttagaagttggtgggagcaaacaaatcagaaaggtaatctatatgacattgacgatgtaagggagctagacggtgatcgcttggagcagctgatgagcacatttggtggttttgatctaattgttggtggcagtccatgtaataatctggctggtagcaacagggtcagccgggatggactggagggaaaagaatcttctctcttctttgattactttaggattctagacttagtaaaaaatatgtcagctaaatatcgataaatttttgtccaaagaaacccctttctgcggttttgtctttcgtccaaataattaggatcttcgtatataaacctgaaacattagagacagatacttctcattccatttttattgccaaagaagggcaacgttttcaaataaaaaaattatcttaaaatttctgatttcaggttactattttattaatacctatgcggg

SEQ ID NO: 147 - DNA, 1512 bp, Glycine max
  source 1..1512: mol_type = genomic DNA
atgaaatttctgactgattttcaagttgaggaatactatggagctaaaggagttgatacatggagtttgaagatgtgggagaaagtgattagtaacaatgatactattgctgactgtgttgaagctctgataggagcatactatgtagatggtggactctttgcttcacttaatgtgatgaaatggcttgggattggtgttgaacttgaactatcatcacttgatgaagcaatcactgctgcatctctgagtacatgtgtgccaatagaaagtgatattgcaagccttgaaaagaaaattgagtatgaattttcagtcaagggactcttactggaggcaatcacacatttgtctgagaaagaacttgggattggctgctgttatgagaggcttaaatttcttggtgactcggtattggacctgcttatcacatggcatctttatcagagtcacacagatattgatccaggggtgttggctgacttacgttctgcttctgtcaataatgacaattttgctcaagttgctgttagacataaccttcaccagcaccttctacatagctcaggattattagtgagccagatattagaatatgtgaaggtcatttctgaatcagatcccagatcacttccaagtattagagctcccaaggcacttggagatgtagtggaaagtattgtcgggcctatactaattggtaccaagctaagtcttgaccaagtgtggaacgttttctatcctctattatctcccattgttactcctgataaacttgaattgcctccatttcgtgaattaaatgaattatgtgattcacttgggcattttgtaaaagtaaaagaaaattgtgaaaaaatgggatcagcaatgcatgttgaggttagtgtacagcttccaaatgccctattggttcgtgaaggaaaggggccaaataaaaaaactgcaaaaggagaagctgcttttcatttgttgaaggatcttgagaagcggggaattttacatggtagtctcatgtccaagggaaaaagagacaatcctgaccatatctatgattcatttcatctcaaaagggattctagtatttgttcttctctaattgaagaacattcctcagagccagcatcacataaaaggcacacattggatgaaactaacttaactgcatctattcagttctgtgagacatctgaattgatcactcctgctgtagcattcattaaccaaatcatagataatgctatgagtgttggaggaccacggaccacactatatgatgtatgtaagaaattacagtggccagtgcctgcatttgattcaagagaatataaagatagtttttattttgtcacagatctctatttgaatcctgtgaagggctgcaaggaagcaagggacaaaactgtttctttgtcgaaaattaccttgtgcatacccaattatggtaatatagaatgcaaaggagaagctagaagtgataagaagagctcctttgactctgctgcaatttaa

SEQ ID NO: 148 - DNA, 5984 bp, Glycine max
  source 1..5984: mol_type = genomic DNA
cgttggacacttaacctaaccttttcgttccaccgagtcacatgaagaaaaatatgacaaaccaatcttgtccaacacagctatttcatttttactctcgcaagatgcatagaagtttgctttggcactgtacacctcgtctactctagcaaacaaacaaacccgacgtatacttctgaaactcacttgactacttcacattcacactcactgttctgcgttgcgtcctacgtagtaaccaggaccatgaattccaacattgattcaacagaccatagccaggatcaaagcagaaaacgaaacctacccgatgctgatgattctccggcgccgaatttccacattgattcatcagaccataaccaggaccaaagtaaaaaacgaaagcaacccaatgatgaagattctccatcgcttgaatcgccttgttccaacatgaaccccagaaggtatcagatagaggtgtatgaagttgcaaggagaaggaacactatagctgtgttggatacagggtcaggtaagaccctgattgctgtaatgcttatgaaagaggttggtcaagccatcaagactagtggtgtaaagaagctgattattttcttggctcccacagttcatcttgtcaatcagcaattcaagaatataaaatttctgactgattttcaagttgaggaatactatggggctaaaggagttgatacatggactttgaagacgtgggagaaggagattagtaacaatgatgttctggttatgacaccccagattcttttggatgcgttaagaaaagcattcctgcgtatggaaatgatatgcttgattgttattgatgaatgtcatagaacaattggcaatcatccttatacaaaaataatgaaggaattttatcaccaagctaatgaaaagccaaagatttttgggatgacagcatcacctgttggtaaaaaaggtgtttcctctactatggattgtgaggatcagatatcagaacttgaaagcatcttggattctcagagatatactgttgaagatcggacagagatggataggtgtgtcccatctgctaaagagagttgtagatattatgaccaagcacgattttctgctttgagtttgaaaccaaagattgaagccttgtcgttcaagtttgatgcattgttatcagaaaatcaaagtaactataaggatgtggaaaataaatttaagacactttctcagcggatgtccaatgaacttgcaaaaattttacattgccttgaagatcttgggatcctatgtgcttatgaggctgttaaaatctgtcatgagaatttttccaaatctgaaggagagtgtgaaatttacagaaaaggttatcttcaatgtataacttttcttgaagaagtaatcaaattaatcgaagaatccctccatcttgctgataaaaagattttggaggttgattttaattattctcaggcagaagatttgggatacatatctcccaaattaattgaacttattaaactctttcagtcatttggagaatctagtcaggtgttgtgccttatttttgttgatagaatcattaccgcaaaggtgatccaaagattcgcaaagacagttcccaatatttctcatttcacagtttcctatttaactggtaacaatacatcggttgatgctctggctcctaagaggcagaaggagatattggattctttccgctctggaaaggtcaatctattatttactactgatgtacttgaggaaggaattcatgtgccaaactgctcatgtgtgatacgttttgacctcccaaagacagttcgtagttatgtccaatctcgtggaagatctaggcaggcaaactcccaatttgttgtgatgttggagaggggaaacttgaagcaaagagatcaactctttgatatcattaggagtgagcggtccatgactgatgcatctatttataaagaacatgaatctagtttaagggcatgtatggtggggaaaacaaatgcatactatgtggaatccactggagcatctttcactttagattctagtgttagtctcatccaccgatactgtggaacactccctcgagataagtactcctgtgtaaagcccaattttgagtttctgtctgtggaagggggttatcagtgtaaattaatattaccatctaattcagctttccaaacaataattggtccttctggaaaagatatgcgtttggcaaagcatcttgcatgtttcgaagcttgtaagaagctgcatcaaatgggtgccttaaatgaacatttggttccattaattgaagattcttcagaagatgaccatattgtgaaaaataaagaatcaagttctggtgcagggaccacaaaaagaaaggagttacatggaaaagctaacattcatgcattaagtggtgcatggggagacaaactcactagagtcaaatttaatgcgtataaatttgaattcacatgtaatattgtaagtgaaatatactctgggtttgctcttttgattgagtcagagcttgatgaggatgtgggaaatgtaaatttagatctttatttagtctcaaagattgtgaaagcttccgtctcttcatgtgggcaagttgatttggatgctgaacagatgatgagagcaaaatgcttccatgagctttttttcaatggtttgtttgggagactggtcttgaagtccaaatcagcaggagaaagggaatttttacttcagaaagacacaaactcattgtggagcccaaaacacttgtatttgcttctaccactagagaaattgaatgatatctgtgagggatctttgcaaattaattggtgtggaattaattcttgtgcttctgctatcaaatttttaaggaggaaattttctttggtcactggagattgtgatgataacggcacaatcacatcacctcatgataccagttcatcagagatggaatgtgtaggagcaaacaagattcactttgctaattgtgtggttgatgctgataatataaaagacagggtagttttggccattcacactgggaaaatatattgtattattgagatcgacagtaacctatctgctgaaagtcctttctatggaaacaatgaaaaatcaaaggaaagcattaccttctcggattatttcagcaaaagttatggaatttcactgagacatcctggacagcctatgttacggttgaagcaaagtcataatccacacaatcttcttttcaacttctatgaggaagatgcacgagacaagtcatcaaaaattggccctgcagcctcaaaattgccagtgcatgttcatattcctcccgagcttctatacattcttgatgttaaaagagatgtgttgaaatcactgtacttgctgccatctctgatgtaccgcattgaatctttgatgttatctagtcagcttagagaagagatagatggtcaaactagcaagttcaacatacgtagctcactgattctagaatcacttacaactttgagatgtagtgaaagtttttcaatggaacgtcttgagttgctaggagattctgttttgaagtatgtggtgagttgtcacctctttcttaaatatcctaaaaaacacgaaggacaattatctgccagacgatcatcggctgtttgtaactcaaccctacataaactggggacagatcgcaaattacagggatatattcgagactctgcttttgaaccacgccgttgggttgctccaggacagcgttctatacaccttgtttgttgtgattgtgggttggaaacccttgaagtgcctttagatgcaaaattccatactgaagatccaaaagttgtggttgggaagttttgcgacagaggtcactgctggatgtgttctaagactattgctgactgtgttgaagctctgataggagcatactatgtagatggtggactttttgcttcacttaatgtgatgaaatggcttgggattggtgctgaacttgaactatcattggttgatgaagcaatcactgctgcatctctgcgtacatgtttgccaaaagaaagtgagattgcaagccttgaaaagaaaattgggtatgaattttcggtcaagggactcttactggaggcaatcacacatttgtctgagaaagaacttgggattggctgctgttatgagaggcttgaatttctaggtgactcggtattggacctgcttatcacatggcatctttatcagagtcacacagatattgatccaggggtgttgactgacttacgttctgcttctgtcaataatgacaattttgctcaagttgctgttagacataaccttcaccagcaccttctacatagctcaggattattactgagccagatatcagaatatgtgaaggtcatttctgaatcagatcccagatcacttccaagtattagtgctcccaaggcacttggagatgtagtggaaagtatagttggggctatactaattgataccaagctcagtcttgaccaagtgtggaacgttttctattctctattatctcccattgttactcctgataaacttgaattgcctccatttcgtgaattaaatgaattatgtgattcgctcggttattttgtaaaagtaaaagaaaattgtgaaaaagtgggatcagcaatgcatgttgaggttagtgtacaacttccaaatgccctattggttcgtgaaggaaagggggcaaataaaaaaactgcaaaaggagaagctgctttttatttgttgaaggatcttgagaagcagggaatttcacatggtagtttcatgtccaagggaaaaagagataatcctgaccatgtctatggttcatctcatctcaaaatggattctagtattctaattgaagaacattcctcagagccagcatcacataaaaggcacatattggatgaaactaacttaactgcaattaatttatcaattaatatgaagaagggaggaccgcggaccacattatatgaagtatgtaagaaattacagtggccagtgcctacatttgattcaacagaatataaagatagatctctatttgaatcctgtgaggggctgcaaggaagcaagggacagaactgctttgtgtcgaaaattaccttgtgcatacccaattatggtaatatagaaagcaaaggagaagctagaagtgataagaagacctcctttgactctgctgcagttcaaatgcttcttgagctgcaaagactgggaaaagttgaaattgatcctctcccttctagttaggggaagagaaaggaaagaaaagggaagggaaggaaaagaaaagggagagaatataagagaagggatagtaccccaattttgtgcccccaaaaaacatgaactgttgttttgtgccattgatctggtaaattctctcagattaatggcagaggaccattagtttacagtatttttggggttgcaaatttgtggtactagtattgtgaccaagaagagaaaatgattggaaaaaaaaaggattgaaaaaaatgaggtggtgtttgagaagattcaagtgagaataaacagaagtccttttcctttcctttcctttcctttccccagggaaggaaaagaaaactcaaacagcaaaggttgatcaattttattcataaaacataaaattgcagaacatgactttgacgcaataatattgcatgtacatgaatgtagtagctgttcttagggcacttgtgcatgtatgtagtatcttgttcaatttttttccgtacataatttaagttgatttcatcttcatatacacgaagacacttttatcctgacttgtcaatcctcatctcactctggcacgcggtgatgtgcaagtgcaagcataaagttgcaccaaagtatctaagtctttcaataaagaatgttgggcgtgggccgggtgggtctttgaagtatgaatatggtaatttcatttattattgttatctattgtgttatttctt

SEQ ID NO: 149 - DNA, 2858 bp, Glycine max
  source 1..2858: mol_type = genomic DNA
gtcacaactgttactaaaaaagttgacccttccctctcactggaaactaatgttcccgcgcgtgtggccattttgaaaaaaatctgcttttcattcgctcagacacttttttgtccccatctcttttcattcgctcagcgatacgctaccatggctaaacgcaaaacatccgacgcctccgatgcacaagacgacactgtatcgctgcttccttcccaacgcaataaggccaagcatcctaactctaactccaacgcctgcttcgccggaaagcccattccgcccgccgaggccctcgccaaatggccccaccgatatccctccgaggggaaaaagaagggttcagctagaacctcaaaagaggctacgagtgaaaacagtgaagttatgccggcacggtgtcattatcgtcaagctaaagtggatggggttgtttataacctctatgacgatgcttatgtcaaggccgaagatggaaaaccagattatattgcacgaatcgttgagatgtttgaaactgttgataaggaacaatgttttacggctcagtggttctacagggctgaggacactgtgataaaaaatcacggtgaccttgttgacaagaagcgaatttttatatctgatgtgaaagatgtaaatccccttgactgtattgtttccaaagtcaaaatttacaaaaaaagtccaagtgtagatttgacttcaaagaagggaaaactcccttcttgtgattactattatgacatgaagtacactgtgccgtatctaaccttttccaacatcgtcaacgaaacagttaaaacagagagtgatgcatcttccacaatttctagtgaatctggatccaatggttgcgttagtaatgctaatctagctaatggaaagactactcaaaataatagttctggttcctcggagtggactttgctagacttgtattctggttgtggagccatgtccacagggctttgttttggtgcatccttggctggaataaaacttgtcactaggtgggctgtggacattaatgcacatgcatgcgaaagtttgaagctgaaccaccctgagactcaagttagaaatgaaccagctgaagacttcttaaacctaataaaatcctgggccaagctttgtgaagagtttgcattattaggatcagaacggttagattctgatccagacatggatgaagatgagaatgaagctgtgagaaaagaagagtcaggaaatcaatctgattcagaggaatttgaagtagaaaagttacttgctgtgtgctatggtgatccaaacgacgtcaaaaaaccaggactatattttaaagttcgttggctgggttatgcttccagctatgacacgtgggagccaatagaaggattgagtgattgcaaggaagctatgaaagattttgtgacaaaaggctacaagaaaagattattgcctcttcctggtgatgctaactttatttgcggtggacccccatgccaaggagtaagcggtttcaaccgcttcaggaatgcagcagctccattagaggacacaaagaataagcagttgcttgtttacatggatattattgattttttgaagccaaaatatgtcctcatggagaatgttgttgatattttgaggttttccggtggttatctggggcgttatgccatatgccgtcttgtagctatgaattatcaagcaagaatgggcatgatggcagcagggtcttatggccttccacaatttcgtatgcgtgttttcctttggggagctcgtcctactgagaaattgcctccatatccgttaccaacacatgaggtggtgtcaagaggttccgttcccactgaatttgaagaaattacagtagcttatgataaaaaggatacctgtcatctggctggcgctcttttacttgaggatgcaatatcagatctaccacatgttacaaatgatgagaaccaagatgaaaggaactatgaagctccttctgaaactgaatttcaaaaatatattagattgaagaaaaacgagatggtgggtagtatggctagtgctcaaagcgcaccagatagaatactatatgatcatcgtcctctgcagttgaacaaagatgattatgaaagagtttgccagattccccagaagaagggtgcaaacttcagagatctacctggtgtacttgtgaatggcaacaaagttcaatgggatccatcggttcaaagagtgatgctagactctgggaagcctttggttcctgattatgctatgacatttgtccgtgggacatctagcaagccatttggtcgtttgtggtgggatgaaattgtgtcaacagtggtgacaagggccgagcctcacaaccaggccattctccaccctacacaaaaccgagtacttaccattagagagaatgcgagactacaagggtttcctgattgctataaactttgtgggcctgtcaaagagaggtacatacaagttggaaatgctgttgctgttcctgttgctctagcattgggatacacatttggtttggcctgccagggattattgtcggatgataatcccttgacaaccctccccttcaagtatccaagttgtcttgccctttcatctcttgcagaaactgagaatgataacgaatcaagttgagattgttcccacacaatcccgttctctgtcattgccatgttaaacttgtccatatttccaactttccattttaatgcaagagtgagtgtacactaaaaggccgaaattttgtatcaataatgattgtatgtacactaatgacattgttcataatgatataagattcactttggtaatggttttgtgaaatttaagttgtagttaagaat

SEQ ID NO: 150 - DNA, 2893 bp, Glycine max
  source 1..2893: mol_type = genomic DNA
atttgaccttccccgtcactggaattcatgttcccgcgcgtgcggccattttaaaaacccccccttctcttttcctcactcactttttgtctgcatctcttctccgcttgtccctctatccatcactggaagcagcgatacgctgccatggctaaaaaacgcagcgcatcagacgccaccgatgatgcacaaaacgacaccgtatcgctgcttccctcccaacgcaagaagcccaagcactctgctcctaaccccgacgcctgcttcgtcggaaagcccattccttctgccgaggcccgcgccaaatggccccaccgatacccctccgaggtgaaaaagaaagctccagctagaagctcagaagaggttacgagtgaaaacagtgaggttatgctggctaggtgtcattatcgtcaagctaaagtagatggagttgtttataacctctatgatgatgcttatgttaaggccgaagacggtaaaccagattatattgcacgaatcgttgagatgtttgagactgttgataaggaacaatgttttatggctcagtggttctacagggccgaagacactgtgataaaaaatcacggtgatcttgttgacaagaagcgggtttttatatctgatgtgaaggatgtaaatccccttgactgtattgtttcaaaagtcaaaattttcaaaaaaaacccaagtgtagatttggcttcaaagaaggcaaaattgcctttttgtgattactattatgacatgaagtacactgtgccatatctaacattttccaacctagtcaatgaaacagttaaaaccgagagtgatgcatcttccacaatttctagtgaatctggatccattggttgcgttaataatgctaatctggcaaagagaaagactactcaaaataatagttctggttcctcgcagtggactttgctagacttgtattctggttgtggagccatgtccacagggctttgtttgggtgcatccttggctggaataaaacttgtcacaatgtgggctgtggacattaatgcacatgcatgcaaaagtttgaagctgaaccaccctgaaactcatgttagaaatgaaccagctgaagacttcttaaacctaataaaagcttgggccaagctttgtgaagagtttgcattattaggatcagaacggtcagattccgatccagacatggatgaagatgagaatgaagctgtgcaaaaagaagagtcaggaaatcaatctgacttggaggaatttgaagtagaaaaattacttgctgtgtgctatggtgatccaaacggcgtcaaaaaaccaggactatattttaaagtgcgttggctgggttatgattccagttatgacacatgggagccaatagatggattgagtgattgcaaggaagttatgaaagattttgtgacaaaaggctacaagaaaagattattgcctcttcctggtgatgctaactttatttgtggtggacccccgtgtcaaggagtaagtggtttcaaccgcttcaggaacgcagaagctccattagaggatacaaagaataagcagttgcttgtttacatggatattattgattttttgaagccaaaatatgtcctcatggagaatgtcgttgatattttgaagttttctggtggttatctggggcgttatgccataggccgtcttgtagctatgaattatcaagcaagaatgggcatgatggcagcagggtcttatggccttccacaatttcgtatgcgtgttttcctttggggagctcgtcctactgagcaattgcctccatatccgttaccaacgcatgaggtggtgtcaagaggttttgttcccactgagtttgaagaaattacagtagcttatgataaaaaggatacctgtcagctggctggtgctcttttacttgatgatgcaatatcagatctcccacctgttacaaatgatgagaaccaggatgaaaggaactatggagctcctgctcgaactgagtttcaaagatatattagattgaagaaaaacgagatggtgggtagcatggctactgctcaaagcacaccacgtagaatactgtatgatcatcgtcctcttcaattgaacaaagatgattatgacagagtttgccagattccccagaagaagggtgcaaacttcagagatctacctggagtacttgtgaatggcaacaaagttgaatgggatccatcggttgaaagagtgatgctagactctggaaagcctttggttcctgattatgcaatgacatttgtccgtgggacctctactaagccatttggtcggttgtggtgggatgaaattgtgccaacagtggtgacaagggccgagcctcacaaccaggccattctccaccctagacaaaaccgagtacttaccattagagagaatgcgagactacaaggatttcctgattgctataaactttgtgggcctgtcaaagagaggtacatacaagttggaaatgctgttgctgttcctgttgctctagcattgggatacacgtttggtttggcctgccagggactgtctgacgataagcctttgacaaccctccccttcaagtatccaagttgtcttgccctttcatctcttgcaggaactgagaatgataacgaatcaagttgagattgttcccacacaatcccttctctctgccattgccatgttgaacttttccatatttattcaaattttccattttaatgtaagagcgagtgtacactagaaggccgaaaagttgtatcaatgatgattgtatgtacactaatgacattgtttataatgatataagattcactttgttaatggttttgcaaaatttaagttgtattaaaaacaaaatgtatttaagaattaattaaacttgaga

SEQ ID NO: 151 - DNA, 2971 bp, Glycine max
  source 1..2971: mol_type = genomic DNA
cccgcccactccctccctcttcaaaaaatttcagcgcctactataaatactctcgcgcttccccattttcaaaacactcactctttctttctctctctaatttattttcgcactcgccgcaccactctcctcctccgcctccgccatgcctagcaagcgcaagaccagatcctccgcctctcccgctgccgcgccgccgagcaagcgcgcctccagatcctccgcctctcgcgtcgccgattccgcaccggtcaaatctgaagccgaggaagttgtggcagcttcctctgtcgtcaaagaagaggcgcaagcaagcttcacggacgttactgacggcaacgttagcgatggcgaggggactaacgccagattcgtcggagagcctgttcccgacgaggaagcccggcgccgctggccgaaacggtaccaggaaaaggaaaagaagcaatccgctgggccaaaatcaaacagaaacgatgaagacgaggagattcaacaagctcgacgtcactacactcaggcagaagtagatgggtgcatgctttacaaactttacgatgatgcccatgttaaagcagaagaaggagaagacaattacatttgtaaaattgttgagatatttgaggccattgatggggcactgtattttacggcacaatggtattatagggctaaagacactgtcattaaaaaacttgcatatctcattgaaccaaagcgagttttcttttctgaagtccaggatgacaaccctttggattgtctagttgaaaagctgaacatcgccagaataacattaaatgtagatttagaagcaaagaaggaaaccattccaccttgtgattattactgtgatacacaatatcttttgccatactccacatttgttaacttaccatcagaaaatggggaatctggtagtgaaacttcttctacaatatcttctgaaactaatggaatcggaaaatatgaggtgaactctcaacctaaggaagcttttcttcccgaagaaagtaaagatccggagatgaagttactagatttatattgtggttgtggtgcaatgtcaactggtttgtgccttggtggaaatttatctggtgtgaaccttgttactagatgggcagtggacttgaatcaacatgcttgtgaatgtcttaaattaaaccatcctgaaactgaggttagaaatgaatcggcagaaaattttctttcattattgaaggagtggcaggaattatgtagttacttctctctagttgaaaaaaaggtgtcacatgagaaatatgtgaatctttttagtgaagatgacgatgacactagcagtaatgaagaggttaatagtgaagatgacaatgaactgaatgaagatgatgaaatatttgaagtttctgaaatccttgctgtctgctacggtgacccaaataagaaaaaagaacaagggttatacttcaaggttcattggaagggttatgaatctgccctggattcttgggaaccaattgaaggtctaagtaattgcaaggaaaagattaaagaatttgtcagtcgaggcttcaagtcacagatattgcctttgcctggagatgttgatgtaatttgtggtggacctccttgccaaggtattagtggtttcaaccggtttcggaacaaagagagtcctttggatgatgagaagaacaaacaactagttgtttttatggatattgttcaataccttaagcccaaatttacattgatggaaaatgtggttgatcttgtaaaatttgcggaaggctttcttgggagatatgccttgggtcgccttcttcaaatgaattatcaagcgcgtttaggaattatggctgcaggtgcttatgggcttcctcagtttcgtttgcgcgtctttttatggggggctgcaccttctcagaagttgccacaatttccgcttccaactcatgatgttattgtaaggggtgttattcccttggagtttgagataaacactgtagcatacaatgaaggacaaaaggttcaactgcagaagaagcttttattggaggatgctatttctgaccttcctcgggttcagaacaatgagcgtcgtgatgagataaaatatgacaaagctgctcaaacggagttccaacgattcattagattaagcaaacatgaaatgttggagcttcaatctagaacaaaatcgtcgaagtctttgctatatgatcatcgtccactagaattgaatgcggatgattaccaacgtgtgtgtcggatccctaaaaagaagggtggatgcttcagagatttaccaggtgttcgtgtgggagctgataacaaggttgaatgggatcctgatgtcgaacgtgtatatttggattcaggaaaaccattggttccagattatgccatgacttttgtgaatggaacttcatcaaaaccttttgctcggttatggtgggatgaaactgttccaactgttgtgacaagagcagaacctcacaaccaggcaattttacaccctgaacaagacagagtgttgacgattcgtgaaaatgcaagactccaaggttttccagatttctacaagttgtgtgggccggtcaaagaaaggtacattcaagttgggaatgcagtggcagttccagtagctagagctttaggatacacactaggccttgcatttgaagggtctacttctacaagtgatgatccattgtataaattacctgataaatttcccatgattagggatcgggtttcttctgtatcttccgaagatgatgtgtaattcaacaacttttaataagttgcgattttgcatctgtgcaactataatttatgtatgatcggaaacattgttgtattatccagtctattgtttgagaaattgttcaatttatatattgaagcagcatttttagaaggcgcttaatttactgatgatatatataattgtagctagagttttactggtcttaatgatggt

SEQ ID NO: 152 - DNA, 3010 bp, Glycine max
  source 1..3010: mol_type = genomic DNA
atggaggtctcaaaacgtgtgcctatggcgaggaaagaggttgggtccaagggagagcccagacaactattagccaaccattttggagtttgcctagtcaagcccaaggatgatattgatggctacttctaccattatgatgttgccatgagttatgaagatgggaaccctgttgaggccaagggtgtagggagaaaggtcttaaatcaagtttgtgaaacatatgttgaactgagaaacatgagttttgcatatgatggtgaaaaaagtctattcactcttggtcctctagcaagtcagaggcttcaatatcctgttgtgttggaggatgtttcatcaaggagggttggaaagaatggaaaccctgctgagagtcctaagggaggatatacaaaaagaatgagaattaggcatcagtttcggccaaaaactatcaacgtggatatcaaatatgcagccaaaattccattgcaagcaattgaagatgcattgcgtggtcgggattctgagaaatctcaggaagcagtgagggttctagacatcatactgagacagcattctgcaaaccagggatacctccttgttcgccaatccttctttcatgacaatcgaagaacctgtactgatataggaggtggtgtgcaagggtgccgcggttttcattcaagctttcgagtcacacaaggaggtttatctctcaacatggatgtgacaaccacaatgattgtaaagcctggccctgtggtggacttccttctccagaatcagagtgttcagaacccaaactacattgattggaccaaggcaaagagaatgctgaagaacctaagaatcagggctaatggtgttgagttcaaaatctctggattgagtgataacacttgcaggaatcagaaatttcttttaaggcaaaagggtacgaatggtgaagtgcaggaaagggaaatcacagttcatgactactttacacgccaaaaactgattggcctgaactattctgctgacatgccatgcatcaatgttggcaaaccaaaacgcccgtcttattttccaatagagctatgtgaaatggtctcgttgcagcgttacaccaaggctctaacaaatttgcaaagggctcagctagtggagaagacaaggcaaaagccccaagttaggagacaagctttggaagatgccttaagaagcagcagatatgacgatgaacctatgcttcgctcttctgggattaccattgaacctaactttgttagactcgttggtcgtgtattggaacccccaaagcttatagttggaggagagaagagcatcattccccggaatgggcgctggaatttcaacaataagaaactatatgaacctttgatgattggtcgttgggccattgtaaacttctcaagtcggtgtgacacaagactcctgatagaactcattaggaggtgtgctgcagctaaagggatgaccatgagcaatagtctctttgataaagtaattgaagaggatggttgcttcatacgtgaaccaccaaatgtcagggtagagagaatgtatgcaaagctgaggaccactctgccgcacgagaaacctcactttctgttgtgtattcttccagagaaaaagaattctgacatttatggtccttggaagaagaaaagtcttgttgaagaagggattgtaacacaatgtattgcaccaacaaagattaatgatcaatacattactaatgtacttttgaaaattaatgcaaagtatggtgggatgaattcgtatctgtcagttgagctttgtaattccattccatttgtttcagctgtaccaaccttgattcttggtatggacgtttctcatggatctcctggtcgatcagatgtgccctctattgctgcggttgtgagctcaagatgttggcctcaaatttcacgttatagagcttcagttcgcacacaatcatcaaaagttgagatgattcaatctctattcaagcctgtggctaatactaataaggatgaaggtatcatcagggaggtgctgttggactttgaaattacttcattcaaaagaaagcctcaacaaattataattttcagggatggagtgagtgaatcacagttcaaccaggtgctcaatattgagttaagtcaaatcattgaggcatgcaaacaccttgatgaaaaatgggatccaaagttcactttgattattgcccagaagaatcatcatactaggttctttcaggccaatgctagagatcaaactaatgttccaccaggaaccgttattgacaacactgtctgtcatcccaaaaacaatgacttctacttgtgtgctcaagctgggatgattgggacaactcgacctactcactaccatgttttacacgatgaaatcggattctcagctgatgaagtgcaagaattagtgcattcattgtcttatacgtatcagaggagcacaactgctgtatcattagtcgctcccatttgctatgcccacttggcagcagcccagatggcacaatttatgaagtttgatgaacattctgagacttcttcaacccatggtggactcacatctgctagcgcacctttagtacctcaattaccacgtcttcacaaacaagtcatcaactccatgttcttttgttaatattttacatcatcttccttccacaaaaatttaattataaatttgacttttctgctgtccctcccttttgaagctgttctcgtactactcattcaaaaagatagcattttaagagttatgttatatttaattgtaaaaatattaacataactctcaaaaacgtcatgtcgaaggaacagcttggacagggaccagagagaagccaatttttcatatgaatgcctgtcattaggaactatctaggattgtttaaaatcgaatcaaatcgagtgtaaaactgaaaattgatccaagaaatcaatggtgattgatttggtttaattctctaattttccaaaccgcggttgggttcggttctcttaat

SEQ ID NO: 153 - DNA, 3216 bp, Glycine max
  source 1..3216: mol_type = genomic DNA
atggaggtctcaaaacgtgtgcctatggcgaggaaagaggttgggtccaagggagagcccagacaactattagccaaccattttggagtttgcctagtcaagcccaaggatgatattgatggctacttctaccattatgatgttgccatgagttatgaagatgggaaccctgttgaggccaagggtgtagggagaaaggtcttaaatcaagtttgtgaaacatatgttgaactgagaaacatgagttttgcatatgatggtgaaaaaagtctattcactcttggtcctctagcaagtcagaggcttcaatatcctgttgtgttggaggatgtttcatcaaggagggttggaaagaatggaaaccctgctgagagtcctaagggaggatatacaaaaagaatgagaattaggcatcagtttcggccaaaaactatcaacgtggatatcaaatatgcagccaaaattccattgcaagcaattgaagatgcattgcgtggtcgggattctgagaaatctcaggaagcagtgagggttctagacatcatactgagacagcattctgcaaaccagggatacctccttgttcgccaatccttctttcatgacaatcgaagaacctgtactgatataggaggtggtgtgcaagggtgccgcggttttcattcaagctttcgagtcacacaaggaggtttatctctcaacatggatgtgacaaccacaatgattgtaaagcctggccctgtggtggacttccttctccagaatcagagtgttcagaacccaaactacattgattggaccaaggcaaagagaatgctgaagaacctaagaatcagggctaatggtgttgagttcaaaatctctggattgagtgataacacttgcaggaatcagaaatttcttttaaggcaaaagggtacgaatggtgaagtgcaggaaagggaaatcacagttcatgactactttacacgccaaaaactgattggcctgaactattctgctgacatgccatgcatcaatgttggcaaaccaaaacgcccgtcttattttccaatagagctatgtgaaatggtctcgttgcagcgttacaccaaggctctaacaaatttgcaaagggctcagctagtggagaagacaaggcaaaagccccaagttaggagacaagctttggaagatgccttaagaagcagcagatatgacgatgaacctatgcttcgctcttctgggattaccattgaacctaactttgttagactcgttggtcgtgtattggaacccccaaagcttatagttggaggagagaagagcatcattccccggaatgggcgctggaatttcaacaataagaaactatatgaacctttgatgattggtcgttgggccattgtaaacttctcaagtcggtgtgacacaagactcctgatagaactcattaggaggtgtgctgcagctaaagggatgaccatgagcaatagtctctttgataaagtaattgaagaggatggttgcttcatacgtgaaccaccaaatgtcagggtagagagaatgtatgcaaagctgaggaccactctgccgcacgagaaacctcactttctgttgtgtattcttccagagaaaaagaattctgacatttatggtccttggaagaagaaaagtcttgttgaagaagggattgtaacacaatgtattgcaccaacaaagattaatgatcaatacattactaatgtacttttgaaaattaatgcaaagtatggtgggatgaattcgtatctgtcagttgagctttgtaattccattccatttgtttcagctgtaccaaccttgattcttggtatggacgtttctcatggatctcctggtcgatcagatgtgccctctattgctgcggttgtgagctcaagatgttggcctcaaatttcacgttatagagcttcagttcgcacacaatcatcaaaagttgagatgattcaatctctattcaagcctgtggctaatactaataaggatgaaggtatcatcagggaggtgctgttggactttgaaattacttcattcaaaagaaagcctcaacaaattataattttcagggatggagtgagtgaatcacagttcaaccaggtgctcaatattgagttaagtcaaatcattgaggcatgcaaacaccttgatgaaaaatgggatccaaagttcactttgattattgcccagaagaatcatcatactaggttctttcaggccaatgctagagatcaaactaatgttccaccaggaaccgttattgacaacactgtctgtcatcccaaaaacaatgacttctacttgtgtgctcaagctgggatgattctgtgccactttggacaacctctttccccctttggccatggcggaatccaccgtcgtgaccctcccggaactcctctccgtcaccgccgtgggcctggccccctccggcggcatcttggtgggcgtgaacctggagttccctggtttcccttgttgtcaccgctgacgtccaacatcgagatgtgcatctcgcacattggttggtggggacaactcgacctactcactaccatgttttacacgatgaaatcggattctcagctgatgaagtgcaagaattagtgcattcattgtcttatacgtatcagaggagcacaactgctgtatcattagtcgctcccatttgctatgcccacttggcagcagcccagatggcacaatttatgaagtttgatgaacattctgagacttcttcaacccatggtggactcacatctgctagcgcacctttagtacctcaattaccacgtcttcacaaacaagtcatcaactccatgttcttttgttaatattttacatcatcttccttccacaaaaatttaattataaatttgacttttctgctgtccctcccttttgaagctgttctcgtactactcattcaaaaagatagcattttaagagttatgttatatttaattgtaaaaatattaacataactctcaaaaacgtcatgtcgaaggaacagcttggacagggaccagagagaagccaatttttcatatgaatgcctgtcattaggaactatctaggattgtttaaaatcgaatcaaatcgagtgtaaaactgaaaattgatccaagaaatcaatggtgattgatttggtttaattctctaattttccaaaccgcggttgggttcggttctcttaat

SEQ ID NO: 154 - DNA, 1550 bp, Glycine max
  source 1..1550: mol_type = genomic DNA
gaccatgagcaatagtctctttgataaagtaattgaagaggatggttgcttcatacgtgaaccaccaaatgtcagggtagagagaatgtatgcaaagctgaggaccactctgccgcacgagaaacctcactttctgttgtgtattcttccagagaaaaagaattctgacatttatggtccttggaagaagaaaagtcttgttgaagaagggattgtaacacaatgtattgcaccaacaaagattaatgatcaatacattactaatgtacttttgaaaattaatgcaaagtatggtgggatgaattcgtatctgtcagttgagctttgtaattccattccatttgtttcagctgtaccaaccttgattcttggtatggacgtttctcatggatctcctggtcgatcagatgtgccctctattgctgcggttgtgagctcaagatgttggcctcaaatttcacgttatagagcttcagttcgcacacaatcatcaaaagttgagatgattcaatctctattcaagcctgtggctaatactaataaggatgaaggtatcatcagggaggtgctgttggactttgaaattacttcattcaaaagaaagcctcaacaaattataattttcagggatggagtgagtgaatcacagttcaaccaggtgctcaatattgagttaagtcaaatcattgaggcatgcaaacaccttgatgaaaaatgggatccaaagttcactttgattattgcccagaagaatcatcatactaggttctttcaggccaatgctagagatcaaactaatgttccaccaggaaccgttattgacaacactgtctgtcatcccaaaaacaatgacttctacttgtgtgctcaagctgggatgattgggacaactcgacctactcactaccatgttttacacgatgaaatcggattctcagctgatgaagtgcaagaattagtgcattcattgtcttatacgtatcagaggagcacaactgctgtatcattagtcgctcccatttgctatgcccacttggcagcagcccagatggcacaatttatgaagtttgatgaacattctgagacttcttcaacccatggtggactcacatctgctagcgcacctttagtacctcaattaccacgtcttcacaaacaagtcatcaactccatgttcttttgttaatattttacatcatcttccttccacaaaaatttaattataaatttgacttttctgctgtccctcccttttgaagctgttctcgtactactcattcaaaaagatagcattttaagagttatgttatatttaattgtaaaaatattaacataactctcaaaaacgtcatgtcgaaggaacagcttggacagggaccagagagaagccaatttttcatatgaatgcctgtcattaggaactatctaggattgtttaaaatcgaatcaaatcgagtgtaaaactgaaaattgatccaagaaatcaatggtgattgatttggtttaattctctaattttccaaaccgcggttgggttcggttctcttaat

SEQ ID NO: 155 - DNA, 3355 bp, Glycine max
  source 1..3355: mol_type = genomic DNA
gcagttgttatactttcttatatttatttgtcagtgaattagaagcaaaagtgactattttttttaataccttttctggttgtcatcctctttccactaaatcccaccaaaaacccttcaaaatcccaaaacccttccaaagataagttgcttgggttcttccttctaccgcccaccgtcccaggattgaactcaactcaggaaactcggactcgtggaatgaacgatggaggttgcgattacgagagctaagggaggaatgacggaggaagttcctgggattgtagaagctgctgaacctccaacatcatcacaatcacctgctgatgtgccacataatttggaaacagaacaaatgactcctacaaagtattctattatcagtaggaatggggttgggaccacaggaaaacacatacctttacttgtgaatctctttgaagttgctgttaatgttccagacacagtattttttcagtatagtgttgctattactttcgaagataaacaagctgttgaaagcaagggcattgggagaaaagtgattgataggctttaccaaacatactcttctgaacttggtggcaaaaggtttgtatatgatggagggaaaactttgtacacagtgggtcctctgccactaaataagtacgagttcaaagtgttgctggagaaatcatttacaaaacgtagtgccaagagtcctggtgctaatggaagccttcatgaggaaactaaaaggtcaaaacattcatttcagtcaaagacattcatggtggagataagttttgctaccaaaataccacttcagtccattgttatttccttgaaagaggttgagtcggataccaattctcaagatgctttgagagtgcttgatactatactgaggcagcgtgcagctaactgtgggtgtctcttggtaaggcaatctttttttcatgatgactcaagaaatttcaatgatgttggggctggtgtaacagcagtctcaggttttcattccagttttcgttccacacagcgaggattgtctctcaatattgacgtgtcaacaactattatcataaaacctggacctgtaattgattttctgttatcaaatcagcaagtgaaggaaccccgttatattgactgggaaaaggcgaaaaaaatgcttaaaaatttaagggtgcaagcaactcatcataaccaggaatttaaaatttctgggttgagtgagaaaccatgcattcagcaactttttagtatgaaggttaaaaatgatgacaacaatagcagagggcagacagtggatattactgtttatgaatattttgccaaacactgtggcatagagttgacctcatctgcttatcttccatgtcttgatgttgggaaaccaaaacgtcccgtctatcttcccttggagctatgttcacttgtttccctccaacggtatacaaaggttttatctctgatgcaaagagcatctttagttgaaaaatcacgccaaaagcctcaagatagaatcaaaattttaaaaagtgctgtaggaaaatgctatgatgatgatcctgttcttgctgcatgtggcatttctattgagaaacaactgaatctgattgaaggtcgtgttcttgaaacaccaaagttgaaggttggtaagaatgatgattgcatcccccataacggaaggtggaattttaataagaagacacttctacaagcatcacatattgattattgggctgttgtcaacttttctgcaagttgtgatactagttacatatcaagggagctgatcagatgtggaatgagcaagggcattaacattgaacggccatatactttgatagaggaggaaccacagttgagaaaatctcaccctgttgcaagggttgaaagaatgtttgacctgcttgcatcaaaactgaatagagagccaaagttgattctttgtgtcttgccagagaggaaaatttgtgatatatatgggccttggaaaaagaagtgtctgagtgaaattggtgttgtcacacagtgcattgcccctgtcaagatcactaatcaataccttactaatgttcttcttaaaatcaattctaagcttggaggaataaattctctgttggcaatagagcattctgggcatcttcccctgattaaagataccccaacgatgattttggggatggatgtctctcacaattcacttggtcgattagatagtccatcaatagcagctgttgttggatctcgacattggccactgatttcaaggtatagagcgtctgtgagaatgcaggcatccaaggtggagatgattgatgctctatacaagccattggaaaatgggagtgatgatggtattatcagagaattgcttttagatttctatgattctagtaatggacgcaagccaactcaatttattgtattcagggatggagttagtgaatcacaattcgaacaagttttaactatcgagcttaaccagataatcaaggcctatcaacatcttggtgaggttaatgttccccagttcactgtgattgtggcacaaaaaaagcatcatattaagctgtttctgcctaatggcccagaaaatgttcctcctgggacggttgtggatacaacaattacgcatccaagaaattatgatttttacatgtgtgctcatgcagggatgcttggaacatccaggcctgtacattatcatgtgctacttgatgagattggtttctcggcagatggcttgcaaaatttgatccattcgttgtcctatgtgaaccaaaggagcacaattgcaacctcagttgtggcacccatatgctatgctcaccatgctgcagctcagatgggacaacttttgaattttgatgattcatcagaaacaggttcaagtcctgcttcagagggaggcatccccatcccagagcttccaaggttgcacaggaatgtcaggagttccatgttcttctgttgaggtgtgtagatgacaggtgctagtaaatacatttagattgatcaaaagtgtaaatgtacatttggtataacctgcaaacatatgaagcccaaattttgtttgatggggagatggattcgtgggctagggtacagtctacatattagtgatatgaattgtcattttgagacatcaatcacggtaattgagtcgcatgggcttactagcttttttgcatatattgcagctatgaaatatttctacccttccttttttttagagaaatgtgattttatgtcaaatgctctgatttagtgtgtttggttggatatttggggagcttttaagtcatttgattagctattaattttgacaattttgtttggcacactaaggttttagaggagc

SEQ ID NO: 156 - DNA, 3133 bp, Glycine max
  source 1..3133: mol_type = genomic DNA
aaaaaaagtccattctgtgtcttgttacgtccaaaacgccgtttccttgtgtcagtgacaaacgatttttggccactccgcgatgtcgctgggtaacgctaagggaggaatgacggaggaagttcctgggattgtagaagctgctgaacctccaacatcatcacaatcacctgctgatgtgccacataatttggaaacagaacaaatgactcctacaaagtattctattatcagtaggaatggggttgggaccacaggaaaacacatacctttacttgtgaatctctttgaagttgctgttaatgttccagacacagtattttttcagtatagtgttgctattactttcgaagataaacaagctgttgaaagcaagggcattgggagaaaagtgattgataggctttaccaaacatactcttctgaacttggtggcaaaaggtttgtatatgatggagggaaaactttgtacacagtgggtcctctgccactaaataagtacgagttcaaagtgttgctggagaaatcatttacaaaacgtagtgccaagagtcctggtgctaatggaagccttcatgaggaaactaaaaggtcaaaacattcatttcagtcaaagacattcatggtggagataagttttgctaccaaaataccacttcagtccattgttatttccttgaaagaggttgagtcggataccaattctcaagatgctttgagagtgcttgatactatactgaggcagcgtgcagctaactgtgggtgtctcttggtaaggcaatctttttttcatgatgactcaagaaatttcaatgatgttggggctggtgtaacagcagtctcaggttttcattccagttttcgttccacacagcgaggattgtctctcaatattgacgtgtcaacaactattatcataaaacctggacctgtaattgattttctgttatcaaatcagcaagtgaaggaaccccgttatattgactgggaaaaggcgaaaaaaatgcttaaaaatttaagggtgcaagcaactcatcataaccaggaatttaaaatttctgggttgagtgagaaaccatgcattcagcaactttttagtatgaaggttaaaaatgatgacaacaatagcagagggcagacagtggatattactgtttatgaatattttgccaaacactgtggcatagagttgacctcatctgcttatcttccatgtcttgatgttgggaaaccaaaacgtcccgtctatcttcccttggagctatgttcacttgtttccctccaacggtatacaaaggttttatctctgatgcaaagagcatctttagttgaaaaatcacgccaaaagcctcaagatagaatcaaaattttaaaaagtgctgtaggaaaatgctatgatgatgatcctgttcttgctgcatgtggcatttctattgagaaacaactgaatctgattgaaggtcgtgttcttgaaacaccaaagttgaaggttggtaagaatgatgattgcatcccccataacggaaggtggaattttaataagaagacacttctacaagcatcacatattgattattgggctgttgtcaacttttctgcaagttgtgatactagttacatatcaagggagctgatcagatgtggaatgagcaagggcattaacattgaacggccatatactttgatagaggaggaaccacagttgagaaaatctcaccctgttgcaagggttgaaagaatgtttgacctgcttgcatcaaaactgaatagagagccaaagttgattctttgtgtcttgccagagaggaaaatttgtgatatatatgggccttggaaaaagaagtgtctgagtgaaattggtgttgtcacacagtgcattgcccctgtcaagatcactaatcaataccttactaatgttcttcttaaaatcaattctaagcttggaggaataaattctctgttggcaatagagcattctgggcatcttcccctgattaaagataccccaacgatgattttggggatggatgtctctcacaattcacttggtcgattagatagtccatcaatagcagctgttgttggatctcgacattggccactgatttcaaggtatagagcgtctgtgagaatgcaggcatccaaggtggagatgattgatgctctatacaagccattggaaaatgggagtgatgatggtattatcagagaattgcttttagatttctatgattctagtaatggacgcaagccaactcaatttattgtattcagggatggagttagtgaatcacaattcgaacaagttttaactatcgagcttaaccagataatcaaggcctatcaacatcttggtgaggttaatgttccccagttcactgtgattgtggcacaaaaaaagcatcatattaagctgtttctgcctaatggcccagaaaatgttcctcctgggacggttgtggatacaacaattacgcatccaagaaattatgatttttacatgtgtgctcatgcagggatgcttggaacatccaggcctgtacattatcatgtgctacttgatgagattggtttctcggcagatggcttgcaaaatttgatccattcgttgtcctatgtgaaccaaaggagcacaattgcaacctcagttgtggcacccatatgctatgctcaccatgctgcagctcagatgggacaacttttgaattttgatgattcatcagaaacaggttcaagtcctgcttcagagggaggcatccccatcccagagcttccaaggttgcacaggaatgtcaggagttccatgttcttctgttgaggtgtgtagatgacaggtgctagtaaatacatttagattgatcaaaagtgtaaatgtacatttggtataacctgcaaacatatgaagcccaaattttgtttgatggggagatggattcgtgggctagggtacagtctacatattagtgatatgaattgtcattttgagacatcaatcacggtaattgagtcgcatgggcttactagcttttttgcatatattgcagctatgaaatatttctacccttccttttttttagagaaatgtgattttatgtcaaatgctctgatttagtgtgtttggttggatatttgg

SEQ ID NO: 157 - DNA, 3280 bp, Glycine max
  source 1..3280: mol_type = genomic DNA
gctaatcatataggagtggccaaaacaaatttgagcaatcttttttgtttcttttctttaattacagacccatggtgcttcgtggaaacattcttcttttctaccccagcttgatgtgataatggatatatgacactatcctttagagaaaaactgcatctaactaagctactattcacaggacagataatggtgtgaatttggattgattttcaccatgggttgctttacataactttcatgcgctaagggaggaatgacggaggaagttcctgggattgtagaagctgctgaacctccaacatcatcacaatcacctgctgatgtgccacataatttggaaacagaacaaatgactcctacaaagtattctattatcagtaggaatggggttgggaccacaggaaaacacatacctttacttgtgaatctctttgaagttgctgttaatgttccagacacagtattttttcagtatagtgttgctattactttcgaagataaacaagctgttgaaagcaagggcattgggagaaaagtgattgataggctttaccaaacatactcttctgaacttggtggcaaaaggtttgtatatgatggagggaaaactttgtacacagtgggtcctctgccactaaataagtacgagttcaaagtgttgctggagaaatcatttacaaaacgtagtgccaagagtcctggtgctaatggaagccttcatgaggaaactaaaaggtcaaaacattcatttcagtcaaagacattcatggtggagataagttttgctaccaaaataccacttcagtccattgttatttccttgaaagaggttgagtcggataccaattctcaagatgctttgagagtgcttgatactatactgaggcagcgtgcagctaactgtgggtgtctcttggtaaggcaatctttttttcatgatgactcaagaaatttcaatgatgttggggctggtgtaacagcagtctcaggttttcattccagttttcgttccacacagcgaggattgtctctcaatattgacgtgtcaacaactattatcataaaacctggacctgtaattgattttctgttatcaaatcagcaagtgaaggaaccccgttatattgactgggaaaaggcgaaaaaaatgcttaaaaatttaagggtgcaagcaactcatcataaccaggaatttaaaatttctgggttgagtgagaaaccatgcattcagcaactttttagtatgaaggttaaaaatgatgacaacaatagcagagggcagacagtggatattactgtttatgaatattttgccaaacactgtggcatagagttgacctcatctgcttatcttccatgtcttgatgttgggaaaccaaaacgtcccgtctatcttcccttggagctatgttcacttgtttccctccaacggtatacaaaggttttatctctgatgcaaagagcatctttagttgaaaaatcacgccaaaagcctcaagatagaatcaaaattttaaaaagtgctgtaggaaaatgctatgatgatgatcctgttcttgctgcatgtggcatttctattgagaaacaactgaatctgattgaaggtcgtgttcttgaaacaccaaagttgaaggttggtaagaatgatgattgcatcccccataacggaaggtggaattttaataagaagacacttctacaagcatcacatattgattattgggctgttgtcaacttttctgcaagttgtgatactagttacatatcaagggagctgatcagatgtggaatgagcaagggcattaacattgaacggccatatactttgatagaggaggaaccacagttgagaaaatctcaccctgttgcaagggttgaaagaatgtttgacctgcttgcatcaaaactgaatagagagccaaagttgattctttgtgtcttgccagagaggaaaatttgtgatatatatgggccttggaaaaagaagtgtctgagtgaaattggtgttgtcacacagtgcattgcccctgtcaagatcactaatcaataccttactaatgttcttcttaaaatcaattctaagcttggaggaataaattctctgttggcaatagagcattctgggcatcttcccctgattaaagataccccaacgatgattttggggatggatgtctctcacaattcacttggtcgattagatagtccatcaatagcagctgttgttggatctcgacattggccactgatttcaaggtatagagcgtctgtgagaatgcaggcatccaaggtggagatgattgatgctctatacaagccattggaaaatgggagtgatgatggtattatcagagaattgcttttagatttctatgattctagtaatggacgcaagccaactcaatttattgtattcagggatggagttagtgaatcacaattcgaacaagttttaactatcgagcttaaccagataatcaaggcctatcaacatcttggtgaggttaatgttccccagttcactgtgattgtggcacaaaaaaagcatcatattaagctgtttctgcctaatggcccagaaaatgttcctcctgggacggttgtggatacaacaattacgcatccaagaaattatgatttttacatgtgtgctcatgcagggatgcttggaacatccaggcctgtacattatcatgtgctacttgatgagattggtttctcggcagatggcttgcaaaatttgatccattcgttgtcctatgtgaaccaaaggagcacaattgcaacctcagttgtggcacccatatgctatgctcaccatgctgcagctcagatgggacaacttttgaattttgatgattcatcagaaacaggttcaagtcctgcttcagagggaggcatccccatcccagagcttccaaggttgcacaggaatgtcaggagttccatgttcttctgttgaggtgtgtagatgacaggtgctagtaaatacatttagattgatcaaaagtgtaaatgtacatttggtataacctgcaaacatatgaagcccaaattttgtttgatggggagatggattcgtgggctagggtacagtctacatattagtgatatgaattgtcattttgagacatcaatcacggtaattgagtcgcatgggcttactagcttttttgcatatattgcagctatgaaatatttctacccttccttttttttagagaaatgtgattttatgtcaaatgctctgatttagtgtgtttggttggatatttgg

SEQ ID NO: 158 - DNA, 3227 bp, Glycine max
  source 1..3227: mol_type = genomic DNA
gctaatcatataggagtggccaaaacaaatttgagcaatcttttttgtttcttttctttaattacagacccatggtgcttcgtggaaacattcttcttttctaccccagcttgatgtgataatggatatatgacactatcctttagagaaaaactgcatctaactaagctactattcacaggacagataatgctaagggaggaatgacggaggaagttcctgggattgtagaagctgctgaacctccaacatcatcacaatcacctgctgatgtgccacataatttggaaacagaacaaatgactcctacaaagtattctattatcagtaggaatggggttgggaccacaggaaaacacatacctttacttgtgaatctctttgaagttgctgttaatgttccagacacagtattttttcagtatagtgttgctattactttcgaagataaacaagctgttgaaagcaagggcattgggagaaaagtgattgataggctttaccaaacatactcttctgaacttggtggcaaaaggtttgtatatgatggagggaaaactttgtacacagtgggtcctctgccactaaataagtacgagttcaaagtgttgctggagaaatcatttacaaaacgtagtgccaagagtcctggtgctaatggaagccttcatgaggaaactaaaaggtcaaaacattcatttcagtcaaagacattcatggtggagataagttttgctaccaaaataccacttcagtccattgttatttccttgaaagaggttgagtcggataccaattctcaagatgctttgagagtgcttgatactatactgaggcagcgtgcagctaactgtgggtgtctcttggtaaggcaatctttttttcatgatgactcaagaaatttcaatgatgttggggctggtgtaacagcagtctcaggttttcattccagttttcgttccacacagcgaggattgtctctcaatattgacgtgtcaacaactattatcataaaacctggacctgtaattgattttctgttatcaaatcagcaagtgaaggaaccccgttatattgactgggaaaaggcgaaaaaaatgcttaaaaatttaagggtgcaagcaactcatcataaccaggaatttaaaatttctgggttgagtgagaaaccatgcattcagcaactttttagtatgaaggttaaaaatgatgacaacaatagcagagggcagacagtggatattactgtttatgaatattttgccaaacactgtggcatagagttgacctcatctgcttatcttccatgtcttgatgttgggaaaccaaaacgtcccgtctatcttcccttggagctatgttcacttgtttccctccaacggtatacaaaggttttatctctgatgcaaagagcatctttagttgaaaaatcacgccaaaagcctcaagatagaatcaaaattttaaaaagtgctgtaggaaaatgctatgatgatgatcctgttcttgctgcatgtggcatttctattgagaaacaactgaatctgattgaaggtcgtgttcttgaaacaccaaagttgaaggttggtaagaatgatgattgcatcccccataacggaaggtggaattttaataagaagacacttctacaagcatcacatattgattattgggctgttgtcaacttttctgcaagttgtgatactagttacatatcaagggagctgatcagatgtggaatgagcaagggcattaacattgaacggccatatactttgatagaggaggaaccacagttgagaaaatctcaccctgttgcaagggttgaaagaatgtttgacctgcttgcatcaaaactgaatagagagccaaagttgattctttgtgtcttgccagagaggaaaatttgtgatatatatgggccttggaaaaagaagtgtctgagtgaaattggtgttgtcacacagtgcattgcccctgtcaagatcactaatcaataccttactaatgttcttcttaaaatcaattctaagcttggaggaataaattctctgttggcaatagagcattctgggcatcttcccctgattaaagataccccaacgatgattttggggatggatgtctctcacaattcacttggtcgattagatagtccatcaatagcagctgttgttggatctcgacattggccactgatttcaaggtatagagcgtctgtgagaatgcaggcatccaaggtggagatgattgatgctctatacaagccattggaaaatgggagtgatgatggtattatcagagaattgcttttagatttctatgattctagtaatggacgcaagccaactcaatttattgtattcagggatggagttagtgaatcacaattcgaacaagttttaactatcgagcttaaccagataatcaaggcctatcaacatcttggtgaggttaatgttccccagttcactgtgattgtggcacaaaaaaagcatcatattaagctgtttctgcctaatggcccagaaaatgttcctcctgggacggttgtggatacaacaattacgcatccaagaaattatgatttttacatgtgtgctcatgcagggatgcttggaacatccaggcctgtacattatcatgtgctacttgatgagattggtttctcggcagatggcttgcaaaatttgatccattcgttgtcctatgtgaaccaaaggagcacaattgcaacctcagttgtggcacccatatgctatgctcaccatgctgcagctcagatgggacaacttttgaattttgatgattcatcagaaacaggttcaagtcctgcttcagagggaggcatccccatcccagagcttccaaggttgcacaggaatgtcaggagttccatgttcttctgttgaggtgtgtagatgacaggtgctagtaaatacatttagattgatcaaaagtgtaaatgtacatttggtataacctgcaaacatatgaagcccaaattttgtttgatggggagatggattcgtgggctagggtacagtctacatattagtgatatgaattgtcattttgagacatcaatcacggtaattgagtcgcatgggcttactagcttttttgcatatattgcagctatgaaatatttctacccttccttttttttagagaaatgtgattttatgtcaaatgctctgatttagtgtgtttggttggatatttgg

SEQ ID NO: 159 - DNA, 3793 bp, Glycine max
  source 1..3793: mol_type = genomic DNA
aaaaactagtaatattgtactgtaccactcttaaatagagatacgcaccttattattgttaattcaattgaagttactgacacaagtaatcattgatgttacgttcgaactcgaaaatttcgctgtaaattttcttacaagtatttatcttaagcctttaatgcgctcacctcaattcatttctacaaacggcgtatttatccataaaaacaaaataggagcaagaaaaaaattagattctaattttaaaattaatttttttaaaaaagataattattttctcttgatattttccttattttttcaccacactctacccagaaagggagtgcacgatattcagtaatcacccactctcactcattcgtaaagttttttctggattctactcatttgtatttgtatagtttactaccaactgcaaataaaaaaaagaaaaagatgacgacctttcttccattcgaaactgttaccttcgctgcaataccagcaatagtacgttgcctctccccgctcacgccaacaacacttcgtaataccaaacaaacattcccttcaatttctctttctctctcaaaaaatgtctcctcgcggtggctccaagcagcaaccagattcacgccgtcaagcgccaccgtccgcggcggcggcggtgccttctcctcccggaagaggacgcggccgtggacgcggagaatcctccgttcccgcgccttctctggtgaatgcaccatctgctcctcctccggcttccaccatcggcgttccgtccggcgccgcgccttttcgtgctgcgttgccacctccggcggtggaatctctcacttccgcggtcgaaaagcaacttacaatgcaaccttcggcgccgtcgtcgtcgaaggcggtgaggttcaaggaacggccagggttcggtcttgctggggagaaaatcaaagttcgagcgaatcattttcaagtccaagtcgccgaacaagatctatttcattatgacgtctctatcaatcctgagattacttcgaagaaggtttctagagatgttatgactttgcttgtgcaagcgcatcgtgaaaagattctcggaaatcgcataccagcctacgatgggggaaagagtcttttcaccgctggatccttgcccttcgaatctaaggattttgtgatcgtgctaaaagacgacgatgaaccaggctcgtcgtcttcttcctctcctactaggaaaaaacgtgaacgcgagtatagagtcaccatcaggcttgcttccagaactgacattcaccacctcagtcagtttctcaggcgccgtcagttggattgtccttatgagactatccaggctcttgatgttgttctgcgtgctacaccgtctgaaaggttcgttgttgtgggaagatcgttcttctcaccttctttggggaaacctggatcgcttggtagcggaacggagtactggaggggctattaccagagccttcgcccaactcagatgggcctgtctcttaacattaatgtgtcggcgagggctttttatgagcctattcctgtgattgatttcattgaaagtcattttagggccaatccttccaggcctttgcctgatcaggatcgaatcaagcttaagagagtactgagaggagtgaaggtagaagtgactcatggaaagaatcttagacgttacaagatcactggagtcacaaaagaacaactcagaaagttaatgtttactcttgatgacaatagaacaaaaagctcagttgttcaatattttcatgagaaatacaatattgtgttgaagcatacgcttcttcctgctcttcaagctggtagtgacattaaaccaatttttctgcctatggagctttgtcaaattgtggctggacaaagatatacaaagagattgaatgaggagcaagtaactaatcttttaagggcatcttgtcagcgtcctcgtgatagagaaaactctatcagacaggtggtgaggcaaagtaatttcagcacagacaaatttgtgagtcactttggaattcaagtgagggaggatccagcattgcttgatgctcgagttcttcctgcaccaatgctaaaatatcatgacacaggtagagaatcaagtgttgaacccaaaatgggccaatggaatatgattgataagaaaatgtttaatgctggtgttgtggaacattggacttgcctcaacttttctggaaaaataaacagagagtttccaagtgcattttgtcataagttggccagaatgtgtagtaacaagggcatgcgttttaattcaaagcctttactgcccataacatctgctcaaagtagtcaaatagagagtgctcttgtaaatttgcataagcagtctattacaagactagcaaaccaaggaagactccaattgttgatcataattttgccagatttcgaggggtcctatgaaaaaataaagcgtatttgtgaaactgagctaggaatagtgtctcagtgttgtcagccgaggcatgtttgccagatgaagccacaatatcttgaaaatgtggccctcaagataaatgtgaaggttggtggcagtaacacagtattgaatgatgcaattgctagaataattcctcgtgtgtctgacagacctacattaatcttgggtgcggatgtaacacatccacagccaggggaagattctagtccttctattgctgcagtagttgcatctatggattggccttatgtaacaaggtacagaggagttgtttctgctcagactcaccgtgaagaaatcatccaagatctttataatacatgtgaagatcctgtgaaggggaaggtgcattcgggaattatcagggagttacttcgcgctttccgtttgtctactaatcagaagccagagaggattatattctacagggatggagtaagtgagggccaattcagccaggttttgctgtacgagatggatgcaatacggcgggcttgtgcttcactacaagaaggctatttaccccgtgttacttttgtggtggtccaaaaacgacaccacacaaggttatttcctgtagatcatggaagtcatgatcagacaaataaaagtggaaatataatgccagggactgtcgtagacacacacatatgccaccctcgggagtttgatttttacctcaacagtcatgctggaatgcaaggaactagtcgaccaacacattatcatgtgctgttcgatgaaaacaacttcactgctgacgggttgcaaatgtttactaataatttgtgttatacgtatgcaaggtgtactcgatcagtctcaatagttccacctgtgtattatgcacatttggctgccttcagggctcgctgttacattgaagttgcaacatcagattctggttctgcaagtggaggccgggctgctaactgtgaggttagattgccttcggttaaggaaaatgtgaaagatgtgatgtttttctgttaagcctgtgagatgcttttgtgaagatggggggatattgatatgaggttatgtatgattttgggctttatagagctactttataaacattttgctatcttttttttttttttttaatttgttgctgctacattcaaagttcagttaatatacaaagttcagttagctttcggttcgaatatatcttggcctcattcctagcatcagtagagttgtagctctcacctgaatacttgaatggttttgttgagacacaattggagcaatttttgcagcctggattatggatgtggatttagtcttaatatagtgatgcatttgaagtttcag

SEQ ID NO: 160 - DNA, 3684 bp, Glycine max
  source 1..3684: mol_type = genomic DNA
tggctgttggtcttctttttctacttataaggtcactactctctccccactcacgcataccacacttccttccctcctagtcaaaccaacaaatattctttctctcaaatcctctttcttactctaaaatgtctcgtcgcggtggctctaaacaacaaccagattcacgccatccagcaccaccgtctgcggcgccttctcccgccggaagaggacgcggccgtggccgcggagaattctcctcagttcccgctccttctccggtgaatgcaccatccgctcctcctccggcttccaccatcggcgttccttccggcgccgcacctgttcgtgccgcgtctccgtctccggcggcagaatctctcacttccgctgtcgaaaagcaacttacattgcaaccgtcggcgccttcgtcgacgaaggcggtgaggttcagtgaacggccagggttcggtcttgtagggaagaaaatcaaagttcgagcgaatcatttccaagtcaaagtcgctgaacaagatctatttcattatgacgtctctatcaatccggagattaattcgaagaaggtttgcagagatgttatgactctgcttgttcaagcgcaccgtgaaaagtttcttggaaatcgcataccggcctacgatgggcgaaagagtcttttcaccgccggacccttgcccttcgaatcgaaggattttgtgatcgtgctgaaggatgaagatgaaccaggctcgtcttcttccgcgcctgctagaaaaaaacgtgaacgcgagtttagggtcaccatcaggtttgcttccaggactgaccttcaccatctcgggcagtttctcaggcgtcgtcagttggattgtccttatgaaactattcaggctcttgatgttgttctgcgtgctactccatctgaaaggttcgatgtggtgggaagatcgtttttctcgccttttttggggaaacctggaacgcttggtagcggaacggagtattggaggggctattaccagagccttcgtccaactcagatgggcctgtctctaaatattgatgtgtcagcaagggcgttttatgaagctattcctgtgattgatttcattcaaatccattttaggctcaatccttccaagcctctgcctgatcaggatcgaatcaagcttaagagagcattgagaggaatcaaggtagaagttaatcacggaaagaatcttagacgttacaagatcactggagtcacaaaagaaccactcagagagttaatgtttactcttgatgacaaaagaacaaaaagctcagttgttcaatattttcatgagaaatacaatattgtgttgaagcatacacatcttcctgctcttcaagctggcagtgacagtaaaccaatttttttgcctgttgagctttgtcaaattgttgctggacagagatatacaaagagattgaatgaggagcaagtaactaatcttttaagggcaacttgtcagcgtcctcatgatagagaaaactctatcaaacaggttgtgaagcaaagtaatttcagcacagacaaatttgtgtgtcactttggaattcaagtgaaggaggaaccagcattgcttgatgctcgggttttgcctcccccaatgctaaaatatcatggcacaggtagagaatcatgtgttcaacccagaacaggtcaatggaatatgattgataagaaaatggttaatggtggcgctgtgcagcattggacttgcctcaacttttctggaaaaacaaaccgaggtttggcagcttcattttgtcaagagttggccaaaatgtgtaataacaagggcatgcgttttaacttggatcctttgctgcccataacatctgttcatagtagtcaagtagagagtgctcttgggaatgtgcataagcaggctattgcaaaactagcaaacgaaggaagactcgaattattgatcataattttgcctgatttgaagggatcctatgggaaaataaagcgtatttgtgaaactgagttagggatagtatctcagtgttgtcttccgaggcatgtttaccagatgaagccacaatatcttgaaaatgtggccctcaagataaatgtgaaggttggtggcagtaacacagtattgaatgatgcatttactagaagaattcctcacgtgtctgacttaccaacaataatcttgggtgcagatgtaacacatccacagccaggggaagattatagtccttctattgctgcagtagttgcatcaatggattggccttatgtaacaaagtacagaggagttgtttctgctcaaactcaccgtgaagaaatcatccaagatctttataatacacatgaagatcctgtgaggggaaagacacattcgggaattatcagggaattacttcgtgctttccgtttatcaactaagactaagccagagaggattatattctacagagatggagtaagtgagggccaattcagccaggttttgctgtacgagatggatgcaatacgacgcgcttgtgcctcactacaagaagactatatgccccgtgttacttttgtggtggtccagaaaagacaccacacaaggttatttcctgcagaacacggaagtcgtgatcagacagataaaagtggaaatatattgccagggactgtcgtggacactcaaatatgccaccctcgggagtttgatttttacctcaacagtcatgctggaatacaaggaactagtcgaccaacacattatcatgtgctgttcgatgaaataacttcactgctgacgagttgcaaatgcttacaaataacttgacttatacgtatgcaaggtgtactcgatcagtctcaatagttccgcctgcatattatgcacatttggctgccttcagggctcgctattacatggaaggtgaaacatcagattctggttctgcaagtggaggccggactgctaactttgaggttaaattgccttcggttaaggaaaatgtgaaagatgtgatgttcttctgttgaaggctgtggtatgcttttgtgaagatgggtttgcttttatgagatgctttttgtgaagattggggtggtgggggtattgatatgagattaagtttgtttttgggctttatagttttttataaacattttgctatctttttcttaattttagttgctgctacatgcaaagttcagttatatacaaagttcagttagcttttcggtccaaatatcttggcgtcgttcctagtatcattagagttgcaattttttgcaggctggatgacggatgggaatttaatctttactataatcatgcatttgaagtttcagatagtttacaacttaaacaacattttagcgaagaattgtaaggaataagcggtaaacagagcgttgtgggtagaaaagttgagcaataggaaattatggtcaacttgtaggaaaggcaatgttccgtcagcttgttatattaatttatttaaatagtaattattagttatgttataattataaaatgaagtttaaagttgtagttctaataaaaaaataatatatgatgtagacgatgaaggacaaggtgacaaaaatgcaaacgcgttcaacttttaagactacatttaatcttctttaaatagaagatgatattgatttgtacttttgttatgatcgtcatttggctatttaattggtacacttgt

SEQ ID NO: 161 - DNA, 5567 bp, Glycine max
  source 1..5567: mol_type = genomic DNA
ttcgaaaacgtgcgtggaaagaaaacaaagaacaaagacctttatgcgagaaaaaaaagataatcaatgttgggtcacacacaatcattctactggtcagtcttagtgagcgagcgtgttcactaaggtaactctttatcactcttttcttcgctgactccattatcaacgttttgaacaaaactctctctcttgttattattattcttctttttctcttttcactctcctttgtttgtcctttgaacccacccgtgaaccctccttcaaccgtcatcgttttgatcacatacacccactcttaaaccttcaaactctcttcgccttgggtaatgccggacggagaatcctccgtcgtcgtcgccggcggccaagcttccatggaaccctccttaagcgtctccaatcaactgcagtccctgagtctttcccaagacaaaaaccatgatgactcagtcaagaaagatccccggaaaattgcaagaaagtatcagttggagttatgcaaaaaagctatggaggaaaatataattgtgtatttagggacagggtgtgggaagacccacattgctgtgcttcttatgtatgggatgggtcatttgattcggaaaccgcagaagaacatatgtgtctttcttgcccctactgtggctttagtccatcagcaagcaaaggttatagcagactctactaattttaaggttgggacatactgtggaagttccaagcgcttgaaacgtcatcaagactgggagcaggagattggacaatatgaggttcttgttatgaccccacaaatattacttcataacttatctcattgcttcatcacaatggagatgattgcacttttgatatttgatgaatgccatcatgctcaagtcaaaagcaaccatgcttatgcagttatcatgaaagtcttctacaaaagtaattcctcaaaggttccccgtatatttggcatgactgcttcccctgttgtaggaaaaggtgcttctagtgaagcaaatctagcaaaaagcatcaatagtcttgaacatatacttgatgctaaggtatactctgttgaagacaaggaattgcaatcttttgtgaccactcctgtgattaatatatatcattatgtttcaactgcaagtggggaaactagcttgtacctgaaaattgaggagattaaacgccagtgcatagcaaaccttggtaggagtatagaagatcaccagaaaaggatgaatgcaaagaaacttctgaaccggatgcatgataatgtgattttcggtctgcagaatcttggcatttggggagcattgcaagctagtcatattcttctgagtggtgatcgttctgagaggcatgagttagtggaggctgaaggaaattcaagtgatgactctctgtgtgataaatatcttgctcaggctgctgaactgtttacttcacaatgcatgataggcgacagggtaactgatttatcttctgtggaaatattaaaagagccatttttctcagcaaagcttttacgactcattgggatattatccaactttaggttgcaaaagaacatgaaatgtataatttttgtgaatagaattgtgacagcaagatccctgtcatacattctacagaagctcaagcttctaagacaatggaggagtgatttcctagtaggagtccatgctggactgaagagtatgtcacgaaagaccatgaacatcattgttgataagtttcgctctggagagttgaatctactggttgcaaccaaagtgggtgaagaaggacttgacattcagacgtgttgcctcgtcatacgatttgatcttccagaaactgttgccagctttatacagtcaagaggtcgtgcacgtatgcctcagtcagaatatgcatttttggtggacagtggcaataagaaggaacttgacataattgatggctttgagaaagatgaataccgaatgaatatggaaattacttttcgaacatccaaggagacatacataatccctgaggaaagaatattcagagttgattcgtctggtgcttctgttagttctggatatagtatctcattgcttcaccagtattgttcaaagcttccacatgatgagtactttgaccccaagccatgtttttattacttagatgattcaggggggatttcctgccatataacattgccttccaatgcaccaataaaccaaattttaggtacaccacagttgtctatggaggcttccaaaagagatgcttgcctgaaagcaatagaagaactgtataatttaggcactttaagtgattgtctcttgccaaaacaagatgatgcagagccagaggcgcaggtttcaggctcttctgatgaagatgaatgtgaagatgccatatcaagaggagaattacatgagatgctagttccttctgcctttggacagtcatggataaatgaggataacatcgtccgtctcaactcttactacataaaattttgtccctatccagaggatagggtctacaaagagtttggtcttttcatcatggttcggcttccaatggaggctgagaaattggaacttgatctccatcttgctcatggtcgatctgtgatgacaaaatttgtcccatttggagttgtagaatttgacaaagatgagattaagatggcagagaattttcaagaaatgttcctcaaaattattcttgatagattagaattcgtttctgagtttgtagacttgggtatgggtgctgaatctcacacaggcacatcaaccttctaccttttgcttccagttgtattgcaagaatatggaaatgccatgaaagtagactggaagactgtgaagagatgcctttgttcaccaattttcaggcatccagctgatactatggataaaaaagttttccctttagatattcacctgcaacttgccaatggttacagaagtgtaagagatgtcgagaatagtttagtgtatgccccacataagaagaacttttattttgtcacgaatgttaactaccaaaagaatggatatagtcctcataatgattcaggcacttcaagctatgtggattacttcattgaaaagttttccattcacctcaaatgtccagaacaaccacttctacatgttaaaccagtctccaatttgcacaacctgctacacaaccgaaagcatgaggatgcagaaccacaggagctggacgaatacttaatttatttgcctcctgagctttgtgaactaaaaataataggtttttcgaaggatattggcagttccatatctttgctaccttcaattatgcaccgtcttggaaacttgctggtggctattgaactaaagcacaggctatcttcttcctttccagaggcagctgaaattagtgcccttagagttttagaagctctcactactgagaagtgtcaggagcgcttttcccttgaaagacttgaagtgcttggtgatgcttttcttaaatttgctgttgcacgtcatttttttctcatgcatgacagccttcatgaaggagaccttacaaaaaggcgctccaacgctgtgaataattccaatctgtttaagttggctatcaagcgcaatttgcaggtctatatatgcgatcagacatttgatcccactcagttttatgcattaggccgtccttgcccaagactttgtagcaatgaaaccaaagaaagcatacacttctgtttaaattctgttaaggaacaaggaaaagtaactgaaacccaatgtaacaaaaatcatcattggttacataggaaaacaattgctgatgtggttgaagctctggttggagcatttctagttgacagtggctttaaagctgcaattgcttttctttcatggattggcattcaagttgattttgaagcttcacaagtggttgatatttgcatagcaagtgctagttatttacctctttcttctgaagtagacattccttctcttgaaggtaagctaggacatcacttttttcataagggcctgcttctccaggcatttgtacatccttcttacaataagcttggaggaggctgttatcagcgattggagtttcttggagatgctgtcttggattatttgattacttcatatgtattctcagcttatcccaaactaaagcctggtcaattgacagatttgagatcattgtctgttaacaacaaggcatttgcttgtctagcggtagatcgcagttttgataaatttcttttatgtgattcaagtggcctgtctgaggcaataaaaaagtatgttgactacattagaagacctgtatcagataacagcattaaagaagggccaaaatgtcccaaggcactgggtgacttagtggaatcttgtgttggtgccatccttcttgattcagggttcaatttgaacaaagtttggaagattatgacttcgttcttggactcaatcatgaaattctcatcaagcttgcagctcagtcctgttagggatttgcgagaactttgccaatctcataatatggagttggagtttctgccagtgccctcaaaattgactaaaaggttttcagttgaagctaaagtgagtgggaatggtgtatgtgaaacagcttcagcaactggtcaaaataaaaaagaggcttgcagaattgcttcactgctacttttttcaaagttcaaggctcaaggctggaaagcaaagtcaaaaactttggaagaagttctggaatcaacttctaaaatggaaccaaaacttattggctatgatgagactcccattgatgtaacagataccaataaacacatagtggttaatgcagacccatacaacaagtctaacccagaaattcgccctatgcaagagacagatgaaatatgctctccatgtgtgaaacctttcggccaacggcttcaatcttctgctaagggaaagcttagtcaaatatttgaaaatcgtgattgcagcagtgacttgtcagggacaggaacggcaagatcacgattgtatgaattatgtgcttcttattgttggaaacctccttcatttgaatgctgcaaggcagagggacctgaccacctgaaacaattcacttgcaaggtgaccttagagatagaagaggcccagaatttgattttagagtttgttggggaacctctttcaaagaagaaagatgcagcagagagtgcggcagagggtgcattttggtatctacaacatgaaggttacttgcctagtagtggtaattgacatattgtagaacaattatcatgtcacataaatcccaaggcaattggtgtaggcaatgtcttgattattgagggtgtcgaatgtgttgttataggtaatcatataatctagaaggcaataatagtacaggtttagtaactcagggccagggagggttccctaatggtaaatctattgtaaaggtattattcatgtatgtattattgtagtgtcaaagttacatctaacattgtatgtaaaccatccctcgattataacagtgaattttctatttactacgtttgaaatgtaaatataagctcgcgagacatttgaccattatta

SEQ ID NO: 162 - DNA, 5599 bp, Glycine max
  source 1..5599: mol_type = genomic DNA
tctaaaaagccattttgtttggaaaatactagtaacaaaaaacgacatgggggagtgttgggaatgaagtgatgcgaaaacgtgcgtggaaacaaaacaaagaacaaagactttcagtcattcagtctttagtgagcgtgttcactaaggtaactcttcactctcttctccgttgactccataatcaacgttttggttgggaacagaagtgaatgaagtgactacaaacaaagctctctctctgttattattattattattcattttctcttttcacactcctttgtcctttgaacccacccgtgaactctccaaccgtcgtcgttttgatttcacccactctcatacctccaaactctcttttcctcggctaatgccggacggagaatcctctgccgtcgccggcggccaagtttccatggaaccctctttaagcctctccgatcaactacagtccctgagtctttcccaagtaaaaaatcatgatgactcggtcaagaaagatccccggaagattgcaagaaggtatcagttggagttgtgcaaaaaagctatggaggaaaatataattgtgtatttagggacagggtgtgggaagacccacattgctgtgcttcttatgcatgagatgggtgatttgattcggaaaccacagaagaacatatgtgtctttcttgctcccactgtggctttagtccatcagcaagcaaaggttatagcagactctactgattttaaggttgggacatactgtggaagttccaagcgcttgaaacatcatcaagactgggagcaggagatgggacaatatgaggttcttgttatgaccccacaaatattacatcataacttatcccattgcttcatcacaatggagatgattgcacttttgatatttgacgaatgtcatcatgctcaagtcaaaagcaaccatgcttatgcagtaatcatgaaagtcttctacaaaagtaattccacaaaggttccccgtatatttggcatgactgcttcccctgttgtaggaaaaggtgcttctagtgaagcaaatttagcaaaaagcatcaacagtcttgaacatatacttgatgccaaggtatactctgttgaagacaaggaattgcaatcttttgtgaccactcctgtgattaatatatatcattatgtttcaactgcaagtggggaaactagcttgcacttgaaaattgaggagattaaacgccagtgcatagcaacccttggtaggagtatagaagatcaccagaaacggatgaatacaaagaaacttctgaaccggatgcatgataatgtgattttcggtctgcagaatcttggcatttggggagcattgcaagctagtcatattcttctgagtggtgatcattctgagaggcatgaattagtggaggcagatggaaattcaagtgatgactctctgtgtgataaatatcttgctcaggctgctgaactatttacttcacaatgcatgataggcgacagggtaactgatttatcttctgtggaaatattaaaagagccatttttctcagcaaagcttttacgactcattgggatactatccaactttaggttgcaaaagaacatgaaatgtataatttttgtgaatagaattgtgacagcaagatccctgtcatacatactacagaagctcaagcttctaagacaatggaggagtgattttctagtaggagtccatgctggactgaagagtatgtcacgaaagaccatgaacatcattgttgataaatttcgttctggagagttgaatctactggttgcaaccaaagtgggtgaagaaggacttgacattcagacatgttgtctcgtcatacgatttgatcttccagaaactgttgccagcttcatacagtcaagaggtcgtgcacgtatgcctcagtcagaatatgcatttttggtggacagtggcaataagaaggaaattgacgtaattgatggtttcaaggaagatgaataccgaatgaatatggaagttacttttcgaacatccaaggagacatacatcatccctgaggaaagaatattcagaattgattcgtctggtgcttctgttagttctggatatagtatctcattgcttcaccaatattgttcaaagcttccacacgatgagtactttgaccccaagccaagttttcattacttagatgattcagggggaatttcctgccacataacattgccttccaatgcaccaataaaccaaattttgggtacaccacagttatctatggaggcttccaaaagagaagcttgcctgaaagcaatagaagaactgtataatttgggcgctttaagtgattgtctcttgccaaaacaagatgatgcagagcctgaggtgcaggtttcaggctcttctgatgaagatgaatgtgaagatgccatatcaagaggaaaattacatgagatgctagttccttctgcctttggacagtcatggataaatgaggataacattgtccgtctcaactcttactacataaaattttgtccctatccagaggacagggtctacaaagagtttggtctattcatgatgacctgtcttccgatggaggctgagaaattggaacttgatctccatcttgctcatggtcgatctgtgatgacaatgtttgtcccatttggagttgtagaatttaacaaagatgagattaagatggcagagaattttcaagaaatgttcctcaaaattattcttgatagattagaattcatttccgagtttgtagacttgggtatgagtgctgaatctcactcaggcacatcaaccttctaccttttgcttccagttgtattgcaagaatatggaaatgccatggaagtagattggaagatagtgaagagatgcctttgttcaccaattttcaggcatccagctgatactatggataaaaaagttttccctttagatattcacctgcaacttgccaatggttacagaagtgtaagaaatgtcgagaatagtttagtgtatgccccacataagaagaacttttattttgtcacgaatgttaactatgaaaagaatggatatagtcctcataatgattcaggcacttcaagctatgtggattacttcattgaaaagttttccattcacctcaaatgtccgaagcaaccacttctgcatgtgaaaccggtctccaatttgcacaacctgttacacaacagaaagcgtgaggatgcagaaccacaggagctggacgaatacttaatttatttgcctcctgagctttgtgaactaaaagtaataggtttttcgaaggatattggcagttccatatctttgctgccctcaattatgcatcgtcttggaaacttgctggtggctattgaactaaagcacatgctatcttcttcctttccagaagcagctgaaattagtgccattagagttttagaggctctcaccactgagaagtgtcaggagcgcttttcccttgaaagacttgaagtgcttggtgatgctttccttaaatttgctgttgcacgtcatttttttctcatgcatgacagccttcatgaaggagaccttacaaaaaggcgttccaatgctgtaaataattccaatttgtttaagttggctattaagcgcaatttgcaggtctatatatgcgatcagacatttgatcccactcagttttatgcattgggccgtccttgcccaagagtttgtagcaatgaaaccgaagaaagcatacacttttgtttaaattctgttatgcaacaaggaaaagcaactgaaacccgatgtagcaaaaatcatcattggttacataggaaaacaattgctgatgtggttgaagctctggttggagcattcctagttgacagtggctttaaagctgcaattgcctttctttcatggattggcatacaagttgattttgaagcttcacaagtggttgatatctgcatagcaagtgctagctattcccctctttcttctgaagtagacattccttctcttgaaggtaagctaggacatcacttttttcataaaggcctgcttctccaggcatttgtacatccttcttacaataagcttggaggaggctgttatcagcgattggagtttcttggagatgctgtcttggattatttgattacttcatatctattctcagcttatcccaaactaaagcctggtcaattgacagatttgagatcattgtctgttaacaacaaggcatttgcttgtctagcggtagatcgcagttttgataattttcttttatgtgattcaagtggcctgtctgaggcaataaaaaagtatgtggactatgttagaagacctgtgtcagataatggcattaaagaagggccaaaatgtcccaaggcactgggtgacttagtggaatcttgtgttggtgccatccttcttgattcagggttcaatttgaacaaagtttggaagattatgacttcattcttggacccaatcatgaaattctcatcaagcttgcagctcagtcctgttagggatttgcgagaactttgccaatctcataatttggagttggagtttctgccagtgccctcaaaattgactaaaaggttttcagttgaagctaaagtgagtgggaatggtgtatgtgaaacagcttcagcaactggccaaaataaaaaagaggcttgcagaattgcttcacagctactttttttaaagttcaaggctcaaggttggaaagctaagtcaaaaaccctggaagaagttctggaatcaacttctaaaatggaaccaaaacttattggctatgatgaaactcccattgatgtaacagataccaatactgccaagcacatagtggttaatgctgacccgtacaacaactctaacccagaaatttgccctatgcaactgacagatgaaatatgctctccatgtgtgaaacctttcggccaacggcttcaatcttctgctaagggaaagcttagtcaaatatttgaaaatcgtgattgtggcagtgactcgtctgggacaggaacagcaagatcacgattgtatgaattatgtgctgcgtattgctggaaacctccttcatttgaatgctgcaagaaagagggaccagaccacctgaaacaatttacttgcaaggtgaccttagagatagaagaggcccagaatttgattttagagtttgttggggaacctctgtcaaagaagaaagatgcagcagagagtgcggcagagggtgcattatggtatctacaacatgaaggtttcttgcctagtattggtaattgacatattgcacaacaattatcatgtcacataaatctgaggcaatgtcttagggtgtcatttgaaatttctggatgcaccctcattgttattgataatcatataaatctagaagacaataatagataatacaggtttagtaacccagggccagagggttccctaatggtaatctattgtaaagcattatttatgtatgtattattgtagtgtcaaagttacatttatttgtaatgaccctcgattgtaacagtgaattttctatttactacgtttgaaatataaatataagctcccgaaacatttgaatggtaa

SEQ ID NO: 163 - DNA, 5593 bp, Glycine max
  source 1..5593: mol_type = genomic DNA
tctaaaaagccattttgtttggaaaatactagtaacaaaaaacgacatgggggagtgttgggaatgaagtgatgcgaaaacgtgcgtggaaacaaaacaaagaacaaagactttcagtcattcagtctttagtgagcgtgttcactaaggtaactcttcactctcttctccgttgactccataatcaacgttttggttgggaacagaagtgaatgaagtgactacaaacaaagctctctctctgttattattattattattcattttctcttttcacactcctttgtcctttgaacccacccgtgaactctccaaccgtcgtcgttttgatttcacccactctcatacctccaaactctcttttcctcggctaatgccggacggagaatcctctgccgtcgccggcggccaagtttccatggaaccctctttaagcctctccgatcaactacagtccctgagtctttcccaagtaaaaaatcatgatgactcggtcaagaaagatccccggaagattgcaagaaggtatcagttggagttgtgcaaaaaagctatggaggaaaatataattgtgtatttagggacagggtgtgggaagacccacattgctgtgcttcttatgcatgagatgggtgatttgattcggaaaccacagaagaacatatgtgtctttcttgctcccactgtggctttagtccatcagcaagcaaaggttatagcagactctactgattttaaggttgggacatactgtggaagttccaagcgcttgaaacatcatcaagactgggagcaggagatgggacaatatgaggttcttgttatgaccccacaaatattacatcataacttatcccattgcttcatcacaatggagatgattgcacttttgatatttgacgaatgtcatcatgctcaagtcaaaagcaaccatgcttatgcagtaatcatgaaagtcttctacaaaagtaattccacaaaggttccccgtatatttggcatgactgcttcccctgttgtaggaaaaggtgcttctagtgaagcaaatttagcaaaaagcatcaacagtcttgaacatatacttgatgccaaggtatactctgttgaagacaaggaattgcaatcttttgtgaccactcctgtgattaatatatatcattatgtttcaactgcaagtggggaaactagcttgcacttgaaaattgaggagattaaacgccagtgcatagcaacccttggtaggagtatagaagatcaccagaaacggatgaatacaaagaaacttctgaaccggatgcatgataatgtgattttcggtctgcagaatcttggcatttggggagcattgcaagctagtcatattcttctgagtggtgatcattctgagaggcatgaattagtggaggcagatggaaattcaagtgatgactctctgtgtgataaatatcttgctcaggctgctgaactatttacttcacaatgcatgataggcgacagggtaactgatttatcttctgtggaaatattaaaagagccatttttctcagcaaagcttttacgactcattgggatactatccaactttaggttgcaaaagaacatgaaatgtataatttttgtgaatagaattgtgacagcaagatccctgtcatacatactacagaagctcaagcttctaagacaatggaggagtgattttctagtaggagtccatgctggactgaagagtatgtcacgaaagaccatgaacatcattgttgataaatttcgttctggagagttgaatctactggttgcaaccaaagtgggtgaagaaggacttgacattcagacatgttgtctcgtcatacgatttgatcttccagaaactgttgccagcttcatacagtcaagaggtcgtgcacgtatgcctcagtcagaatatgcatttttggtggacagtggcaataagaaggaaattgacgtaattgatggtttcaaggaagatgaataccgaatgaatatggaagttacttttcgaacatccaaggagacatacatcatccctgaggaaagaatattcagaattgattcgtctggtgcttctgttagttctggatatagtatctcattgcttcaccaatattgttcaaagcttccacacgatgagtactttgaccccaagccaagttttcattacttagatgattcagggggaatttcctgccacataacattgccttccaatgcaccaataaaccaaattttgggtacaccacagttatctatggaggcttccaaaagagaagcttgcctgaaagcaatagaagaactgtataatttgggcgctttaagtgattgtctcttgccaaaacaagatgatgcagagcctgaggtgcaggtttcaggctcttctgatgaagatgaatgtgaagatgccatatcaagaggaaaattacatgagatgctagttccttctgcctttggacagtcatggataaatgaggataacattgtccgtctcaactcttactacataaaattttgtccctatccagaggacagggtctacaaagagtttggtctattcatgatgacctgtcttccgatggaggctgagaaattggaacttgatctccatcttgctcatggtcgatctgtgatgacaatgtttgtcccatttggagttgtagaatttaacaaagatgagattaagatggcagagaattttcaagaaatgttcctcaaaattattcttgatagattagaattcatttccgagtttgtagacttgggtatgagtgctgaatctcactcaggcacatcaaccttctaccttttgcttccagttgtattgcaagaatatggaaatgccatggaagtagattggaagatagtgaagagatgcctttgttcaccaattttcaggcatccagctgatactatggataaaaaagttttccctttagatattcacctgcaacttgccaatggttacagaagtgtaagaaatgtcgagaatagtttagtgtatgccccacataagaagaacttttattttgtcacgaatgttaactatgaaaagaatggatatagtcctcataatgattcaggcacttcaagctatgtggattacttcattgaaaagttttccattcacctcaaatgtccgaagcaaccacttctgcatgtgaaaccggtctccaatttgcacaacctgttacacaacagaaagcgtgaggatgcagaaccacaggagctggacgaatacttaatttatttgcctcctgagctttgtgaactaaaagtaataggtttttcgaaggatattggcagttccatatctttgctgccctcaattatgcatcgtcttggaaacttgctggtggctattgaactaaagcacatgctatcttcttcctttccagaagcagctgaaattagtgccattagagttttagaggctctcaccactgagaagtgtcaggagcgcttttcccttgaaagacttgaagtgcttggtgatgctttccttaaatttgctgttgcacgtcatttttttctcatgcatgacagccttcatgaaggagaccttacaaaaaggcgttccaatgctgtaaataattccaatttgtttaagttggctattaagcgcaatttgcaggtctatatatgcgatcagacatttgatcccactcagttttatgcattgggccgtccttgcccaagagtttgtagcaatgaaaccgaagaaagcatacacttttgtttaaattctgttatgcaacaaggaaaagcaactgaaacccgatgtagcaaaaatcatcattggttacataggaaaacaattgctgatgtggttgaagctctggttggagcattcctagttgacagtggctttaaagctgcaattgcctttctttcatggattggcatacaagttgattttgaagcttcacaagtggttgatatctgcatagcaagtgctagctattcccctctttcttctgaagtagacattccttctcttgaaggtaagctaggacatcacttttttcataaaggcctgcttctccaggcatttgtacatccttcttacaataagcttggaggaggctgttatcagcgattggagtttcttggagatgctgtcttggattatttgattacttcatatctattctcagcttatcccaaactaaagcctggtcaattgacagatttgagatcattgtctgttaacaacaaggcatttgcttgtctagcggtagatcgcagttttgataattttcttttatgtgattcaagtggcctgtctgaggcaataaaaaagtatgtggactatgttagaagacctgtgtcagataatggcattaaagaagggccaaaatgtcccaaggcactgggtgacttagtggaatcttgtgttggtgccatccttcttgattcagggttcaatttgaacaaagtttggaagattatgacttcattcttggacccaatcatgaaattctcatcaagcttgcagctcagtcctgttagggatttgcgagaactttgccaatctcataatttggagttggagtttctgccagtgccctcaaaattgactaaaaggttttcagttgaagctaaagtgagtgggaatggtgtatgtgaaacagcttcagcaactggccaaaataaaaaagaggcttgcagaattgcttcacagctactttttttaaagttcaaggctcaaggttggaaagctaagtcaaaaaccctggaagaagttctggaatcaacttctaaaatggaaccaaaacttattggctatgatgaaactcccattgatgtaacagataccaatactgccaagcacatagtggttaatgctgacccgtacaacaactctaacccagaaatttgccctatgcaactgacagatgaaatatgctctccatgtgtgaaacctttcggccaacggcttcaatcttctgctaagggaaagcttagtcaaatatttgaaaatcgtgattgtggcagtgactcgtctgggacagcaagatcacgattgtatgaattatgtgctgcgtattgctggaaacctccttcatttgaatgctgcaagaaagagggaccagaccacctgaaacaatttacttgcaaggtgaccttagagatagaagaggcccagaatttgattttagagtttgttggggaacctctgtcaaagaagaaagatgcagcagagagtgcggcagagggtgcattatggtatctacaacatgaaggtttcttgcctagtattggtaattgacatattgcacaacaattatcatgtcacataaatctgaggcaatgtcttagggtgtcatttgaaatttctggatgcaccctcattgttattgataatcatataaatctagaagacaataatagataatacaggtttagtaacccagggccagagggttccctaatggtaatctattgtaaagcattatttatgtatgtattattgtagtgtcaaagttacatttatttgtaatgaccctcgattgtaacagtgaattttctatttactacgtttgaaatataaatataagctcccgaaacatttgaatggtaa

SEQ ID NO: 164 - DNA, 5560 bp, Glycine max
  source 1..5560: mol_type = genomic DNA
gtggaaacaaaacaaagaacaaagactttcagtcattcagtctttagtgagcgtgttcactaaggtaactcttcactctcttctccgttgactccataatcaacgttttggttgggaacagaagtgaatgaagtgactacaaacaaagctctctctctgttattattattattattcattttctcttttcacactcctttgtcctttgaacccacccgtgaactctccaaccgtcgtcgttttgatttcacccactctcatacctccaaactctcttttcctcggctaatgccggacggagaatcctctgccgtcgccggcggccaagtttccatggaaccctctttaagcctctccgatcaactacagtccctgagtctttcccaagtaaaaaatcatgatgactcggtcaagaaagatccccggaagattgcaagaaggtatcagttggagttgtgcaaaaaagctatggaggaaaatataattgtgtatttagggacagggtgtgggaagacccacattgctgtgcttcttatgcatgagatgggtgatttgattcggaaaccacagaagaacatatgtgtctttcttgctcccactgtggctttagtccatcagcaagcaaaggttatagcagactctactgattttaaggttgggacatactgtggaagttccaagcgcttgaaacatcatcaagactgggagcaggagatgggacaatatgaggttcttgttatgaccccacaaatattacatcataacttatcccattgcttcatcacaatggagatgattgcacttttgatatttgacgaatgtcatcatgctcaagtcaaaagcaaccatgcttatgcagtaatcatgaaagtcttctacaaaagtaattccacaaaggttccccgtatatttggcatgactgcttcccctgttgtaggaaaaggtgcttctagtgaagcaaatttagcaaaaagcatcaacagtcttgaacatatacttgatgccaaggtatactctgttgaagacaaggaattgcaatcttttgtgaccactcctgtgattaatatatatcattatgtttcaactgcaagtggggaaactagcttgcacttgaaaattgaggagattaaacgccagtgcatagcaacccttggtaggagtatagaagatcaccagaaacggatgaatacaaagaaacttctgaaccggatgcatgataatgtgattttcggtctgcagaatcttggcatttggggagcattgcaagctagtcatattcttctgagtggtgatcattctgagaggcatgaattagtggaggcagatggaaattcaagtgatgactctctgtgtgataaatatcttgctcaggctgctgaactatttacttcacaatgcatgataggcgacagggtaactgatttatcttctgtggaaatattaaaagagccatttttctcagcaaagcttttacgactcattgggatactatccaactttaggttgcaaaagaacatgaaatgtataatttttgtgaatagaattgtgacagcaagatccctgtcatacatactacagaagctcaagcttctaagacaatggaggagtgattttctagtaggagtccatgctggactgaagagtatgtcacgaaagaccatgaacatcattgttgataaatttcgttctggagagttgaatctactggttgcaaccaaagtgggtgaagaaggacttgacattcagacatgttgtctcgtcatacgatttgatcttccagaaactgttgccagcttcatacagtcaagaggtcgtgcacgtatgcctcagtcagaatatgcatttttggtggacagtggcaataagaaggaaattgacgtaattgatggtttcaaggaagatgaataccgaatgaatatggaagttacttttcgaacatccaaggagacatacatcatccctgaggaaagaatattcagaattgattcgtctggtgcttctgttagttctggatatagtatctcattgcttcaccaatattgttcaaagcttccacacgatgagtactttgaccccaagccaagttttcattacttagatgattcagggggaatttcctgccacataacattgccttccaatgcaccaataaaccaaattttgggtacaccacagttatctatggaggcttccaaaagagaagcttgcctgaaagcaatagaagaactgtataatttgggcgctttaagtgattgtctcttgccaaaacaagatgatgcagagcctgaggtgcaggtttcaggctcttctgatgaagatgaatgtgaagatgccatatcaagaggaaaattacatgagatgctagttccttctgcctttggacagtcatggataaatgaggataacattgtccgtctcaactcttactacataaaattttgtccctatccagaggacagggtctacaaagagtttggtctattcatgatgacctgtcttccgatggaggctgagaaattggaacttgatctccatcttgctcatggtcgatctgtgatgacaatgtttgtcccatttggagttgtagaatttaacaaagatgagattaagatggcagagaattttcaagaaatgttcctcaaaattattcttgatagattagaattcatttccgagtttgtagacttgggtatgagtgctgaatctcactcaggcacatcaaccttctaccttttgcttccagttgtattgcaagaatatggaaatgccatggaagtagattggaagatagtgaagagatgcctttgttcaccaattttcaggcatccagctgatactatggataaaaaagttttccctttagatattcacctgcaacttgccaatggttacagaagtgtaagaaatgtcgagaatagtttagtgtatgccccacataagaagaacttttattttgtcacgaatgttaactatgaaaagaatggatatagtcctcataatgattcaggcacttcaagctatgtggattacttcattgaaaagttttccattcacctcaaatgtccgaagcaaccacttctgcatgtgaaaccggtctccaatttgcacaacctgttacacaacagaaagcgtgaggatgcagaaccacaggagctggacgaatacttaatttatttgcctcctgagctttgtgaactaaaagtaataggtttttcgaaggatattggcagttccatatctttgctgccctcaattatgcatcgtcttggaaacttgctggtggctattgaactaaagcacatgctatcttcttcctttccagaagcagctgaaattagtgccattagagttttagaggctctcaccactgagaagtgtcaggagcgcttttcccttgaaagacttgaagtgcttggtgatgctttccttaaatttgctgttgcacgtcatttttttctcatgcatgacagccttcatgaaggagaccttacaaaaaggcgttccaatgctgtaaataattccaatttgtttaagttggctattaagcgcaatttgcaggtctatatatgcgatcagacatttgatcccactcagttttatgcattgggccgtccttgcccaagagtttgtagcaatgaaaccgaagaaagcatacacttttgtttaaattctgttatgcaacaaggaaaagcaactgaaacccgatgtagcaaaaatcatcattggttacataggaaaacaattgctgatgtggttgaagctctggttggagcattcctagttgacagtggctttaaagctgcaattgcctttctttcatggattggcatacaagttgattttgaagcttcacaagtggttgatatctgcatagcaagtgctagctattcccctctttcttctgaagtagacattccttctcttgaaggtaagctaggacatcacttttttcataaaggcctgcttctccaggcatttgtacatccttcttacaataagcttggaggaggctgttatcagcgattggagtttcttggagatgctgtcttggattatttgattacttcatatctattctcagcttatcccaaactaaagcctggtcaattgacagatttgagatcattgtctgttaacaacaaggcatttgcttgtctagcggtagatcgcagttttgataattttcttttatgtgattcaagtggcctgtctgaggcaataaaaaagtatgtggactatgttagaagacctgtgtcagataatggcattaaagaagggccaaaatgtcccaaggcactgggtgacttagtggaatcttgtgttggtgccatccttcttgattcagggttcaatttgaacaaagtttggaagattatgacttcattcttggacccaatcatgaaattctcatcaagcttgcagctcagtcctgttagggatttgcgagaactttgccaatctcataatttggagttggagtttctgccagtgccctcaaaattgactaaaaggttttcagttgaagctaaagtgagtgggaatggtgtatgtgaaacagcttcagcaactggccaaaataaaaaagaggcttgcagaattgcttcacagctactttttttaaagttcaaggctcaaggttggaaagctaagtcaaaaaccctggaagaagttctggaatcaacttctaaaatggaaccaaaacttattggctatgatgaaactcccattgatgtaacagataccaatactgccaagcacatagtggttaatgctgacccgtacaacaactctaacccagaaatttgccctatgcaactgacagatgaaatatgctctccatgtgtgaaacctttcggccaacggcttcaatcttctgctaagggaaagcttagtcaaatatttgaaaatcgtgattgtggcagtgactcgtctgggacaggaacagcaagatcacgattgtatgaattatgtgctgcgtattgctggaaacctccttcatttgaatgctgcaagaaagagggaccagaccacctgaaacaggtacatagaactttcacttgcatttgtttattgttccatttttagatttacttgcaaggtgaccttagagatagaagaggcccagaatttgattttagagtttgttggggaacctctgtcaaagaagaaagatgcagcagagagtgcggcagagggtgcattatggtatctacaacatgaaggtttcttgcctagtattggtaattgacatattgcacaacaattatcatgtcacataaatctgaggcaatgtcttagggtgtcatttgaaatttctggatgcaccctcattgttattgataatcatataaatctagaagacaataatagataatacaggtttagtaacccagggccagagggttccctaatggtaatctattgtaaagcattatttatgtatgtattattgtagtgtcaaagttacatttatttgtaatgaccctcgattgtaacagtgaattttctatttactacgtttgaaatataaatataagctcccgaaacatttgaatggtaa

SEQ ID NO: 165 - DNA, 5375 bp, Glycine max
  source 1..5375: mol_type = genomic DNA
gtggaaacaaaacaaagaacaaagactttcagtcattcagtctttagtgagcgtgttcactaaggtaactcttcactctcttctccgttgactccataatcaacgttttggttgggaacagaagtgaatgaagtgactacaaacaaagctctctctctgttattattattattattcattttctcttttcacactcctttgtcctttgaacccacccgtgaactctccaaccgtcgtcgttttgatttcacccactctcatacctccaaactctcttttcctcggctaatgccggacggagaatcctctgccgtcgccggcggccaagtttccatggaaccctctttaagcctctccgatcaactacagtccctgagtctttcccaagtaaaaaatcatgatgactcggtcaagaaagatccccggaagattgcaagaaggtatcagttggagttgtgcaaaaaagctatggaggaaaatataattgtgtatttagggacagggtgtgggaagacccacattgctgtgcttcttatgcatgagatgggtgatttgattcggaaaccacagaagaacatatgtgtctttcttgctcccactgtggctttagtccatcagcaagcaaaggttatagcagactctactgattttaaggttgggacatactgtggaagttccaagcgcttgaaacatcatcaagactgggagcaggagatgggacaatatgaggttcttgttatgaccccacaaatattacatcataacttatcccattgcttcatcacaatggagatgattgcacttttgatatttgacgaatgtcatcatgctcaagtcaaaagcaaccatgcttatgcagtaatcatgaaagtcttctacaaaagtaattccacaaaggttccccgtatatttggcatgactgcttcccctgttgtaggaaaaggtgcttctagtgaagcaaatttagcaaaaagcatcaacagtcttgaacatatacttgatgccaaggtatactctgttgaagacaaggaattgcaatcttttgtgaccactcctgtgattaatatatatcattatgtttcaactgcaagtggggaaactagcttgcacttgaaaattgaggagattaaacgccagtgcatagcaacccttggtaggagtatagaagatcaccagaaacggatgaatacaaagaaacttctgaaccggatgcatgataatgtgattttcggtctgcagaatcttggcatttggggagcattgcaagctagtcatattcttctgagtggtgatcattctgagaggcatgaattagtggaggcagatggaaattcaagtgatgactctctgtgtgataaatatcttgctcaggctgctgaactatttacttcacaatgcatgataggcgacagggtaactgatttatcttctgtggaaatattaaaagagccatttttctcagcaaagcttttacgactcattgggatactatccaactttaggttgcaaaagaacatgaaatgtataatttttgtgaatagaattgtgacagcaagatccctgtcatacatactacagaagctcaagcttctaagacaatggaggagtgattttctagtaggagtccatgctggactgaagagtatgtcacgaaagaccatgaacatcattgttgataaatttcgttctggagagttgaatctactggttgcaaccaaagtgggtgaagaaggacttgacattcagacatgttgtctcgtcatacgatttgatcttccagaaactgttgccagcttcatacagtcaagaggtcgtgcacgtatgcctcagtcagaatatgcatttttggtggacagtggcaataagaaggaaattgacgtaattgatggtttcaaggaagatgaataccgaatgaatatggaagttacttttcgaacatccaaggagacatacatcatccctgaggaaagaatattcagaattgattcgtctggtgcttctgttagttctggatatagtatctcattgcttcaccaatattgttcaaagcttccacacgatgagtactttgaccccaagccaagttttcattacttagatgattcagggggaatttcctgccacataacattgccttccaatgcaccaataaaccaaattttgggtacaccacagttatctatggaggcttccaaaagagaagcttgcctgaaagcaatagaagaactgtataatttgggcgctttaagtgattgtctcttgccaaaacaagatgatgcagagcctgaggtgcaggtttcaggctcttctgatgaagatgaatgtgaagatgccatatcaagaggaaaattacatgagatgctagttccttctgcctttggacagtcatggataaatgaggataacattgtccgtctcaactcttactacataaaattttgtccctatccagaggacagggtctacaaagagtttggtctattcatgatgacctgtcttccgatggaggctgagaaattggaacttgatctccatcttgctcatggtcgatctgtgatgacaatgtttgtcccatttggagttgtagaatttaacaaagatgagattaagatggcagagaattttcaagaaatgttcctcaaaattattcttgatagattagaattcatttccgagtttgtagacttgggtatgagtgctgaatctcactcaggcacatcaaccttctaccttttgcttccagttgtattgcaagaatatggaaatgccatggaagtagattggaagatagtgaagagatgcctttgttcaccaattttcaggcatccagctgatactatggataaaaaagttttccctttagatattcacctgcaacttgccaatggttacagaagtgtaagaaatgtcgagaatagtttagtgtatgccccacataagaagaacttttattttgtcacgaatgttaactatgaaaagaatggatatagtcctcataatgattcaggcacttcaagctatgtggattacttcattgaaaagttttccattcacctcaaatgtccgaagcaaccacttctgcatgtgaaaccggtctccaatttgcacaacctgttacacaacagaaagcgtgaggatgcagaaccacaggagctggacgaatacttaatttatttgcctcctgagctttgtgaactaaaagtaataggtttttcgaaggatattggcagttccatatctttgctgccctcaattatgcatcgtcttggaaacttgctggtggctattgaactaaagcacatgctatcttcttcctttccagaagcagctgaaattagtgccattagagttttagaggctctcaccactgagaagtgtcaggagcgcttttcccttgaaagacttgaagtgcttggtgatgctttccttaaatttgctgttgcacgtcatttttttctcatgcatgacagccttcatgaaggagaccttacaaaaaggcgttccaatgctgtaaataattccaatttgtttaagttggctattaagcgcaatttgcaggtctatatatgcgatcagacatttgatcccactcagttttatgcattgggccgtccttgcccaagagtttgtagcaatgaaaccgaagaaagcatacacttttgtttaaattctgttatgcaacaaggaaaagcaactgaaacccgatgtagcaaaaatcatcattggttacataggaaaacaattgctgatgtggttgaagctctggttggagcattcctagttgacagtggctttaaagctgcaattgcctttctttcatggattggcatacaagttgattttgaagcttcacaagtggttgatatctgcatagcaagtgctagctattcccctctttcttctgaagtagacattccttctcttgaaggtaagctaggacatcacttttttcataaaggcctgcttctccaggcatttgtacatccttcttacaataagcttggaggaggctgttatcagcgattggagtttcttggagatgctgtcttggattatttgattacttcatatctattctcagcttatcccaaactaaagcctggtcaattgacagatttgagatcattgtctgttaacaacaaggcatttgcttgtctagcggtagatcgcagttttgataattttcttttatgtgattcaagtggcctgtctgaggcaataaaaaagtatgtggactatgttagaagacctgtgtcagataatggcattaaagaagggccaaaatgtcccaaggcactgggtgacttagtggaatcttgtgttggtgccatccttcttgattcagggttcaatttgaacaaagtttggaagattatgacttcattcttggacccaatcatgaaattctcatcaagcttgcagctcagtcctgttagggatttgcgagaactttgccaatctcataatttggagttggagtttctgccagtgccctcaaaattgactaaaaggttttcagttgaagctaaagtgagtgggaatggtgtatgtgaaacagcttcagcaactggccaaaataaaaaagaggcttgcagaattgcttcacagctactttttttaaagttcaaggctcaaggttggaaagctaagtcaaaaaccctggaagaagttctggaatcaacttctaaaatggaaccaaaacttattggctatgatgaaactcccattgatgtaacagataccaatactgccaagcacatagtggttaatgctgacccgtacaacaactctaacccagaaatttgccctatgcaactgacagatgaaatatgctctccatgtgtgaaacctttcggccaacggcttcaatcttctgctaagggaaagcttagtcaaatatttgaaaatcgtgattgtggcagtgactcgtctgggacaggaacagcaagatcacgattgtatgaattatgtgctgcgtattgctggaaacctccttcatttgaatgctgcaagaaagagggaccagaccacctgaaacagtgagttactttaaaaataaaatgaagttttaaacatccgtactatcaggtttcagctttggaatttcactcaggatcttcatttcatcctctgaaaatccaaagttaacaatagaagttcaaaactagctatcaatgataatgagaatcacagccaaaagaaaagaaaaatatccctaaaaacttgtttatattaacatggactaaagtataaacaacaaacattcaaattttgtagactggagtggtgtccttaaagggctgtgtaatttaagcatctccatgaaaaaacgggtggattttctcattcaaatcaattacatttctgaatttttg

SEQ ID NO: 166 - DNA, 3956 bp, Glycine max
  source 1..3956: mol_type = genomic DNA
tatgatatcaattaataaaatttatatgatatcaatttgattaattaaaattatatatataaaagaatttggaactccttcactcagggtcactgcatatccaatggagggttagtgagtgttgttgacttcacattgacgatcctttttttttcctgtctgtttgcttccaatttctcataccttcaatcttcaatcttggaagattggagaacagcattgattgagttttaccacacgatcgtagagcttctgatatttttcgaagaggaaaggcaaaagagttagcatttaggatgggaaaaacaattgagttgtatggattccctacatctgtgaatgtgtctgatgtaaagacatttgtagagcagtatactggtgaaggaactgtgttcgccattaaattaagacatggaaaaggtcgggttccaagagcatttgcaattattcaattcaccaccgcaaattctgctacatctatgatgtccagagctaacaacattttgagaacattgcggtatgggacctcctatttaaaagctcgggaaatggaaagagatattgtgccaaggccaagggtgtttttgcatagtttggatgatgtgaaactgtcttttggctgtcagatctcaaagggaagattctctgttttatggaaaaagcaggatgttattgtaaattttgggagtggaatgagaaagatgcatttcttattttcccacaacaatgtgcaatacaaacttgagctttcatatgagaacatttggaagattgagctgcatcggccacggaatgagactacacgttatctgttgattcagttacttggtgctccccgggtttttgagaacgatgtacctacatcaacaaatatctttgatgatcctttgttcaacttcttcaaagatgcccctgatgagcaatggatccgagcaattgatttcactccagaaagtcgtattgggcagtcctccgccatatgtctggagcttcctaatggccgacaacttccaaatttcagggaaaactttgcttattatgaggaaagtgagaggcaatacactttacagacaggagttcccttttctcaaaattggggtcttgtccccattgttgctcctcctctaggtgttaaaatatcatatgacatcttgtttaaagtcaattcattggttcaacatgcatgtcttgcaggacctgcacttgatggtgacttctatcgcttggttgatccacgtagaatgccccgtgaatttattgaatatgctttagaaaagatttactattcaaaggaattttgttatgaacccacaaagtggctgactgatcagtacaaaacataccttgagtcaaaaaatcatcctcggtcacctgcaatatccttggatacagggttggtatacgttcgcagggttcagatcacgccttgcaaagtatacttttgtggtccagagatgaatgtctcaaatcgtgttctccgtcatttccgtgaacatattgataactttctacgtgtttcatttgttgatgaagaattggataaactgttttcaactgatttatcatcacgttcacagaacaagaaaactgagatatacaccagaattctttccatccttaagaatggcatagttgttggtgataagaagtttgaatttctagcattctcatcaagtcagttgcgggaaaactctctctggatgtttgctcctacagaaactggatgtactgctgcttacataaggaaatggatgggaaattttagccagattaggaatgttgctaaatatgctgctaggctggggcaatcttttggttcatctactgaaactctaagtgtccatagggatgaagttgaaattattcctgatgtgaagaagcttacatatgatggaaacgaatatgtcttctctgatggaattgggaaaatatctcttgaatttgcccagaaagtggctaaaaaatgtggttatgattgcactccatctgcctttcagattcgatatggtgggtacaaaggagttgtggctgttgaccctaaatcatgctacaagttatcactgaggaagagcatgcggaagtatgattcagataacacaaagttagatgttttggcccgtagtaagtttcagccatgttatctgaatcggcagttaatttctctcttatccactcttggtatcaaggatgatgtttttgagaaaaaacaaagagaaactgttaatcaactgaacactatactaacagattcattaaaggctcaggaagttctggacttaatgtctgctggagagatcactaatgttctgaaggagatgctcatttgtggatacaagcctaatgaagaaccattcctttcaatgatgcttcaaacatttagggcatcaaaacttttggaattgcgacttaaatctaggatctttattccaaaaggaagagcaatgatgggatgtctagatgaaactagaaccctagaatatggtcaagtatttgttcagttctctaacaataggctgcagaatctatctgatgattttttttcatatgatttgccaaagaattatatggttaaaggtaaggtagttgtagcaaaaaacccctgcttgcacccaggtgatgtgcgtgttttacaagctgtggatgtgccagatttgtaccacatggtggactgtgttgttttccctcaaaaaggaccaagacctcatccaaatgagtgttcgggaagtgatctggatggagatatctactttgtttgttgggaccatgaattgattccttctcgcccaattgatccaatggactatactgctcctgcaactgtggaattggatcatgatgtgatgatcgaggaggttgaggagtattttgccaattacatagtcaatgacagtctgggaataattgccaatgcacacactgtctttgcagataaagaacatttgaaagcaatgtctgatcaatgtgttaagcttgcaaggttgttttcaacagcagttgactttcctaaaactggtgttccagctgttatacctcctgaacttcatgtcaaagaatatcctgacttcatggagaagcctgacaaacccacatacaaatcgcataacgtgataggaaagctctttagggaagtgaaagaaatatcaacaagtgccggctcaattacatccttcacaaagttggttgcgagagactcttacgaccatgaaatggaagttgatggcttcatggattatgttgatgatgctttctatcacaaaaccaattatgactacaagttgggaaatctgatggactactatgggatcaaaactgaagctgaaatcctcggtgggaatattatgaaaatgtcaaaatctttcaacaaaaggagggatgcagaagcaatcaatatggctgtgaggtccctaaggaaagaggccagggcctggttcaatgaaaacagcagtggtgatgtagattcagggagtagtgatgtgtatgcaaaagcttctgcttggtaccatgttacttatcatccaagttactggggttgctataatgaaggcatgaatagggatcattatctaagtttctcatggtgtgtttaccctcttcttgtccaaatcaagaaagagaaactcagcattagaaggtcctctttggaatacagtttcagtgggttgcgtttgagttgacaactttggactttgcactccctattttccagttggatttctgagccaggcagcttgtttatatttttatagtaactatgcatgtatgttctatggtaatgtcgctatataacatgtatgagtgaatatatacatattctatcaaggaatgagggtgtgcacttccattcccttgctttttttaaaattatatataaatattttgaatgtgtagattttgtctttctctaattttttatatttgaacatcttattcttaattttttatttccttcataataa

SEQ ID NO: 167 - DNA, 3888 bp, Glycine max
  source 1..3888: mol_type = genomic DNA
tatgatatcaattaataaaatttatatgatatcaatttgattaattaaaattatatatataaaagaatttggaactccttcactcagggtcactgcatatccaatggagggttagtgagtgttgttgacttcacattgacgatcctttttttttcctgtctgtttgcttccaatttctcataccttcaatcttcaatcttgggaaaggcaaaagagttagcatttaggatgggaaaaacaattgagttgtatggattccctacatctgtgaatgtgtctgatgtaaagacatttgtagagcagtatactggtgaaggaactgtgttcgccattaaattaagacatggaaaaggtcgggttccaagagcatttgcaattattcaattcaccaccgcaaattctgctacatctatgatgtccagagctaacaacattttgagaacattgcggtatgggacctcctatttaaaagctcgggaaatggaaagagatattgtgccaaggccaagggtgtttttgcatagtttggatgatgtgaaactgtcttttggctgtcagatctcaaagggaagattctctgttttatggaaaaagcaggatgttattgtaaattttgggagtggaatgagaaagatgcatttcttattttcccacaacaatgtgcaatacaaacttgagctttcatatgagaacatttggaagattgagctgcatcggccacggaatgagactacacgttatctgttgattcagttacttggtgctccccgggtttttgagaacgatgtacctacatcaacaaatatctttgatgatcctttgttcaacttcttcaaagatgcccctgatgagcaatggatccgagcaattgatttcactccagaaagtcgtattgggcagtcctccgccatatgtctggagcttcctaatggccgacaacttccaaatttcagggaaaactttgcttattatgaggaaagtgagaggcaatacactttacagacaggagttcccttttctcaaaattggggtcttgtccccattgttgctcctcctctaggtgttaaaatatcatatgacatcttgtttaaagtcaattcattggttcaacatgcatgtcttgcaggacctgcacttgatggtgacttctatcgcttggttgatccacgtagaatgccccgtgaatttattgaatatgctttagaaaagatttactattcaaaggaattttgttatgaacccacaaagtggctgactgatcagtacaaaacataccttgagtcaaaaaatcatcctcggtcacctgcaatatccttggatacagggttggtatacgttcgcagggttcagatcacgccttgcaaagtatacttttgtggtccagagatgaatgtctcaaatcgtgttctccgtcatttccgtgaacatattgataactttctacgtgtttcatttgttgatgaagaattggataaactgttttcaactgatttatcatcacgttcacagaacaagaaaactgagatatacaccagaattctttccatccttaagaatggcatagttgttggtgataagaagtttgaatttctagcattctcatcaagtcagttgcgggaaaactctctctggatgtttgctcctacagaaactggatgtactgctgcttacataaggaaatggatgggaaattttagccagattaggaatgttgctaaatatgctgctaggctggggcaatcttttggttcatctactgaaactctaagtgtccatagggatgaagttgaaattattcctgatgtgaagaagcttacatatgatggaaacgaatatgtcttctctgatggaattgggaaaatatctcttgaatttgcccagaaagtggctaaaaaatgtggttatgattgcactccatctgcctttcagattcgatatggtgggtacaaaggagttgtggctgttgaccctaaatcatgctacaagttatcactgaggaagagcatgcggaagtatgattcagataacacaaagttagatgttttggcccgtagtaagtttcagccatgttatctgaatcggcagttaatttctctcttatccactcttggtatcaaggatgatgtttttgagaaaaaacaaagagaaactgttaatcaactgaacactatactaacagattcattaaaggctcaggaagttctggacttaatgtctgctggagagatcactaatgttctgaaggagatgctcatttgtggatacaagcctaatgaagaaccattcctttcaatgatgcttcaaacatttagggcatcaaaacttttggaattgcgacttaaatctaggatctttattccaaaaggaagagcaatgatgggatgtctagatgaaactagaaccctagaatatggtcaagtatttgttcagttctctaacaataggctgcagaatctatctgatgattttttttcatatgatttgccaaagaattatatggttaaaggtaaggtagttgtagcaaaaaacccctgcttgcacccaggtgatgtgcgtgttttacaagctgtggatgtgccagatttgtaccacatggtggactgtgttgttttccctcaaaaaggaccaagacctcatccaaatgagtgttcgggaagtgatctggatggagatatctactttgtttgttgggaccatgaattgattccttctcgcccaattgatccaatggactatactgctcctgcaactgtggaattggatcatgatgtgatgatcgaggaggttgaggagtattttgccaattacatagtcaatgacagtctgggaataattgccaatgcacacactgtctttgcagataaagaacatttgaaagcaatgtctgatcaatgtgttaagcttgcaaggttgttttcaacagcagttgactttcctaaaactggtgttccagctgttatacctcctgaacttcatgtcaaagaatatcctgacttcatggagaagcctgacaaacccacatacaaatcgcataacgtgataggaaagctctttagggaagtgaaagaaatatcaacaagtgccggctcaattacatccttcacaaagttggttgcgagagactcttacgaccatgaaatggaagttgatggcttcatggattatgttgatgatgctttctatcacaaaaccaattatgactacaagttgggaaatctgatggactactatgggatcaaaactgaagctgaaatcctcggtgggaatattatgaaaatgtcaaaatctttcaacaaaaggagggatgcagaagcaatcaatatggctgtgaggtccctaaggaaagaggccagggcctggttcaatgaaaacagcagtggtgatgtagattcagggagtagtgatgtgtatgcaaaagcttctgcttggtaccatgttacttatcatccaagttactggggttgctataatgaaggcatgaatagggatcattatctaagtttctcatggtgtgtttaccctcttcttgtccaaatcaagaaagagaaactcagcattagaaggtcctctttggaatacagtttcagtgggttgcgtttgagttgacaactttggactttgcactccctattttccagttggatttctgagccaggcagcttgtttatatttttatagtaactatgcatgtatgttctatggtaatgtcgctatataacatgtatgagtgaatatatacatattctatcaaggaatgagggtgtgcacttccattcccttgctttttttaaaattatatataaatattttgaatgtgtagattttgtctttctctaattttttatatttgaacatcttattcttaattttttatttccttcataataa

SEQ ID NO: 168 - DNA, 3953 bp, Glycine max
  source 1..3953: mol_type = genomic DNA
tatgatatcaattaataaaatttatatgatatcaatttgattaattaaaattatatatataaaagaatttggaactccttcactcagggtcactgcatatccaatggagggttagtgagtgttgttgacttcacattgacgatcctttttttttcctgtctgtttgcttccaatttctcataccttcaatcttcaatcttggattggagaacagcattgattgagttttaccacacgatcgtagagcttctgatatttttcgaagaggaaaggcaaaagagttagcatttaggatgggaaaaacaattgagttgtatggattccctacatctgtgaatgtgtctgatgtaaagacatttgtagagcagtatactggtgaaggaactgtgttcgccattaaattaagacatggaaaaggtcgggttccaagagcatttgcaattattcaattcaccaccgcaaattctgctacatctatgatgtccagagctaacaacattttgagaacattgcggtatgggacctcctatttaaaagctcgggaaatggaaagagatattgtgccaaggccaagggtgtttttgcatagtttggatgatgtgaaactgtcttttggctgtcagatctcaaagggaagattctctgttttatggaaaaagcaggatgttattgtaaattttgggagtggaatgagaaagatgcatttcttattttcccacaacaatgtgcaatacaaacttgagctttcatatgagaacatttggaagattgagctgcatcggccacggaatgagactacacgttatctgttgattcagttacttggtgctccccgggtttttgagaacgatgtacctacatcaacaaatatctttgatgatcctttgttcaacttcttcaaagatgcccctgatgagcaatggatccgagcaattgatttcactccagaaagtcgtattgggcagtcctccgccatatgtctggagcttcctaatggccgacaacttccaaatttcagggaaaactttgcttattatgaggaaagtgagaggcaatacactttacagacaggagttcccttttctcaaaattggggtcttgtccccattgttgctcctcctctaggtgttaaaatatcatatgacatcttgtttaaagtcaattcattggttcaacatgcatgtcttgcaggacctgcacttgatggtgacttctatcgcttggttgatccacgtagaatgccccgtgaatttattgaatatgctttagaaaagatttactattcaaaggaattttgttatgaacccacaaagtggctgactgatcagtacaaaacataccttgagtcaaaaaatcatcctcggtcacctgcaatatccttggatacagggttggtatacgttcgcagggttcagatcacgccttgcaaagtatacttttgtggtccagagatgaatgtctcaaatcgtgttctccgtcatttccgtgaacatattgataactttctacgtgtttcatttgttgatgaagaattggataaactgttttcaactgatttatcatcacgttcacagaacaagaaaactgagatatacaccagaattctttccatccttaagaatggcatagttgttggtgataagaagtttgaatttctagcattctcatcaagtcagttgcgggaaaactctctctggatgtttgctcctacagaaactggatgtactgctgcttacataaggaaatggatgggaaattttagccagattaggaatgttgctaaatatgctgctaggctggggcaatcttttggttcatctactgaaactctaagtgtccatagggatgaagttgaaattattcctgatgtgaagaagcttacatatgatggaaacgaatatgtcttctctgatggaattgggaaaatatctcttgaatttgcccagaaagtggctaaaaaatgtggttatgattgcactccatctgcctttcagattcgatatggtgggtacaaaggagttgtggctgttgaccctaaatcatgctacaagttatcactgaggaagagcatgcggaagtatgattcagataacacaaagttagatgttttggcccgtagtaagtttcagccatgttatctgaatcggcagttaatttctctcttatccactcttggtatcaaggatgatgtttttgagaaaaaacaaagagaaactgttaatcaactgaacactatactaacagattcattaaaggctcaggaagttctggacttaatgtctgctggagagatcactaatgttctgaaggagatgctcatttgtggatacaagcctaatgaagaaccattcctttcaatgatgcttcaaacatttagggcatcaaaacttttggaattgcgacttaaatctaggatctttattccaaaaggaagagcaatgatgggatgtctagatgaaactagaaccctagaatatggtcaagtatttgttcagttctctaacaataggctgcagaatctatctgatgattttttttcatatgatttgccaaagaattatatggttaaaggtaaggtagttgtagcaaaaaacccctgcttgcacccaggtgatgtgcgtgttttacaagctgtggatgtgccagatttgtaccacatggtggactgtgttgttttccctcaaaaaggaccaagacctcatccaaatgagtgttcgggaagtgatctggatggagatatctactttgtttgttgggaccatgaattgattccttctcgcccaattgatccaatggactatactgctcctgcaactgtggaattggatcatgatgtgatgatcgaggaggttgaggagtattttgccaattacatagtcaatgacagtctgggaataattgccaatgcacacactgtctttgcagataaagaacatttgaaagcaatgtctgatcaatgtgttaagcttgcaaggttgttttcaacagcagttgactttcctaaaactggtgttccagctgttatacctcctgaacttcatgtcaaagaatatcctgacttcatggagaagcctgacaaacccacatacaaatcgcataacgtgataggaaagctctttagggaagtgaaagaaatatcaacaagtgccggctcaattacatccttcacaaagttggttgcgagagactcttacgaccatgaaatggaagttgatggcttcatggattatgttgatgatgctttctatcacaaaaccaattatgactacaagttgggaaatctgatggactactatgggatcaaaactgaagctgaaatcctcggtgggaatattatgaaaatgtcaaaatctttcaacaaaaggagggatgcagaagcaatcaatatggctgtgaggtccctaaggaaagaggccagggcctggttcaatgaaaacagcagtggtgatgtagattcagggagtagtgatgtgtatgcaaaagcttctgcttggtaccatgttacttatcatccaagttactggggttgctataatgaaggcatgaatagggatcattatctaagtttctcatggtgtgtttaccctcttcttgtccaaatcaagaaagagaaactcagcattagaaggtcctctttggaatacagtttcagtgggttgcgtttgagttgacaactttggactttgcactccctattttccagttggatttctgagccaggcagcttgtttatatttttatagtaactatgcatgtatgttctatggtaatgtcgctatataacatgtatgagtgaatatatacatattctatcaaggaatgagggtgtgcacttccattcccttgctttttttaaaattatatataaatattttgaatgtgtagattttgtctttctctaattttttatatttgaacatcttattcttaattttttatttccttcataataa

SEQ ID NO: 169 - DNA, 9440 bp, Glycine max
  source 1..9440: mol_type = genomic DNA
ggatttgttaagattgtatacgatattatcaaaatcagttttaattaagattaaaaaacaaatgtatctgcaatttaatatagtacattgggattaaatatcttaactttaaatttaattcaaattagaattcaaattcaaaatgaattaaatggttaacatataaaatgtcaactgacttaataatataataacttccaaaaaataaatactttaatatcaaagcaagattgaaatttatactataagagtgactcaaatctataataattccatatcaaattaatactattttccttaattagttacatatttgaaatatttttttaaaatttcctaaaatatttgatcaatattcaattttttttaccaatattcattataatatggtattgtttatttttttatgatgtataatatggtgttgcttgaccaagatttttcatcaatattgcatatttttttaaaattatactttcaaatgttttatatgtttcattttttttggtaaaacaattatttctcaaatatagttttgaatttataattttatgtttattttttttaatatctgcacaaaactaacgagcatgaatatcaactgataggggaattttggcaattgagttattttttaaatgttaaaaatgtagaattttcgaatgatgtattttatatttgtctttgctttaattattagcaaaatagtatagttttaactaaattaacattctattatttttctaactttgttataattcttaaaataatcattattaagacacattttataagaaaaaatattttatataagagggtaatataattaaatctgtaacttataattatatattaaggatttaaaatttaatgttaaaaaaaattatataatttttttaaaattcacataactttttcgatcacattacatcaaaatgccactttcatataagatataatttttctcattcttattattattattttagttaatgtatgaatttaactttttctaaaaaaatgacatatctgatttaaatttatttatttaattttaaaatcaaataactataaacaaagtatttacttttaattatagctgaattaatcacgtatacatattttgtttagaattttaaacatattcatgtattgttaattttttttttttaaaataacgtcgtagtaaaaaattgtacctacttctagttaaatgaacatgatttctaggatgaataaccaattattagtatttttgcacattgatgtctccccaaaattcatttatttgcacgcaccccatcattatccagacccaatgccacgaacatgaatacaaaaacgcattttatcgaaagaatcgatgtttctctttattaaaaaaataaaaaagttgtaacaaatgctgagggaaatggggccccactagtgcaaacgtaatcaccatgctccacctttacgaaccgaatcccgaaccattttgcctatcggatctcagccctccacgtcaccacaccacaccacatcatcaaacgtccgagagcggctaacagcacaaactgcatagagcgtcaccgcagagtgcgtcattattattattttctcttcgtactcccccagaggaatgagaggatgtgaacaggtgctcgctgatgccactattaaaagagtgaagggagcgagtaacagaatcacgcttcaaatcatctgcattcatttttcttctctctacttcttctgcgtcatcttagggttttggtttgtgctcctctcactgattttctggtcaggaatacgctaactcttcttcttacctcatgaattttgcttcgttttttctttctttctctcttctgcttgctttcgttgctacctgtcatgatcacatgctgcatttgccatttcctgcgtttttcttccgcttaattcgtcctcagtgtttgtttcaccgtttaatcgtgtcttattgatagtatggggttttctgcttttgaaatgcttcgctgttgtttatgttctttcgttttcctgcgttttttttgtgatgttttgttttgctgcatgtctttcggctttgatcgtctttttttgcgtgtttattttgaagaggaaacgctttcgctgtgcttcgttgacttaagctcgattttgcttccgaggcgacgcgtatttgttagaattttcagtgtttttttgagtttaattcttgcggtttcactggttgtgatttccctgtatctttgtttttttttttttttgaaagcgcaaactctgtctgctctgatgatggtccgaatcggtgactacacctttgggcatttgtgttccgaagccagatatttgcttcagggtgcctgattttgccgcccgagtatcttttttgtgtttagttgtatttattttttaatttcgtttttatttgtatctttttttatataaattttacttgttttagctttttacgtcctccgtgcttatgtcgtttactgcacttttgtgtattttattttgcttgcagtgcatgtaattatttctatgttggtttatttgtataaaatgcgttttgctggttacttgtttgtttcatcaatttgagtgagaaatgttgttctagattctatattcatgatagttgttccctttttgttttgttgtgcgaaaatgttttactatattgtttttcgcataatttcgcatgattagagtttttatgtagataatttgagcattttgttgtttttaaaattcttttctcagtaggtttatttgtatagacgtattttgttgtttgtttgccttttacgcttcctgtttgaataataaaatattactctagatttttgtttgcatgatagcggtttgtctctttttttttttgtatgaaaatttgttgtaccctagtgtttggcgtctgcttagatatgcatgtagacaatctcagaatatttagttatttttcaaattttttgtttgaaggattatgtgaactaactacttatgctgacacaatttatttaatgcatgatctatgcaggagatggcttctttcgggccaaatggaactgaaaatgaggattcgttgcctcccccacctcccgttgtaccatcagatgttgtacctgttaaagctgagccggagaagaaaaaggcttcaaggtttccaatagccaggcgtggccttgcttcaaaagggacgaagctgcaacttctcaccaatcactacagagtgaacgttgcaaacactgatgggcatttttatcagtatagtgtatgtgctttcattttcaccagcattatttatttcaggtctctgtttaacttggaatcatttattcaatgtttatgtttaagcaggttgctcttttttatgatgatggacgacctgtggagggtaagggtgtagggaggaagcttctggacagggtgcatgaaacgtatgattctgaattgaatgggaaagattttgcatatgatggtgagaagactctgtttactctcgggtctcttgctcgcaacaagcttgagtttacggttgttctggaggatgttattgctaccaggttcaaattctgtggatgctaattcttcaatttgacttaactttttactgtttaagctttgtaacttattttttctgtaccaatgtatgttatagaaacaatggaaactgcagcccagagggcaatggagaactgaatgagagtgacaaaaagaggatgaggcgccctaatagatccaaggcatttaaagtggaacttagctatgcttcaaagattccattgcaggccattgccaatgctctacgtggacaggaatctgagaattatcaagaagcaataagagtgcttgatatcattttgaggcaacatgctgctaagcagtgcgtggattatgatcatttcttttttcttctattattattattattgataacattattgcatcagcttgcctttgtgtgtctcttatgttgtaatttaaaataataaaataatgtcaatttacagagggtgtttgcttgtgcggcaatcgttctttcacaacaatcccaagaattttgctgatgtaggaggaggtgtacttggttgcaggggcttccactctagttttagaactactcaaagtggactgtctttgaacataggtttgatctgttgtttgccttggacactacattcgtttcctcataatatttattaattctttcttggaatttgtttagatgtctcaaccaccatgataattacccctgggcctgtggttgacttcctaatatccaatcaaaatgtgagagaccccttttcacttgattgggcaaaggtaagctaattcaatgaccatttgatcatagtacttgattgattgttaaataccataatctcatcttttatttattttcttgaacaggccaagaggacattaaaaaacctgaggattaaatcgagcccatctaatcaagaattcaaaatcactgggcttagtgaactcccttgcaaagatcaaatgtatgccattaattctgcttttgttcttgataattaattattattaattttagagatttttaactatcagggtgtgggtgttgtaggtttacattgaagaaaaaaggtggtgatgatgacactgaggaagaagtgacagtatatgattattttgttaatatccgcaagatagatcttcggtattctggggatctcccatgtatcaacgttgggaaaccaaaaaggccaacttacattcctcttgaggtagatttggtgctttatatttttgtttaggattttgaattagaaagctattgattcatctttgctggttaataactttttaactttttatgcttagctgtgttctttggtatcacttcaacgttatacaaaagcactatccacacttcaaaggtcttcattggtggagaagtccaggcagaagccacaagagaggatgagggtcttgtctgatgtatgtgtctttttgtcctgttttgaatatttgggttgtatatttttctggtttacctgatattactttaattgttacaggcacttaaaagtagcaattatggttctgaaccaatgctacgcaattgtggaatctctataagccccaactttactgaagttgagggtcgggttttacaagctccacgggtaaattttaagtcattataattgtgcatttgcttattaatttttatcatgcattgtcttctttatcttcttttaaataaactttgttaccttcatattgatgaatattgtggtaatgacttaattttgttaatattgtgctcagagcattaaatattgctttgcttaattgtctaagaatagttggtaatataatcttcatgttctaccataaccaattctaactggttttatatggaaatgttgtcaaattattgagatgtggttttatttgttgttgatggcatcttattctttaattatcaatgttgagttctgtaatatgggttttaaagctgattattaaatttacgtttgcagttgaaatttggtaatggggaggacttcaatcctagaaatgggaggtggaacttcaataacaaggtatgttattctactcttacattaatttcataaaaaaatgatttgaattttctaatcattgattttttttctccagaaaattgtcaagccaactaaaatagaaagatgggctgtggttaacttctctgcacgctgtgatatacgagggcttgtgagggatctcattaagtgtggtggaatgaaaggcattgtaagttttagaactgcagattgactctgaagcataatgaagttgctgactatatttttcttaactgcaattggtaggtgatagatcagccgtttgatgtgtttgaagaaaatggtcagtttaggcgtgcaccgccagtggttcgagttgagaagatgtttgagttggtccagtcaaaacttcctggggctcctcagtttcttctttgtctgcttcctgagaggaaaaattctgatctttatggtaaggttatttgataagttttgtcttttgtttactcctctcatgcaattgtttaagtccccttattgatgaaaattaactgaacttggtaaggtccatggaagaagaagaatcttgctgagtttggaattgtgactcagtgtatagctccgacaagggtcaatgaccaatatttgactaatgttctgttgaaaatcaatgctaaggtatgttgtttcttggtttaattttctatttttttttggaatatatattgtaattctttttgtgcagtttgtcaggattcattgttgtacctttcattgaattttttttattgttttgtagcttggtggtctgaactcaatgttaggcgttgagcattctccttctattcctattgtttctagagcgccaaccatcattattggcatggatgtgtctcatggttcgccagggcaaacagatattccttcaattgctgcggtattttattagtgcttgtgatttttatattgggcatctgtttcaaacctgtgattgtcttagtttgagcctacatcctggttattggaatgttttatgactatctgattgtgtgctaatgcttaaacatgcaggtggtcagctctagagaatggcctctaatatcaaagtatagggccagtgtccgtacgcagtctccaaagatggaaatgattgataatttgttcaagaaagtttccgacaaggaggatgaaggcataatgaggttaatttaattttgtaacaaatcattgaattaatcctcctagtatatttatgatatcatattgttctcaattttgtttacattaatctggaatttggttctgtgaaatgatcagaatttggtttctaaattttgtatcaaagcatttatttattcattatagtttgtgtaattgctctcgtgtgttgtgcattacctctttgctttaaagcatttcttgctacataatattaagtgaatgccagtttagtttcaattttataaattattaacggtattttgtggtaaccgtttattttctggtttatattttttggaattggacggtcattggtgtgttgtatatctgcagggagcttctacttgatttctatacaagttctggaaatagaaagcccgataatataatcatattcaggttactttttttctcattttattctgtgaaatatgtactttatatttttagttttcataaatgttgtttgagttgttaatatatattgtaatggatgttatccatttttgtttttatacaatgattaattaaatatattgttttaagtcaatgttatctagtattgtggttaatatgtatgactgttcgtgtaatatttgattagtttaaaaggcacttgattgatggtctttgttagtgttttgaatgataaagttgtatgatacgatccttatcatctgttctgcaaatctctttttatgtcaccaagacaaatgtcaaaggcttatagatttaacaaatgcctactatttggtttgcaattcctgacctaatttatgttagatgatcagttggtcggacctataatgtgtatgttgttatatgtgagtgtgtgtactgaattgtgtttttttttaaattttttttatttgtcttcagtcgtttttatgtctgttattttattagttcttacatattttttcataatgaatctttttaatatgtatttttgtttgttaagtgatatttttgtgtattttgaactgaccttttttgggctggatgtagggatggtgttagtgagtcccagttcaatcaagttttgaacattgaacttgatcaaattatcgaggtgcttatttattgagctgatgaatttaaatattaaatatttgaagtgtttttggggttaatattgtcttcttcaatattattaggcttgcaagtttttagatgaaaagtggaatcccaagtttttggtgattgttgctcaaaagaaccatcatactaaattctttcaacctggagctcctgacaatgttcctcctggtatgcgtcttgtttattttgaattttaacacgtttcaataatttctgttttgttatttcttaaccttttttattttttgcaggaacggtaattgataacaaaatttgtcatcctcggaattatgatttctacatgtgtgcacatgctggaatgattgtgagtatctgctattttttattttatttattttaatgtggttttggttttacaatttgtagatccattactgtggctcctatccattgttgatgtaaagtgtgcgaatgttctttaagacgcatgtacattcattttacttggtgaaattgtttacaaattgaagttgaatgattctggcttctttccttcttaatttaaatgtttatgtatgttcatttgcatgtctctaatttttaacatgtaattttttttctggtcatcctcgttatgcatttcactgaatgctgtttatttagagattaggaagctaccctctgtacgagttttccataaatgatatgtttgtgtcagtacttcaataacatgcttgtatttgtttaaaaaattactattcagggtactagcaggcctacacactaccatgttctcttagacgagattggcttttcacctgatgatctacaggagcttgtgcattcattatcatatgtgtaagtagtagttgtgatctatttgattgttttagaatattgtttattccaacccttgccatgtatggatattgtcttaaaattattttgctatttgacaataggtatcagaggagcacaactgccatttctgtcggtaagttcgtgcacaacatttttagcattgtgttttacacttatatgttcccaatttatagaaatatatagggtctcattggtgaaataactgaatgtatgcagttgctccaatatgctatgctcatctggctgcaactcagatgggtcaatttatgaaatttgaggacaaatctgagacatcttcaagtcatggtggttctggtatacctgctcctcccgtccctcagttgccaagattgcaggacaaagtttcgagctcaatgttcttttgttgaaggatctgtttctagggataggcgatgactgataacagtgctgtttataagaccttcataggatagtttttttgtggaaacagttgaactatgggcgccaatggtgtaggtaaggattattatacatgtaagcaggcattttgctcatgcctttacatgtgtttagtcttttactattttgaatattgttgcgaagtctttcgctattttgaagtttgttaaggtttatgtgattcctatggcgttcctattatgcactcttgatcattatctaatctagtggtttgcatgaatcaaaaaggtgaaatgggtattactgtttttgttaaagtttgttggtgatctgtct

SEQ ID NO: 170 - DNA, 9839 bp, Glycine max
  source 1..9839: mol_type = genomic DNA
ttaggattaaatatcttgacttttaatttaattcaaattcaaaatgaattaaaatgcttaatatataaaatgtcaattaattatttcgtaggaattaaatgcaatatcaaataatttataacacttaaataacttactcaaccaaccaattgaattagataaaatgtacactgacttaaccagaaatataataactttcaaaacagaaatattttaaattcaaaacaagattgactttaattctacaaagagtgaataaaacctataatattttcatatcaaatcaaattaatattattttccttaattaaatacatatttttttaatctgttataatatggctctgtttaaatatttgttattataatatggtattgtttgacctataataaatattttttattataaatatttttcattaatatcgtatattttttcaaattattcttccaaatgttgtatatgtttaagtttttttttggtaaaacaattacttctcaaatatagttttgaacttataattttaatgatatattcataatactatcgagcatgaatattaactgctaggatgattttccaacttaatcaagtgattttgaattcttaaaatacaattgcattaacattcaataaaaaagattttgttaaatttagtaatttctactaatatgattttaccagtcgtgagcacaataagtttttaccaattaagttgttttttaaatgttaaaatgtagaatttttaaattatgtattttatatttgtctttacttttaattattagcaaaacagtcttgttttaactaaattaacattcttttatttttcttcttctaattttgttatgattttcttatttttaaatattctcaaaataatcaacatagtcatcatactattattttcatagttaatttatgtattcaactttttcagaagaatgacatatctcatttaatttttttttatttaaattttaagagaaaattattacaacccaaactactccaaatttacttttaattatagctaaattaatcacgtataaatatgttttttttagaattttaaacatatttatgtattgttcatttatttttgtattttttcaaaattaaaatacacctcgtagtaaaaaattgtacctgctgctagttaaatgaacatggtgcctaggacgaataaccgaatattagtagtattgttttgcacattgatgtctgtcaccaaattcatttattcagcattatccaaacccaatgccacgaaggtgaatacaaaaaggctttttttttttttttatcgaaagaatcgatgtttctatttattaaaaaaataaaaaaggagtaacaaatgctgagggaagtggggtccacgagtgcaaacgtaatgaccgtgctccacctttacgaaccgaatcccaaaccgtctcaaacgtgatcggatctcagctctccacgtcactaaaccacatcatcatcaaacgtccgagagcgggtaacattacaaactgtatagagcagcaccgcagagtgcgtcatttttattttttattttttctcttcgcaattcactcattcactcactcactcactcactcactctctctcgctgctgccattattaaaagagtgaagagagagcgagttatagaaccatacttcaaatcattttcattccattttcttctctctgcgccttcttagggtttgggtttctgcttgtgcttctgtcactcattctggtgaggaaaacagcctactcttcttacctcacggatttcgcttcgttttttttctctcttgctttcattgctctttgtgatgatcacatgctgcatttgcttttttctgatttttttcttccttttatttcgttctcagtgtttgtttcaccgtttaatcgaggcttattgttggtttagggttttctgcttttggaaatgcttcgctgttgttcatgtcctttcgtcttgtgatgttttgttttactgcatgtgtttcagctttgatcgtcgttttttgtgtgtttattttgaagagaatatgttttcgttgacttcaaactcgttttgcttccgacgcgaagattgtttgctagaattttcagactgtttttttgagttaatccttgcgttttcactggttgttatttcgccgtgacgtttctttttgcttttttaaaagtgttaaatttttttgaagcgaaaactctgtttggtgtcatggtggctcgaatcggcggccacactgagtttaataaaattaattttcaccgtctttatgatttttccgtaccgatgttttatgtatttgcatttttaaattttgtttaatttttttttggaaagcggaaactctgtttgctctgatgatggtcagaatcggtgaccacacctacctatttttgggcatttgtgttccgaagtcagatatttgcttcagggtgcctgattttgctgccagaggagcttttttgtgtttagttgtatttgttttttaatttcgttattatttgtattttttttaatttgacttgttttaacattttacgtcttccgtgcgtagtattttgtttactgcacttttgtgtattttctttgcttgcattgcatgtgcttacttctgtgttggtttatttgtataaaatgcgttttgctagttacttgtttgtttcatcaatttgagtgagaaatgttattctagattctatattattgtattttattttgctgccatgatagttgttccttttttgttttgttgtatgaaaatgttttactatattatttttccctaatttcgcataattagagtttatgtagataatctaataatattttaaatttattttcttcgtaggtttataaacgctttttgttgtttgttttcatagtttcaccgcttcctattcgagtaataaatattactctagatttttgtttcccttctcttaaattgatgttcttttttcggttttatttgcaagatagctgttcgtcctttttttttatgaaaatttgttgtaccatagcgtttggcgcatgcttggagatacatgtagacaatctcagaatatttagttattttttgaaatttttgtttataatttttgttcaaaggattatgtgaacttactacttatgctgagacacaatttatttaacaacttttcctatatagctgacactgctttttataatttggatgtggtgatttaatacatgatctatgcaggagatggcttcttcggggccaaatggaactgacaacggggattcgttgcctcccccgcctcctgttgtcccatcagatgttgtacctgtcaaagctgagctggagaagaagaaggctttgcggcttccaatagccaggcgtggccttgcttcaaaagggacaaagctgcaacttctcaccaatcactacagggtgaacgttgcaaatactgacgggcatttttatcagtatagtgtatgtgcttttattttcacctgcattatttaattcaggtctctgttttacttggaatcatttattcaatgtttatgtttgtgcaggttgctcttttttatgatgatggacgacctgtggagggtaagggtgtagggaggaagcttctggacagggtgcatgagacgtatgattctgaattgaatgggaaggattttgcatatgatggtgagaagactctgtttactcttgggtctcttgctcgcaacaagcttgagtttacggtcgttttggaggatattattgcttccaggttcaaattctgtggttgttaattcttcaatttgacttgacttaactttttactgtttcagctttgtaactttttcttcttctttctgtaccaatgtatgtacagaaacaatggaaactgcagcccagatggcaatggagaactgaatgagagtgacaaaaagaggatgaggcgccctaatagttccaaggcatttaaagttgagcttagctatgcttcaaagattccattgcaggccattgccaatgctctacgtggacaggaatccgagaattatcaagaagctataagagtgcttgatatcattttgaggcaacatgctgctaagcagtgggtggattatgtttatttcttttttcttctatgattattaataataatattattgtatcagctttccttagtgtgcctgttatgttggaatataaaataatgtcattttacagaggctgtttgcttgtgaggcaatcgttcttccacaatgatcccaagaattttgctgatgtaggaggaggtgtacttggatgcaggggtttccattctagctttagaactacacaaagtggactgtctttgaacataggttcgatctgttgtttgccctggacactatattggttcctcataatatttcttaattctttcttacaatttgtttagatgtctcaaccacgatgataattacccctgggcctgtggtggacttcctaatatccaatcaaaatgtgagagaccccttttcacttgactgggccaaggtaaagctaattcaatgaccaattgatcatagtgcttgattaactgttatatacaataatctcattttttatttattttcttgaacaggccaagaggacattaaaaaatctgaggattaaagcgagcccatctaatcaagaattcaaaataactgggattagtgaattcccttgcaaagatcaaacgtatgtcattatcctgcttttgttcttgattattaattattatcatttttagagatttttaattaccagggtgggggtgttgtaggtttaccttgaagagaaaaggtggtgatgatgttgctgaggaagaagtgacagtatatgattattttgttaatatccgcaagatagatcttcgatattctggggatctcccatgtattaacgttggaaagccaaaaaggccaacttatatccctcttgaggtagatttggtgctttatattttgttttagtactttgaattagaaagctattgattcatctttgctgcttaattacttttaattttttatgcttagctttgctctttggtatccctgcaacgttatacaaaagcactatccactcttcaaagggcttcattggtggagaagtccaggcagaagccacaggagaggatgagggttttgactgatgtaagtgtctttttgtccagttttgaataattggattcttgtatatttttctgggtttacctgatattatttctattattgcaggcacttaaaagtagcaattatggttccgaaccaatgctacgtaattgtgggatctctataagccccaactttactgaagttgagggtcgggttttacaagctccgcgggtaaatttcaagtcattataattgtgcatgtgcttattcttttttattttgttaccttcatgttgatgttgatgaatatcgtagtggtgaattgattttgttaatattgtgcccagagaggtgggtttagatattgccttgcttttgcaccaattctaattgctttttgttggctgaattatcaatgttgtgttctgtaattgctttcgaaactgattattaaatttgtgcatgtagttaaaatttggtaatggggaagacttcaatcctagaaatgggaggtggaacttcaataacaaggtatgtcattctaatattcaattaatttcataaaaaaagatttgaattttctaataattgaattttttttctccagaaaattgtcaagccaactaaaatagaaagatgggctgtggttaacttctctgcacgctgtgatacacgagggcttgtgagggatctcattaagtgtggtggaatgaaaggaattgtaagttatataactgcagattgactcggaagcataataaatttgctgactatatttttcttaactgctattggtaggtgatagatcagccatttgatgtgtttgaagaaaatggtcagtttaggcgtgcaccgcctgtggttcgagtagagaagatgtttgaattggttcagtctaaacttcctggggctcctcagtttcttctttgtctgcttcctgagaggaaaaattctgatctttatggttagttatctgataatttttgtcttttgttcactcttgttttcatgtaattgtttgagtccccttattgattaaaattaactgaacttggtaaggtccatggaagaagaagaatcttgctgagtttggaatcgtgactcagtgtatagctccgaccagggtcaatgaccaatatttgactaatgttctgttgaaaatcaatgctaaggtatgttgtttcttgggttagttttctattttttggaatataaattacaaatcttttttgtgcagatttccaggattcattattgtgcctttcattgaaatttttaatcttttgtagcttggtggcctgaactcaatactaggtgttgagcattctccttctattcctattgtttctagagcaccaaccattattattggcatggatgtgtctcatggttcgccagggcaaacagatattccttcaattgccgcggtaatttattagtgcttgttgtgtttttatatgttgggcatgtgtttcaaactcatgattgtcttagtttgagtatacttcctggttattggaaggaatgttttatgactatctgatagtgtatgctaatacgtaaatatgcaggtggtcagctcccgagaatggccactaatatcaaagtatagggctagcgtccgtacccagtctccaaagatggaaatgattgataatttgttcaagaaggtttctgacaaggaggatgaaggcataatgaggttaatttaattttgtatcaaatcattgaattgatcctcctagtatatttacgatatcatattggtatcaattttgtcaacattaatttggaatttggttctgtgaaatgatcagaatttggtttctaaattgatgtcaaattatatattggattaaggtatagtgcgtccaacaatatgataaatctaccaagcatttattcgttctttaagtttgtatacatgctctcgtgtgttgtgcattaccactttcctttgaagtatttcttgctacataatattaagtgaattcaaatgaatgccagtttagttgcaatttataaattataaacagtattttatggtacttgtttattttgtggtctgcattttctggaattggacagtcattggtttgttgtatatctgcagggagcttctacttgatttctatacaagttctgggaatagaaagcccgataatataatcatattcaggttaactttttttctcaaattttattctgtgaactatgtactatattttctttgtttttataaatgttgtttagttgttaatatatagatattgtaatgtttgttgttcgtttttgtttttaacaatgtttgattaaatctattcttgcaacatgttatgtaatatcgtggtggttaatatgtaagactgtttgtgtaatatttgtttaggttaaaaagtgcttgcttgatgccttttttagtgttttcaatgataaatttgtaagatacgatcattatcatctgttttaggctcaaatactctagctgcattttcctaatttagtttgcctttttttaaccctttctcttttaattggatgtgcaatattcaatatttattaacaattttaaaaggattcatatgcatttaaggtaataggatttttgttgatttcatctgagaatgttataccatgcaaagctctttttatgtcactaagacaaatgtcaaaagcttatagatttaaccaatgcttctatttagtttatggttttattatcacttcagaatgtttgtctgaatttttcttcagaatgtttgtactgaattttatatatatttcttttttactgaattgtgtgtgtgtgtgtatttatttattatgtcttcagttgtttttatgtctgttattttgtttgttcttacatatttttttgtaacgaatctttttaatatgtaagtttatttttgtttgttattgtatttgttctttaatcattgtactgacctttttttggctggatgtagggacggtgttagtgagtcccagttcaatcaagttttgaacattgaacttgatcaaattatcgaggtgcttattgattgagctgatgaatttaaaacattaaatatttttagtgtttttggttggggttaatactgtcttctttaatgttaggcttgcaagtttttagatgaaaagtggaaccccaagtttttggtgattgttgctcaaaagaaccatcatactaaattctttcaacctggagctcctgacaatgttcctcctggtatttgtcttgttttatttagaatttaacatcttttgataatttctgttttgttatttcttaacccttttttatttatttttgcaggaactgtaattgataacaaaatttgccatcctcggaattatgatttctatatgtgtgcacatgctggaatgattgtgagtatctgctaaattttttttctgtattttaatgtggttttggtttttctatttgtagatccattattgaggctcctattccttgttgatgtaaagtgcacgaatgttctttaagacgcatgtacattcgttttacttggtgaaattgttttcaaattgaattcgaatgattttggtttctttccttcttaattaaatgtgtatgtatgttcgttcatttgcatgtctctattttttagtatgtaagttttatggtcatcctcgtcattcatttcatttggatgctgtgtattaagagattaggaagctacccttggtaagagtttccataaatgatgtgtctttgtcagaacttgcaataacagtcttgtattgttttgaaaaattactattcagggtactagcaggcccacacactaccatgttctgttagacgagattggcttttcacctgatgatctacaagagcttgtacattcattatcatatgtgtaagtagtagttgtgatctatttgattgttttagaatattgcttctgccaatccttggcatgtaacgatattgtcttaaaatcattttgctatttgacaataggtatcagaggagcaccactgccatttctgtcggtaagttcttacacagcttttttttttaactgtttatttagtggtttttgtattcatagaaatatatagggtctcattggtgaaaaaaactcatgtatgcagttgctccaatttgctatgctcatctggctgctactcagatgggtcagtttatgaaatttgaagacaaatctgagacatcttcgagtcatggtggttctggtatgcctgctcctcccgtccctcagttgccaagattgcaggaaaatgtttcgagctcaatgttcttttgttgaaggatctgttgcagttctagggatagtgataactgataacagtgctgtttataagacttcataggatagtttttttgtttgaaccgttgactatgggcgccattggtagtaggaaaggattattatacatgtaaaaaggcattttgcttatgcctttacatgtgtttagtctttaactattttgatactgttgcgagcgaagtctttcgctattttgaagattgttaaggtttatgtgattcctatggcgctcttgatcattttctattttagttgtggtttgcatgaatcaaaagattaaatgggtatattactgttcttatttacggataaaatccatattatagactcctgattgcaatgtgacccgagtaaataagaatgtctcaattgtgtttaaaatacgtgaat

SEQ ID NO: 171 - DNA, 10321 bp, Glycine max
  source 1..10321: mol_type = genomic DNA
tttggggcaaaactccccatccagcaacactcaggccatcaatcatagttgtgtgtgaatcagttcccgtcatttgtgttgaacacaactctaccaaggtattctaaattaacgtgcaaaattaaaatgacaatattcagaaaagaaatttgaatcacgggatgaatttttttcgctgcatgtaaaattaaaagtattctatatcagcaaaattagtattcaaattaaaagtattctatatcagcaaattgattttggtactgcatatcattaacgattcaaattgattttggtactgcatatcattaacgattcaaattgattttggtactgcatattatcaagaagaacaatataacgattgaaattgattttggtattgcatatcattattctatataagcaaaattagtattcaccataaaactaaatagagacaacatcttatcaagaagaagaatataacgatttagattgattttggtactgcatatcatttgctttaatgtctacattgactaaacaaataaaaacttcaaatttaggggtaaaaatgttgaatctcaagtacccgtgaatttgttttaatctattttctgcgcttgttctaagaaattgaaactttttggggtaaaaataacaaagaaaaacgataagctaacatgcatgtaagaaaggatgcatgataacagcaccgaaagagaagtcgaacctcgtccaatacaaaaaaacaaaaatctaacatgcatgtaagaaaccatacatgaaaacaacaccgaaaaagaaggcaaaccttgtttgtatctggaaaaatgaagaagagaaaaacatcaataataggaagtcaaaagttacacatttataaaagaaaatacaacagcaaagctacaattaaaaaacagaacaacaaaagtaccatgaacagagaaaaacgataagctaacatgcatgaaaacaacatcgaaagagaagccaaacctcgtccaacacgcatacatgaaaacaacaccgaaagagaagacaaaccttgtttgtatctggaaagatgaagaagaatagaaaagatggaagcgattaaccacgcaaagaagcaagaagcaaacaggagcaagtgcaaagtgtggtaaattagacacgtaaccacccaaagaagcaagaagcaaatgggagcaggtgcaaagtgtgataaattagacatgtaaccacccaaagaagcaagaagcaaataggagcaggtgcagagaaatcaaacacgtgtaagaaacatgggagtgggaaatgaaaagactaaaagataaaaaaattaaggaaatgaacatgtgtcccagccttaggtagggacattttagaattttccagagacttctcttttattagatagtatatagatatatcatattaaaaaaatatttattctatgggtgtatgttttcaataaaaatacattgttttcaaccagaactgtttcatattataattttttttttctcttcatttttttcctttaaaatcaaacatatgcaggcgtaggaaaagtcccgaaacccgaggcacgcacgcgtcagtgacatgcctgcacgcacttactcgccatgcgtgcgtttcatccttcgagctcgctcactgcatcaccgcacccaatcaatcccacccctccgtgcaatcaacaccaaacatgaatcaacggtccccaacgcatggaaccgaaccgcagagaataatcgctttgttgactcacaagagagagagagagacgatgacaaaagaggtgagtgaggatttcatttatagtttatagagagagagagcgttgacacctatccattttgaaaccttctaaactcactctctcactttctcactccctcactccctccgttgacgtttttgttttctttttctctgtgttctgaagaagttttagggtttcgttttgtttctctcttcggccacttcaggtcattttttccttttttgttttctgaatttttaaccgtttctttttgtttttttgtttgtgactctctctggtgttgtaatttgtagtgctgcattgctcttctggcttcggatttttttagccgtattatttttttcttttcaattttgctttgtgagaatggttgccttattttttatttttttctgaagttgaaatgtagtactgttttttttttcttagggttttggaagttgtttatgtgtttgcatgtgttggacatggatcttgcttttttgactgtttattttgaaggaaaagaggattttgccttggctacaaaccgtgtttcgtttcagaaatggagttttctgttgttgctggagttttgtatgtttttcttcactgttttgggtttgctcttttttcgttgttaaaagttgttatttatagcattttaggacttgtgttggttttcttttttataagttcttttagtaagtggaaaaccctaatttctgcaatgcatgtctttaacatttggttgggtttgctcttttttcgttgttaaagttgttatttatagcattttaggacttgtgttggttttcttttttataagttcttttagtaagtggaaaaccctaatttctgcaatgcatgtctttaacatttgggtgggtattttttgttgatgggttagatttatcttctggatgctgcttttactgaaggtggtttgaatgaatgcatgccttttcttttgttatctatgttagaggatggtacggcgttttagactgttatttgttacaaaggttagccatgttttaaaagtgttgtgtatatacatttaagtaacctttgctgcatttagtaatatttttgcaatttatttgttgaagcttagctcttgcttttattgttttttatttttatttttttggtatggaattagtaatatgtaatgatcgaacttaacattttgttgctgcctttttgttatgtattcatgttcaccaaaagtagtacattgatttttggaagacactcttcagtgacattatgattctcaagtgcttggttttgaattgtggttgtggtaaaacaatctttgattttgtggaaaatttagacaaatgctgcagatgtggctgcaagtgtggttgtttaggcttacaaaaccttgatatttctgtagcaattgcggatgtgggtcattaataccttgttcttagtattgaatgcttaccaaatttactttattatatttgagagttaaactggtttaattctctttgagaatgttatttatttatttttaaaaaaccaaacatggggaataagggattccaacttcagactcatgggagactaaaaagttttcttgtaccaaacgcctccttaaacttttgtcatcttcataattcttcgtttatggataatgtaatcccctgctttaccttatattcctaactttgtctatacaggctatggattcatttgagccagatggaaatgggaaggagtcactgccaccaccacctcctgttgttccctctgatattgtacctctcaaagcagaggaggtgctctgtacccctaccgagcataataagaaaaaggcttcccgacttccaatagccagatctggtctgggatcaaaaggaaataaaatacaattactaaccaatcacttcaaagttaatgttgctaaaaatgatgggcatttcttccattatagtgtatgtccttcgattagtttttggtttagtattaatatctgtgtttttgtttaagcttgtcacttaaagttgatgcttatgttatcacttcacttgatatgcaaacaggtggcttttacttatgaagatggacgccctgtagaaggtaagggtgtagggagaaagataatagatagggtgcaggagacatatcattctgacttaaatggtaaggactttgcatatgatggggagaaaagtctgtttactgttggctctcttcctcaaaacaagcttgagtttgaagttgttcttgaggatgtcacctctaacaggtagaagtaattagagagcatttagttgttgttttggctcttcaaattggttttcgtactattgtttcaatagcctttgatttattttttgttttctaggaataatggcaattgcagccctgatggtctaggggacaatgagagtgacagaaagaggatgcgacgtccttatcgttcgaagtcattcaaagtagagataagctttgctgcaaaaattccaatgcaggccattgccagtgccttacgcgggcaagagactgagaattttcaagaagccatcagagttcttgatatcattttgaggcagcatgctgctaagcagtaagtaaatagtgctttctttttcttagcgtgtggttaactgtttaatatttttttcttaacatgagtctatctgtacattgtttattgcagaggctgcttacttgtacgccaatcctttttccacaataatccaaataattttgctgatgtaggaggtggtgtcctaggctgtagaggattccactcaagctttagaactacacagagtggcctgtctcttaacataggttaaattcgttgcctgtgcaatcttctcaagtcaatatgttttgtctaattctagcaatctctaatttgtttagatgtgtcaactacaatgataatttctcctgggcctgtggtggatttcttaatttccaatcaaaatgtgagagatccttttcaacttgactgggctaaggtgaacaagttttctgaatactttttcatctcccatcattgatattgtaaggctcaaatttgattcccccctatccccttttaacattttaacaggccaaaaggaccctaaaaaatctgaggattaaaactagcccatccaatcaagaattcaaaatttctgggctcagtgaactcccatgcagagagcagacgtacttattttctttgttttcatattgttaatttcttacactgtatttgctgtattgtaatttttgagttgttctttaggtgatgtgttgaggtttttgatggtgtgtattctgcagttttactttgaaaggtaaaggtgggggggatggtgaagatggtaatgaggaaatcactgtatatgattattttgttaaggttcgtaagatagatctccgatactctgctgaccttccatgtatcaatgttggcaagcctaaacgaccaacatttttccccattgaggtaaattaagggttttttttgttctctaaactgcatttgtttgcatcaattcaggaggtacagattgatcttagcaacatattggttattaatgaattttctttcttttttcttggttcttttaggtttgtgaattggtatcattgcaacgatatacaaaagctctgtccacgcttcaaagggcttcattagtggagaagtcgaggcagaagccacaagagaggatgaaaattttgtctgatgtaaacgattttttgctacattttgagtagtataattttaattcatatgtctaggataagaaatcttactattaacttttactgaaggcactgagaacaagcaactatggtgctgaacctatgctccggaattgtggaatttctataagcactggcttcactgaagtggagggccgggtgttgcctgcaccaagggtatatatatatttatatatatatatagttatagttataccattatgtttatgaatcgttttattaattctattttgtatattaaaacaatgatcttttttgttgaggtttggaagtatcaatagtagttttcttttatggttagaaaatgattattgaatcttcttcaatagttgaagtttggcaatggtgaggatctcaatcctaggaatgggagatggaatgtcagcagagtggtatttaattcaattccctttcctgtgaagttttaatattttctccttaataacaatattggcttaggttctaactttttgcatgctgtgacgtacgaggactgttgctaactttcatgaatgcttcagaaatttgtggaaccatcaaagatagaaagatgggctgttgctaacttttctgcacgctgtgatgtacgaggacttgtacgggacctcattagaattggagatatgaaaggaattgtaagttctttaactgcatattttttggtgtgaaagagctattgactgacattatgttttctttgatttctgcagactatagaacaaccatttgacgtgtttgatgagaatccacagtttaggcgtgccccccctatggttagagtggagaaaatgttcgagcatatccaatctaaacttcctggggctcctcagttccttctctgtttgcttcctgatcggaaaaattgtgatatttatggttagtgttttttgtgtgattatatttttatgcccaagcaattttcaagagccctgaatagaaattgtctttttttcgttgaaggtccatggaaaaagaagaatcttgctgattttggaatcataaatcagtgtatgtgtcctttaagggtcaatgaccagtacctgactaatgttatgttgaagatcaatgccaaggttaatttaatattttggttatattgtacagtatctttgtacatgatcatataagcatttgcatgtaaaccatcttatcttaattttatagtaaaaatagatgaagttatggaaaccttcatgcccattcctcacttactaggataaggcgtggttgttatgattgatttttactgcatgtgcctgtaaaccatcttgtaaactgatgaaaaccttcatgcccttccctacttactattctaaggctttggttgttacaattaatttttattgcttagttgattcattatgaagggtgttttctttctgttgaattcttttattgttatgcagcttggtgggttgaattcattgttaggcgttgaacattctccttctcttcctgttgtttccaaagctcccaccctcattctgggaatggacgtgtcacatggctcacctgggcagactgacattccttcaattgctgcggtaaatgataatttgtcttgtgttttatatgaacagtgtttccaaatgcatatggaagcctaattttctggatgaaggtatattggtttttagttttggcctgcatgtctaatgtgtaaatatgcacatgcaggtggtcagctctagacactggcctctgatatcaaagtatagggcatgtgttcgtacgcaatctgcaaagatggaaatgattgataatttgttcaagctagtatctgaaaaggaagatgaaggcatcataaggttaaaatttgtcattttctggcagattcaagccactgtaaactaactccaaagaatcatttacaaaatatttacgagatcaaggacccacccaattgcatatttttttcagtttaaggacctaattaataattctagatagttcaggaatttgtttaatagtttagctgtttttgttttttccagttgcaataattgtatatgcattttctgttggtccatgtacaaggactgcctatactgatgggtttcatctattgcagggaacttttgcttgatttctatacaacttctgggaggagaaaaccggaaaatataatcatattcaggtatgtttttccttctttgagaatgcagcttctgtttatttttcttatttttgcattttgattgttacatctgtgtaaatgttcaacttttatgggtaaatcattatttcacctagtgagatgaggctttagttgttgtatataaaccatgtttgatgtttgatatatgttattattgtgaaattgttcaatgtgtcttgaagtatcttgctatttcaaataatatattatcttgtacattaaccttgtatttattttctatagattgacattcagatatatatttgatttaatgttaatgttattcatttgattcaactgaacattgttttttccgttttctatataatgtgtagggatggggttagtgagtcacaattcaatcaagttttgaatattgaactcgatcgaatcattgaggtactgatgctggtcaattgtgcttttttagtactaatcattagtcatagagaactaatctttaaaattttaggcttgcaaatttctcgatgaaaattgggagccaaaatttgtggtaattgttgctcagaagaaccaccacactagatttttccagcctggctctcccgacaatgtcccacctggcaagtgttctgggtctttacagtaagattttttaatttgaaagtatctgttcccttattatttttttttggcaggaactgttatcgacaataaaatttgtcatcccagaaattatgatttctacctatgtgcacatgctggaatgatagtgagtatcccagctatttaatatatatgtttctgtactgtttttctcgttttgaagttgcatgattgtggcttgtgtggctatctagttggcttttgtatcccttcttgacctttgtccgaagtatgcaagccttttcttatagaaatctatctttctttatctttttttaattccacttgtttgtaactgattttttattgctgatagtctgatagttaaagagaatatttactttgattctagttttttttttggtcagcatttactttgattctagtattccacttgtttgtaactgatttttttattgctgatagtctgatagataaagagaatctttactttgattctagttatttaaagaggtagtgtggaataaaggttggggattcttattttcattttattaaaatagagaaaactagttacagttgaagtatcttctatgaaatggtagttggttgcattactccattttttctgtaaactgaggaattcttccaacgtcaagtttcatttgcattgttattttgatctgagttgagtgcagtattatttctgctgcatcgggcttctaccatacatctttgtacatatttttagttgaactcaattttttttttgttgacgttgaataggatgtttgtaaacgttgttccccccgccccagaatgatctccctttgtacatttgattttgatataatcaactggtgtgtaaaggtccttttttgttttttctgccgtttcctctatgcattgcctggtcttgcaggcatttagggagttgtgaaaaaggtgccccttcacctgccctcaattactgtgttagtgttgtttataaagctgttgtacttgaactacttaatgccaattggttgttaagattacagacatggagggctatatttgattcctctttccacatgtatttataacctataaattaaattaaatgtaggtggacctagttgtgtgtggggaaaggtttttaaaattaaaaactttattaacatttgttttatattctccctctaattgtggtgcccagggaactagtaggcctacccattatcatgtgctgcttgatcaggttggtttctctccggatcagctgcaggagcttgtccattcattatcatatgtgtaagtggaaatttggacctatttgattgcattagactcattttacggtttcaggtaaagatcaatctaaacaatgtaaattgattgtgaatatgggcaggtatcagaggagcactactgccatttctgttggtaattaaattttgtacattatttattccaatagatggttattgttttgacctaattattattcatgattgaattttacctatatataatcttcctcgttgcagttgctccaatatgctatgcgcacttggctgctactcagttggggcagttcatgaaatttgaggacaaatctgaaacatcttcaagccatggtggattgagcggtgcaggtgctgttcccgtccctcagttgcctcccttgcaggagaatgtccgcaacacaatgttcttttgttgaggccttaatgctctgccctgtctcctcaagtggtgaaaatgctgtacataaaactatgtttctaatcttgcaagttatgcggacgaagtttatattgtggtagacttggtcttcttagccatatttagtctttctagcacaagccttttcaaatgttcggggaccttaccttactttttgtagcaagactctctttagcgcaacgtctttttgtagcaaggcttgatcttcagcacgtcttttgttaggcccccccttttttaaggtttaattgcactttttacctcgaatgctgtaatttatagtgaattttacttatctccaacaaattaccttggcgtattttattccaaatttttaagaaacttagattttattgtgttattttact

SEQ ID NO: 172 - DNA, 10133 bp, Glycine max
  source 1..10133: mol_type = genomic DNA
attaacgattcaaattgattttggtactgcatatcattaacgattcaaattgattttggtactgcatattatcaagaagaacaatataacgattgaaattgattttggtattgcatatcattattctatataagcaaaattagtattcaccataaaactaaatagagacaacatcttatcaagaagaagaatataacgatttagattgattttggtactgcatatcatttgctttaatgtctacattgactaaacaaataaaaacttcaaatttaggggtaaaaatgttgaatctcaagtacccgtgaatttgttttaatctattttctgcgcttgttctaagaaattgaaactttttggggtaaaaataacaaagaaaaacgataagctaacatgcatgtaagaaaggatgcatgataacagcaccgaaagagaagtcgaacctcgtccaatacaaaaaaacaaaaatctaacatgcatgtaagaaaccatacatgaaaacaacaccgaaaaagaaggcaaaccttgtttgtatctggaaaaatgaagaagagaaaaacatcaataataggaagtcaaaagttacacatttataaaagaaaatacaacagcaaagctacaattaaaaaacagaacaacaaaagtaccatgaacagagaaaaacgataagctaacatgcatgaaaacaacatcgaaagagaagccaaacctcgtccaacacgcatacatgaaaacaacaccgaaagagaagacaaaccttgtttgtatctggaaagatgaagaagaatagaaaagatggaagcgattaaccacgcaaagaagcaagaagcaaacaggagcaagtgcaaagtgtggtaaattagacacgtaaccacccaaagaagcaagaagcaaatgggagcaggtgcaaagtgtgataaattagacatgtaaccacccaaagaagcaagaagcaaataggagcaggtgcagagaaatcaaacacgtgtaagaaacatgggagtgggaaatgaaaagactaaaagataaaaaaattaaggaaatgaacatgtgtcccagccttaggtagggacattttagaattttccagagacttctcttttattagatagtatatagatatatcatattaaaaaaatatttattctatgggtgtatgttttcaataaaaatacattgttttcaaccagaactgtttcatattataattttttttttctcttcatttttttcctttaaaatcaaacatatgcaggcgtaggaaaagtcccgaaacccgaggcacgcacgcgtcagtgacatgcctgcacgcacttactcgccatgcgtgcgtttcatccttcgagctcgctcactgcatcaccgcacccaatcaatcccacccctccgtgcaatcaacaccaaacatgaatcaacggtccccaacgcatggaaccgaaccgcagagaataatcgctttgttgactcacaagagagagagagagacgatgacaaaagaggtgagtgaggatttcatttatagtttatagagagagagagcgttgacacctatccattttgaaaccttctaaactcactctctcactttctcactccctcactccctccgttgacgtttttgttttctttttctctgtgttctgaagaagttttagggtttcgttttgtttctctcttcggccacttcaggtcattttttccttttttgttttctgaatttttaaccgtttctttttgtttttttgtttgtgactctctctggtgttgtaatttgtagtgctgcattgctcttctggcttcggatttttttagccgtattatttttttcttttcaattttgctttgtgagaatggttgccttattttttatttttttctgaagttgaaatgtagtactgttttttttttcttagggttttggaagttgtttatgtgtttgcatgtgttggacatggatcttgcttttttgactgtttattttgaaggaaaagaggattttgccttggctacaaaccgtgtttcgtttcagaaatggagttttctgttgttgctggagttttgtatgtttttcttcactgttttgggtttgctcttttttcgttgttaaaagttgttatttatagcattttaggacttgtgttggttttcttttttataagttcttttagtaagtggaaaaccctaatttctgcaatgcatgtctttaacatttggttgggtttgctcttttttcgttgttaaagttgttatttatagcattttaggacttgtgttggttttcttttttataagttcttttagtaagtggaaaaccctaatttctgcaatgcatgtctttaacatttgggtgggtattttttgttgatgggttagatttatcttctggatgctgcttttactgaaggtggtttgaatgaatgcatgccttttcttttgttatctatgttagaggatggtacggcgttttagactgttatttgttacaaaggttagccatgttttaaaagtgttgtgtatatacatttaagtaacctttgctgcatttagtaatatttttgcaatttatttgttgaagcttagctcttgcttttattgttttttatttttatttttttggtatggaattagtaatatgtaatgatcgaacttaacattttgttgctgcctttttgttatgtattcatgttcaccaaaagtagtacattgatttttggaagacactcttcagtgacattatgattctcaagtgcttggttttgaattgtggttgtggtaaaacaatctttgattttgtggaaaatttagacaaatgctgcagatgtggctgcaagtgtggttgtttaggcttacaaaaccttgatatttctgtagcaattgcggatgtgggtcattaataccttgttcttagtattgaatgcttaccaaatttactttattatatttgagagttaaactggtttaattctctttgagaatgttatttatttatttttaaaaaaccaaacatggggaataagggattccaacttcagactcatgggagactaaaaagttttcttgtaccaaacgcctccttaaacttttgtcatcttcataattcttcgtttatggataatgtaatcccctgctttaccttatattcctaactttgtctatacaggctatggattcatttgagccagatggaaatgggaaggagtcactgccaccaccacctcctgttgttccctctgatattgtacctctcaaagcagaggaggtgctctgtacccctaccgagcataataagaaaaaggcttcccgacttccaatagccagatctggtctgggatcaaaaggaaataaaatacaattactaaccaatcacttcaaagttaatgttgctaaaaatgatgggcatttcttccattatagtgtatgtccttcgattagtttttggtttagtattaatatctgtgtttttgtttaagcttgtcacttaaagttgatgcttatgttatcacttcacttgatatgcaaacaggtggcttttacttatgaagatggacgccctgtagaaggtaagggtgtagggagaaagataatagatagggtgcaggagacatatcattctgacttaaatggtaaggactttgcatatgatggggagaaaagtctgtttactgttggctctcttcctcaaaacaagcttgagtttgaagttgttcttgaggatgtcacctctaacaggtagaagtaattagagagcatttagttgttgttttggctcttcaaattggttttcgtactattgtttcaatagcctttgatttattttttgttttctaggaataatggcaattgcagccctgatggtctaggggacaatgagagtgacagaaagaggatgcgacgtccttatcgttcgaagtcattcaaagtagagataagctttgctgcaaaaattccaatgcaggccattgccagtgccttacgcgggcaagagactgagaattttcaagaagccatcagagttcttgatatcattttgaggcagcatgctgctaagcagtaagtaaatagtgctttctttttcttagcgtgtggttaactgtttaatatttttttcttaacatgagtctatctgtacattgtttattgcagaggctgcttacttgtacgccaatcctttttccacaataatccaaataattttgctgatgtaggaggtggtgtcctaggctgtagaggattccactcaagctttagaactacacagagtggcctgtctcttaacataggttaaattcgttgcctgtgcaatcttctcaagtcaatatgttttgtctaattctagcaatctctaatttgtttagatgtgtcaactacaatgataatttctcctgggcctgtggtggatttcttaatttccaatcaaaatgtgagagatccttttcaacttgactgggctaaggtgaacaagttttctgaatactttttcatctcccatcattgatattgtaaggctcaaatttgattcccccctatccccttttaacattttaacaggccaaaaggaccctaaaaaatctgaggattaaaactagcccatccaatcaagaattcaaaatttctgggctcagtgaactcccatgcagagagcagacgtacttattttctttgttttcatattgttaatttcttacactgtatttgctgtattgtaatttttgagttgttctttaggtgatgtgttgaggtttttgatggtgtgtattctgcagttttactttgaaaggtaaaggtgggggggatggtgaagatggtaatgaggaaatcactgtatatgattattttgttaaggttcgtaagatagatctccgatactctgctgaccttccatgtatcaatgttggcaagcctaaacgaccaacatttttccccattgaggtaaattaagggttttttttgttctctaaactgcatttgtttgcatcaattcaggaggtacagattgatcttagcaacatattggttattaatgaattttctttcttttttcttggttcttttaggtttgtgaattggtatcattgcaacgatatacaaaagctctgtccacgcttcaaagggcttcattagtggagaagtcgaggcagaagccacaagagaggatgaaaattttgtctgatgtaaacgattttttgctacattttgagtagtataattttaattcatatgtctaggataagaaatcttactattaacttttactgaaggcactgagaacaagcaactatggtgctgaacctatgctccggaattgtggaatttctataagcactggcttcactgaagtggagggccgggtgttgcctgcaccaagggtatatatatatttatatatatatatagttatagttataccattatgtttatgaatcgttttattaattctattttgtatattaaaacaatgatcttttttgttgaggtttggaagtatcaatagtagttttcttttatggttagaaaatgattattgaatcttcttcaatagttgaagtttggcaatggtgaggatctcaatcctaggaatgggagatggaatgtcagcagagtggtatttaattcaattccctttcctgtgaagttttaatattttctccttaataacaatattggcttaggttctaactttttgcatgctgtgacgtacgaggactgttgctaactttcatgaatgcttcagaaatttgtggaaccatcaaagatagaaagatgggctgttgctaacttttctgcacgctgtgatgtacgaggacttgtacgggacctcattagaattggagatatgaaaggaattgtaagttctttaactgcatattttttggtgtgaaagagctattgactgacattatgttttctttgatttctgcagactatagaacaaccatttgacgtgtttgatgagaatccacagtttaggcgtgccccccctatggttagagtggagaaaatgttcgagcatatccaatctaaacttcctggggctcctcagttccttctctgtttgcttcctgatcggaaaaattgtgatatttatggttagtgttttttgtgtgattatatttttatgcccaagcaattttcaagagccctgaatagaaattgtctttttttcgttgaaggtccatggaaaaagaagaatcttgctgattttggaatcataaatcagtgtatgtgtcctttaagggtcaatgaccagtacctgactaatgttatgttgaagatcaatgccaaggttaatttaatattttggttatattgtacagtatctttgtacatgatcatataagcatttgcatgtaaaccatcttatcttaattttatagtaaaaatagatgaagttatggaaaccttcatgcccattcctcacttactaggataaggcgtggttgttatgattgatttttactgcatgtgcctgtaaaccatcttgtaaactgatgaaaaccttcatgcccttccctacttactattctaaggctttggttgttacaattaatttttattgcttagttgattcattatgaagggtgttttctttctgttgaattcttttattgttatgcagcttggtgggttgaattcattgttaggcgttgaacattctccttctcttcctgttgtttccaaagctcccaccctcattctgggaatggacgtgtcacatggctcacctgggcagactgacattccttcaattgctgcggtaaatgataatttgtcttgtgttttatatgaacagtgtttccaaatgcatatggaagcctaattttctggatgaaggtatattggtttttagttttggcctgcatgtctaatgtgtaaatatgcacatgcaggtggtcagctctagacactggcctctgatatcaaagtatagggcatgtgttcgtacgcaatctgcaaagatggaaatgattgataatttgttcaagctagtatctgaaaaggaagatgaaggcatcataaggttaaaatttgtcattttctggcagattcaagccactgtaaactaactccaaagaatcatttacaaaatatttacgagatcaaggacccacccaattgcatatttttttcagtttaaggacctaattaataattctagatagttcaggaatttgtttaatagtttagctgtttttgttttttccagttgcaataattgtatatgcattttctgttggtccatgtacaaggactgcctatactgatgggtttcatctattgcagggaacttttgcttgatttctatacaacttctgggaggagaaaaccggaaaatataatcatattcaggtatgtttttccttctttgagaatgcagcttctgtttatttttcttatttttgcattttgattgttacatctgtgtaaatgttcaacttttatgggtaaatcattatttcacctagtgagatgaggctttagttgttgtatataaaccatgtttgatgtttgatatatgttattattgtgaaattgttcaatgtgtcttgaagtatcttgctatttcaaataatatattatcttgtacattaaccttgtatttattttctatagattgacattcagatatatatttgatttaatgttaatgttattcatttgattcaactgaacattgttttttccgttttctatataatgtgtagggatggggttagtgagtcacaattcaatcaagttttgaatattgaactcgatcgaatcattgaggtactgatgctggtcaattgtgcttttttagtactaatcattagtcatagagaactaatctttaaaattttaggcttgcaaatttctcgatgaaaattgggagccaaaatttgtggtaattgttgctcagaagaaccaccacactagatttttccagcctggctctcccgacaatgtcccacctggcaagtgttctgggtctttacagtaagattttttaatttgaaagtatctgttcccttattatttttttttggcaggaactgttatcgacaataaaatttgtcatcccagaaattatgatttctacctatgtgcacatgctggaatgatagtgagtatcccagctatttaatatatatgtttctgtactgtttttctcgttttgaagttgcatgattgtggcttgtgtggctatctagttggcttttgtatcccttcttgacctttgtccgaagtatgcaagccttttcttatagaaatctatctttctttatctttttttaattccacttgtttgtaactgattttttattgctgatagtctgatagttaaagagaatatttactttgattctagttttttttttggtcagcatttactttgattctagtattccacttgtttgtaactgatttttttattgctgatagtctgatagataaagagaatctttactttgattctagttatttaaagaggtagtgtggaataaaggttggggattcttattttcattttattaaaatagagaaaactagttacagttgaagtatcttctatgaaatggtagttggttgcattactccattttttctgtaaactgaggaattcttccaacgtcaagtttcatttgcattgttattttgatctgagttgagtgcagtattatttctgctgcatcgggcttctaccatacatctttgtacatatttttagttgaactcaattttttttttgttgacgttgaataggatgtttgtaaacgttgttccccccgccccagaatgatctccctttgtacatttgattttgatataatcaactggtgtgtaaaggtccttttttgttttttctgccgtttcctctatgcattgcctggtcttgcaggcatttagggagttgtgaaaaaggtgccccttcacctgccctcaattactgtgttagtgttgtttataaagctgttgtacttgaactacttaatgccaattggttgttaagattacagacatggagggctatatttgattcctctttccacatgtatttataacctataaattaaattaaatgtaggtggacctagttgtgtgtggggaaaggtttttaaaattaaaaactttattaacatttgttttatattctccctctaattgtggtgcccagggaactagtaggcctacccattatcatgtgctgcttgatcaggttggtttctctccggatcagctgcaggagcttgtccattcattatcatatgtgtaagtggaaatttggacctatttgattgcattagactcattttacggtttcaggtaaagatcaatctaaacaatgtaaattgattgtgaatatgggcaggtatcagaggagcactactgccatttctgttggtaattaaattttgtacattatttattccaatagatggttattgttttgacctaattattattcatgattgaattttacctatatataatcttcctcgttgcagttgctccaatatgctatgcgcacttggctgctactcagttggggcagttcatgaaatttgaggacaaatctgaaacatcttcaagccatggtggattgagcggtgcaggtgctgttcccgtccctcagttgcctcccttgcaggagaatgtccgcaacacaatgttcttttgttgaggccttaatgctctgccctgtctcctcaagtggtgaaaatgctgtacataaaactatgtttctaatcttgcaagttatgcggacgaagtttatattgtggtagacttggtcttcttagccatatttagtctttctagcacaagccttttcaaatgttcggggaccttaccttactttttgtagcaagactctctttagcgcaacgtctttttgtagcaaggcttgatcttcagcacgtcttttgttaggcccccccttttttaaggtttaattgcactttttacctcgaatgctgtaatttatagtgaattttacttatctccaacaaattaccttggcgtattttattccaaatttttaagaaacttagattttattgtgttattttactcctaacgtaactgtattttttactcctattttttttttttattttcttggcaaattttatccaattttttttttcaaattt

SEQ ID NO: 173 - DNA, 9053 bp, Glycine max
  source 1..9053: mol_type = genomic DNA
agcaacactttagagaaaagaaagaagtctttttgacaactaatactaatcaacacgttaaaagaaagataaagatataaagatacacaaaaggagtaaaaagaaagagaaatattaataagatatgtgattagatataagaataaaaagtatcaatatcttttttttaatcattagaaaaaagaaattgattctgtaaaacgtgacaccttttgattggttggaaggagaatacgtaaaataaagcgttatggtcgaacacagtttgtttaagtgtgcataagttgacagaaacactatatatctgtctctcacactccaatcgcagcaacgtttcttcgtgtattcaattcatctctttgttttctcttctctctgctacaacgctgaaggtaacaatgttcttctcgttgtttctttattctctctaagtagacatgcatacatacgtacattttcttgttttgtagagtgagttcttgttttttttttatgtaccctctgtttggctctctctaagtacgttaaggtaacaaacaatgctgttgttctcttctctcaactatgctgaaggttaccacgttatgttgtttggtttctgtttttctttttcttttcttttttcgtttatgctgttattgttgtcaaggtgtgtgttcttggtgtttctggttttaaaattcttgtgttgtggatgtatgaatttccattattaacttttatgcgtgtgtttagccagtagctaatactttttagcttgcatttggcctctttttatgaccaaaagagggaaaaaaattaattattttgtgatttgtcattggtcactgcacggagagcaccatggcatgcttgtttttgtttttttttctgtggcagttgatactttattaggacaatgcaacttgtattttttatattttatgcgttcatatgtaaatttatgatgttaccttacccgataggaagaaggacttagaggaggaaaaaacaggcctgttaaggcccttatcactacaattctgttatttgttagaattttgttacaattctgttgttgctaataaatatatagctcaatcgtgcttatatatggctactcgaatgctagtgcctgtttcttgttattgcttctaacattaccttagtgaaatataccttcaagaaaaaaattaacagcactgttgtgactaacgttcttctttatgtccagtttaaaatatttttgtcgaaggtgcttatacatatttgttaggcattctttttgtcgaaggtgctttaacaactgagttttattgctcctagctgaatcaaaagtgtagtactctagtggtattattagtatgcagataaaaaaaatttcaagtagttgtacttatcttttattattacgaaactgcactcaactagagcctaaattaatttgcattccatcacgtatttctattttttgtttgaatagcaaaaaaattagtcttactttttagcaggatttgagaaatggaggtctcaaaacgtgtgcctatggcgaggaaagaggttgggtccaagggagagcccagacaactattagccaaccattttggagtttgcctagtcaagcccaaggatgatattgatggctacttctaccattatgatgtatgttttcttatctattttgtcacatctcttgtgtgcacgcacgcatgtgaagtatatccatattaatgattgttgatttaatattataaaagtataaataattacatattgtttggttaggttgccatgagttatgaagatgggaaccctgttgaggccaagggtgtagggagaaaggtcttaaatcaagtttgtgaaacatatgttgaactgagaaacatgagttttgcatatgatggtgaaaaaagtctattcactcttggtcctctagcaagtcagaggcttcaatatcctgttgtgttggaggatgtttcatcaaggaggtaaacaaacaagcaatatgctgtcatcacattagcactgtgattatgtgtatactagttttgttgtgttgtgttgtatttatcacaagagggcattaattgtttttcagggttggaaagaatggaaaccctgctgagagtcctaagggaggatatacaaaaagaatgagaattaggcatcagtttcggccaaaaactatcaacgtggatatcaaatatgcagccaaaattccattgcaagcaattgaagatgcattgcgtggtcgggattctgagaaatctcaggaagcagtgagggttctagacatcatactgagacagcattctgcaaaccagtatgtcaaaacataaatttagttaagttgttttcattattcgaagaaaaatgtcagtgacacactctaacatacttattgttagctcaaatgaaattcatttggataacaagaatgggagtctcaactcctcgtattaaacatgtgtcattcatggtttttaataaattttaaccaatagtaaattatgtgttgctagcactcctcttgcttgaaacttgaaatcctgtttaccttggatgctttttttccaggggatacctccttgttcgccaatccttctttcatgacaatcgaagaacctgtactgatataggaggtggtgtgcaagggtgccgcggttttcattcaagctttcgagtcacacaaggaggtttatctctcaacatgggtaagattctcaagtggaatgcttggaaatacatgttacttttgttatggttgattgtttaatttgttgttcttttgtaaagatgtgacaaccacaatgattgtaaagcctggccctgtggtggacttccttctccagaatcagagtgttcagaacccaaactacattgattggaccaaggtgatagttattgctattctatctagtaggagaggtttcatgtgcatgaactgtggttgttatatttatgattattttcatttaggcaaagagaatgctgaagaacctaagaatcagggctaatggtgttgagttcaaaatctctggattgagtgataacacttgcaggaatcagaagtaagtttttcttgtgcttactccatttacagtaaacgaattttattttgatacattgtgagattaaagttttttactctatttatacaaatctggcttatttgtttcttacagatttcttttaaggcaaaagggtacgaatggtgaagtgcaggaaagggaaatcacagttcatgactactttacacgccaaaaactgattggcctgaactattctgctgacatgccatgcatcaatgttggcaaaccaaaacgcccgtcttattttccaatagaggtgctattgagtttaattactgaaaaaatttatattgtcgacaaataagaaatcatctttggtatgatttttaaagtagttattataatggctaagaatcgtatcattcacagtcaattgtgattagataacagaataatatattatttgttcatactcgttttactattttggaagagtttacaatatgattttattcttgttttgcagctatgtgaaatggtctcgttgcagcgttacaccaaggctctaacaaatttgcaaagggctcagctagtggagaagacaaggcaaaagccccaagttaggagacaagctttggaagatgtatgtggaaaattttaaaactgaaggaacctagtaacacttttttttgttgtatgaaatggttgtttatatttttttgcaggccttaagaagcagcagatatgacgatgaacctatgcttcgctcttctgggattaccattgaacctaactttgttagactcgttggtcgtgtattggaacccccaaaggtatgtgtcatttgatcatgttctaataaaagatcgaataaattcataaattaaaattaccatataaacaagttaaaatcagctttttgagaagttgaataagagaacttctactagatttgaagtgagtaagttgagtttaacttatgaaagaagtttatttcagtttactttcttatttttttcttttcagcgggtttatcagatatgagccaacttcttatccttattttgaaaaatactagtaacacattctctaacacattctttttaacacacactaaaccattagttggactttattaaaaactgcaaaatcagttattaaatgagaagattgactcagtaattaatttctaataaattttagttaataatagtgtattaaacaaaaatatgtgaaaaagtgtgttactaatatttctgattctgtttttgctatgcatatatgaattgcttttttatgtcaatatatactattgcagcttatagttggaggagagaagagcatcattccccggaatgggcgctggaatttcaacaataaggtttatttttgctattgttttaatgatacggctgtgtttgtattagcatttagcatgttaaacgtcaaagcttcttttcagtaaaaattgcattcaacatgtattcaaacgcgagaaatacttaaaccaaacaaacacactaagttgaaccaagtttagagtggtttctctaacaatgagtatcatctttcagaaactatatgaacctttgatgattggtcgttgggccattgtaaacttctcaagtcggtgtgacacaagactcctgatagaactcattaggaggtgtgctgcagctaaagggatggtaagatttcccaagaattgtatatgtcgattttattaatcttatttacaactgaaccaaaaagtcaaattttactacaagggtttttctatcccatgcaactttgcacagattaagccaatctacctaatataagaagaatgatggaattgacttgtttattcaaaatcaattaactcaatctgcaaatgcaatcaaaaactcaaaatgtcaaattcaattcattgttgttctaaatgtatttttcttttgtagaccatgagcaatagtctctttgataaagtaattgaagaggatggttgcttcatacgtgaaccaccaaatgtcagggtagagagaatgtatgcaaagctgaggaccactctgccgcacgagaaacctcactttctgttgtgtattcttccagagaaaaagaattctgacatttatggtaggataaacaacttctatacatagtttaagttcttctaaactcttcagttaacacttctctattctaaaatcctaatatcaatatgtaggtccttggaagaagaaaagtcttgttgaagaagggattgtaacacaatgtattgcaccaacaaagattaatgatcaatacattactaatgtacttttgaaaattaatgcaaaggtatatatatgtcttcaaatattgagtttattttgaaatactataacttttgaagagaatataggttgttaaccgatatactgatggtataaaataattttatattattatctaatcacaaatcactatataaataagttcaccaaccatgctacctagttataataaaatctttttatttttataataatgtatgcacaatttctttgatgcagtatggtgggatgaattcgtatctgtcagttgagctttgtaattccattccatttgtttcagctgtaccaaccttgattcttggtatggacgtttctcatggatctcctggtcgatcagatgtgccctctattgctgcggtatgatcttgatcatgtttgcaccatcatgttactacaagtttgcatgtagtgagtgttattatataatatatattcaggttgtgagctcaagatgttggcctcaaatttcacgttatagagcttcagttcgcacacaatcatcaaaagttgagatgattcaatctctattcaagcctgtggctaatactaataaggatgaaggtatcatcaggtgagagcaagagcatattctctaatgatgttatgtgggtgtttattcattgaatgtgtttccttctgtctcttttgatcaaatactaatctattttgttgtttcaatttgcagggaggtgctgttggactttgaaattacttcattcaaaagaaagcctcaacaaattataattttcaggtatatttaaattgattttcaataatttggattttagtcaagaaatatcttttggtgggtagtacatttcttatattacaattatggtgtaaacttctggtctcaattatcagcgccacgtgttttattttagggatggagtgagtgaatcacagttcaaccaggtgctcaatattgagttaagtcaaatcattgaggtactcatacccactaattaatttatatttcgcatctgatagcactattccatgattgaaattgaagtcacctagtttaatcgaaattggattttcaggcatgcaaacaccttgatgaaaaatgggatccaaagttcactttgattattgcccagaagaatcatcatactaggttctttcaggccaatgctagagatcaaactaatgttccaccaggtttgtcaccttaacagcaaaaaaataaatcaaatttgtatttgtcgatttctcttaatcctctatttgctgtgtgcaggaaccgttattgacaacactgtctgtcatcccaaaaacaatgacttctacttgtgtgctcaagctgggatgattgtaagtaccattttcaatgttaaatttgtgtcttttttggcttaaatttgtttttatttctgatatatatttttaatttttgtatctgataaatgataaatttttctttcgaattggatccctaatatttgaatccctaatttttctttcggcattgactctcttctccctttctagctgtgccactttggacaacctctttccccctttggccatggcggaatccaccgtcgtgaccctcccggaactcctctccgtcaccgccgtgggcctggccccctccggcggcatcttggtgggcgtgaacctggagttccctggtttcccttgttgtcaccgctgacgtccaacatcgagatgtgcatctcgcacattggttggtggtgggtttcaatattttttgtgttttttattctgatttcaagattgattttttttttttttgttcttgattctgttgccactgtggtgggttcgcggtattggttgctggtgagttttttggtactttttggttcacggaaagatgaagaagacaaagtgacaaagtggggtttcacagatgggtgaagaaaagggggtggtggaagaaaggggttgcaggaggaggaagaagacacgacgtcatttttacttttttaacagagaacaaatcttcgtgtaatctcactcactcaacttgtacacttaattgatatcacgcgtcacaccaacgtgtttggttataaacagttaagggatttcaattaataacagagacctcaaacaaaatatttaaaatattaggacccgattcaaataaaaaaaattatcagtaaccaaatgtaaaagtcaaatatatatataaaaaagaaacatatttaagctatcattttttatggcatgatattgacctagcaataacgtcaatcttcaatcaagatatataggcaatataactgtcaatcttcaaccaagatatataggcaatataacttttaggcttaattgtattttttattcttttattattgtccactatcaagttcaatttagtcattctactatgttaactgtgcagttataagttcattcattaacttttgaatgtcaaaatttaaagggatcaaaatgcaattaaaccttacttctaataagccatcattaagttcttttatttatcctcgattaagttaaattaaataatattcctaagatgatactgaactcctaataatgcctgcaattttctactgtgacaaacctgattttgttccaacaggggacaactcgacctactcactaccatgttttacacgatgaaatcggattctcagctgatgaagtgcaagaattagtgcattcattgtcttatacgtaagtacatgtagtcacaaatctcatacttaaaaattcaaaaatctctcctacagacgattttgcaacctttctatacttaaaaattcttctaatcttttacaggtatcagaggagcacaactgctgtatcattaggtataatttccattttccctgtatatccaagttttctctaaactatgacttgtacatactatattatattattttaggatctccctcctctaaagtgaatcactcatcattgtaaagtaataaatttcagttattgaagagaaaatcaattatcaatattattgcctctaaatgcataacaactcatagatgtttgagaatatcgatcagttgttaaaattttctcaaatctcaacaacgatgactgagattacttgcttatttgcaccttaaagaagtcaaattgattgttaaaaggttgtagtcaaatgatttctgtttgcaagcatatatatgattctgatgaaggtgtactctcttatgtattattgcagtcgctcccatttgctatgcccacttggcagcagcccagatggcacaatttatgaagtttgatgaacattctgagacttcttcaacccatggtggactcacatctgctagcgcacctttagtacctcaattaccacgtcttcacaaacaagtcatcaactccatgttcttttgttaatattttacatcatcttccttccacaaaaatttaattataaatttgacttttctgctgtccctcccttttgaagctgttctcgtactactcattcaaaaagatagcattttaagagttatgttatatttaattgtaaaaatattaacataactctcaaaaacgtcatgtcgaaggaacagcttggacagggaccagagagaagccaatttttcatatgaatgcctgtcattaggaactatctaggattgtttaaaatcgaatcaaatcgagtgtaaaactgaaaattgatccaagaaatcaatggtgattgatttggtttaattctctaattttccaaaccgcggttgggttcggttctcttaat

SEQ ID NO: 174 - DNA, 9053 bp, Glycine max; identical to SEQ ID NO: 173
  source 1..9053: mol_type = genomic DNA

SEQ ID NO: 175 - DNA, 5600 bp, Glycine max
  source 1..5600: mol_type = genomic DNA
gataacagaataatatattatttgttcatactcgttttactattttggaagagtttacaatatgattttattcttgttttgcagctatgtgaaatggtctcgttgcagcgttacaccaaggctctaacaaatttgcaaagggctcagctagtggagaagacaaggcaaaagccccaagttaggagacaagctttggaagatgtatgtggaaaattttaaaactgaaggaacctagtaacacttttttttgttgtatgaaatggttgtttatatttttttgcaggccttaagaagcagcagatatgacgatgaacctatgcttcgctcttctgggattaccattgaacctaactttgttagactcgttggtcgtgtattggaacccccaaaggtatgtgtcatttgatcatgttctaataaaagatcgaataaattcataaattaaaattaccatataaacaagttaaaatcagctttttgagaagttgaataagagaacttctactagatttgaagtgagtaagttgagtttaacttatgaaagaagtttatttcagtttactttcttatttttttcttttcagcgggtttatcagatatgagccaacttcttatccttattttgaaaaatactagtaacacattctctaacacattctttttaacacacactaaaccattagttggactttattaaaaactgcaaaatcagttattaaatgagaagattgactcagtaattaatttctaataaattttagttaataatagtgtattaaacaaaaatatgtgaaaaagtgtgttactaatatttctgattctgtttttgctatgcatatatgaattgcttttttatgtcaatatatactattgcagcttatagttggaggagagaagagcatcattccccggaatgggcgctggaatttcaacaataaggtttatttttgctattgttttaatgatacggctgtgtttgtattagcatttagcatgttaaacgtcaaagcttcttttcagtaaaaattgcattcaacatgtattcaaacgcgagaaatacttaaaccaaacaaacacactaagttgaaccaagtttagagtggtttctctaacaatgagtatcatctttcagaaactatatgaacctttgatgattggtcgttgggccattgtaaacttctcaagtcggtgtgacacaagactcctgatagaactcattaggaggtgtgctgcagctaaagggatggtaagatttcccaagaattgtatatgtcgattttattaatcttatttacaactgaaccaaaaagtcaaattttactacaagggtttttctatcccatgcaactttgcacagattaagccaatctacctaatataagaagaatgatggaattgacttgtttattcaaaatcaattaactcaatctgcaaatgcaatcaaaaactcaaaatgtcaaattcaattcattgttgttctaaatgtatttttcttttgtagaccatgagcaatagtctctttgataaagtaattgaagaggatggttgcttcatacgtgaaccaccaaatgtcagggtagagagaatgtatgcaaagctgaggaccactctgccgcacgagaaacctcactttctgttgtgtattcttccagagaaaaagaattctgacatttatggtaggataaacaacttctatacatagtttaagttcttctaaactcttcagttaacacttctctattctaaaatcctaatatcaatatgtaggtccttggaagaagaaaagtcttgttgaagaagggattgtaacacaatgtattgcaccaacaaagattaatgatcaatacattactaatgtacttttgaaaattaatgcaaaggtatatatatgtcttcaaatattgagtttattttgaaatactataacttttgaagagaatataggttgttaaccgatatactgatggtataaaataattttatattattatctaatcacaaatcactatataaataagttcaccaaccatgctacctagttataataaaatctttttatttttataataatgtatgcacaatttctttgatgcagtatggtgggatgaattcgtatctgtcagttgagctttgtaattccattccatttgtttcagctgtaccaaccttgattcttggtatggacgtttctcatggatctcctggtcgatcagatgtgccctctattgctgcggtatgatcttgatcatgtttgcaccatcatgttactacaagtttgcatgtagtgagtgttattatataatatatattcaggttgtgagctcaagatgttggcctcaaatttcacgttatagagcttcagttcgcacacaatcatcaaaagttgagatgattcaatctctattcaagcctgtggctaatactaataaggatgaaggtatcatcaggtgagagcaagagcatattctctaatgatgttatgtgggtgtttattcattgaatgtgtttccttctgtctcttttgatcaaatactaatctattttgttgtttcaatttgcagggaggtgctgttggactttgaaattacttcattcaaaagaaagcctcaacaaattataattttcaggtatatttaaattgattttcaataatttggattttagtcaagaaatatcttttggtgggtagtacatttcttatattacaattatggtgtaaacttctggtctcaattatcagcgccacgtgttttattttagggatggagtgagtgaatcacagttcaaccaggtgctcaatattgagttaagtcaaatcattgaggtactcatacccactaattaatttatatttcgcatctgatagcactattccatgattgaaattgaagtcacctagtttaatcgaaattggattttcaggcatgcaaacaccttgatgaaaaatgggatccaaagttcactttgattattgcccagaagaatcatcatactaggttctttcaggccaatgctagagatcaaactaatgttccaccaggtttgtcaccttaacagcaaaaaaataaatcaaatttgtatttgtcgatttctcttaatcctctatttgctgtgtgcaggaaccgttattgacaacactgtctgtcatcccaaaaacaatgacttctacttgtgtgctcaagctgggatgattgtaagtaccattttcaatgttaaatttgtgtcttttttggcttaaatttgtttttatttctgatatatatttttaatttttgtatctgataaatgataaatttttctttcgaattggatccctaatatttgaatccctaatttttctttcggcattgactctcttctccctttctagctgtgccactttggacaacctctttccccctttggccatggcggaatccaccgtcgtgaccctcccggaactcctctccgtcaccgccgtgggcctggccccctccggcggcatcttggtgggcgtgaacctggagttccctggtttcccttgttgtcaccgctgacgtccaacatcgagatgtgcatctcgcacattggttggtggtgggtttcaatattttttgtgttttttattctgatttcaagattgattttttttttttttgttcttgattctgttgccactgtggtgggttcgcggtattggttgctggtgagttttttggtactttttggttcacggaaagatgaagaagacaaagtgacaaagtggggtttcacagatgggtgaagaaaagggggtggtggaagaaaggggttgcaggaggaggaagaagacacgacgtcatttttacttttttaacagagaacaaatcttcgtgtaatctcactcactcaacttgtacacttaattgatatcacgcgtcacaccaacgtgtttggttataaacagttaagggatttcaattaataacagagacctcaaacaaaatatttaaaatattaggacccgattcaaataaaaaaaattatcagtaaccaaatgtaaaagtcaaatatatatataaaaaagaaacatatttaagctatcattttttatggcatgatattgacctagcaataacgtcaatcttcaatcaagatatataggcaatataactgtcaatcttcaaccaagatatataggcaatataacttttaggcttaattgtattttttattcttttattattgtccactatcaagttcaatttagtcattctactatgttaactgtgcagttataagttcattcattaacttttgaatgtcaaaatttaaagggatcaaaatgcaattaaaccttacttctaataagccatcattaagttcttttatttatcctcgattaagttaaattaaataatattcctaagatgatactgaactcctaataatgcctgcaattttctactgtgacaaacctgattttgttccaacaggggacaactcgacctactcactaccatgttttacacgatgaaatcggattctcagctgatgaagtgcaagaattagtgcattcattgtcttatacgtaagtacatgtagtcacaaatctcatacttaaaaattcaaaaatctctcctacagacgattttgcaacctttctatacttaaaaattcttctaatcttttacaggtatcagaggagcacaactgctgtatcattaggtataatttccattttccctgtatatccaagttttctctaaactatgacttgtacatactatattatattattttaggatctccctcctctaaagtgaatcactcatcattgtaaagtaataaatttcagttattgaagagaaaatcaattatcaatattattgcctctaaatgcataacaactcatagatgtttgagaatatcgatcagttgttaaaattttctcaaatctcaacaacgatgactgagattacttgcttatttgcaccttaaagaagtcaaattgattgttaaaaggttgtagtcaaatgatttctgtttgcaagcatatatatgattctgatgaaggtgtactctcttatgtattattgcagtcgctcccatttgctatgcccacttggcagcagcccagatggcacaatttatgaagtttgatgaacattctgagacttcttcaacccatggtggactcacatctgctagcgcacctttagtacctcaattaccacgtcttcacaaacaagtcatcaactccatgttcttttgttaatattttacatcatcttccttccacaaaaatttaattataaatttgacttttctgctgtccctcccttttgaagctgttctcgtactactcattcaaaaagatagcattttaagagttatgttatatttaattgtaaaaatattaacataactctcaaaaacgtcatgtcgaaggaacagcttggacagggaccagagagaagccaatttttcatatgaatgcctgtcattaggaactatctaggattgtttaaaatcgaatcaaatcgagtgtaaaactgaaaattgatccaagaaatcaatggtgattgatttggtttaattctctaattttccaaaccgcggttgggttcggttctcttaat

SEQ ID NO: 176 - DNA, 11469 bp, Glycine max
  source 1..11469: mol_type = genomic DNA
ttaattattgtatatatatatactaggcttaaattgttgttttaatccctcaatttagggtggatactttttcaagtccatgaattttaataaattattttttagtctctaacataatatattaatattttatgtcatttttttagtattttgtgacattttaaatgaaatttaaaataaattagtattatgatttaatttgaaaatagtccattttcttgtcaatatggtttcaacaatttttaaaataattataaaaattgatctctggtattaaaactagttttaaataaaacataattagtgttttagactctgaatttagggtgtatatttttttagtcttaaaatttaaaactattttttttcctgaactttaacattgttatctatcacataataaaattatactttgcgatagtatttaactttcataaattattttataatttttttgtcattaaaattatattttaaacttgtcacaaaaatgttaaagaccaccacaaaatgttgatttattatctcatagaataaaaaaataatttatcaaaatttagaaatttataaaaatatttttaaatttcaggaattaaaataacacactcactacactgaagaactaaaacaataattaagtttatgtactaatatatattttattaattaaatataataaataaatacataaaaaaattatatatataaaatttataaattataaaattattacaagatacgagatactaattataaaatttataaaagctagttaattgtattttgtaaatcacataatcattgcaagaaaaaaaaagtaaaataaataattcaattaatattataaattcatgacaatcatccctctcaaatttctctttatttctttactaatttcacttctatctcctatcattttttgataacaaatatgagaaataaaaatataaaatttaattccaaaaaatataaaaagtgtgagcagtcaactttttattgtcactgagatacaaatttgttactgaaataattgagaacaaataaggaatttgttactgaaataattgaaaacattattgactaaattggataaaaatatcagtaagatatcatatttgaacgtatatataagtaatttttttgttggacaaaaatatcaatatttttttattaaagaaaaatatgagtgatttttttacctacatgtacattgaacagaaaatattaataaattattattattagaaaaaaatattaataattttttattaaacctatatatcataatgtttcttttgaactaatttgttcataaaaatttatttcatttaaaaataaaataattttatgataaatttttattatttttttatcattacaaatataacattataataataattaaaaaaatatattaacaaacataatttaaaacaaaacaatattattcacgcatactttattaattgtgatggagaaaaaaaattaactgccagcgttgcagttgttatactttcttatatttatttgtcagtgaattagaagcaaaagtgactattttttttaataccttttctggttgtcatcctctttccactaaatcccaccaaaaacccttcaaaatcccaaaacccttccaaagataagttgcttgggttcttccttctaccgcccaccgtcccaggattgaactcaactcaggaaactcggactcgtggaatgaacgatggaggttgcgattacgagaggttagggcattttgatttttcattgtctactctttctttgattctgttttttgattttttttttgttctttttcttttcccttgtacgttctgtgtttgattaagcattttggttcttcccctctgattctcggaaaagtaatgaactccaagcgtttttggataaaaaaaagtccattctgtgtcttgttacgtccaaaacgccgtttccttgtgtcagtgacaaacgatttttggccactccgcgatgtcgctgggtaacggtaacgccgcggtccgacaccgagatgttgcaaacgatattgtcgttaccgaccaatatttaaaatcttttcaaaacctgaaccagttttctttttttattattatttggtggtttaggttttcatagattattaggtgtttttgctgattcattgtctatgttccttaggtgtttttagtgctattctccgatcagaattgcagtttcacgtcgggaacctaagcctacttttagtgtaaacatttattatgaggaatatcgaggtgaaactccatttttgattggtgcttaaggaactgcatctaagttttttttcctgaaaggattttagtgcgtagatttgattaaaactaattagtacttatagctatatgttctgtacatgtattatctttatctttaaatagtatctcattttgtatgcaatgtctgcagtttgacatttgctttttaatatgcttatgtttttagctagctcgagccttttttggtggaactagtgttttggtaatcttcatgttccttattaagtttaataattcataataaacactttgtctttatttctgcatagactgctatatcttggtatcatataaaaaatggtcttatataatattcactgcaaatgatgtgttgcccttttacacatttggttcatgttgatatggattatgatatccttctttggatttttttaacgcaaatttatatagcaagcactgcaaatgatgtgttaccattacttatcaatcaatatttaaggttaaaaataaaaacacagactgtgctaatcatataggagtggccaaaacaaatttgagcaatcttttttgtttcttttctttaattacagacccatggtgcttcgtggaaacattcttcttttctaccccagcttgatgtgataatggatatatgacactatcctttagagaaaaactgcatctaactaagctactattcacaggacagataatggtgtgaatttggattgattttcaccatgggttgctttacataactttcatgcggtatttgtttcatacgggtcaaactagcatttctttttttgatcagcaaaagtaagattgtaatatatatagtaataatatcagtacaaggggtactgttgtatatacgacctagcaccatattatgcagaactatggtgtcctaatacgagctatacagcaagaattaagtagccatagatctgactgtaagcttggcgcccaactacacaatatctatattctatatgctaatcccccctgattacaaaacccatccctgatttgacttacctttaggtgaaaagttgtaagcatttttctgataattggtacaactggaacacttcgttgtagaatctttggaaatcctaacttataatatctgtgcttcgaattttaaatatggcctgttctttttgtgattgatgttttacagtgtcatttgtagctaagggaggaatgacggaggaagttcctgggattgtagaagctgctgaacctccaacatcatcacaatcacctgctgatgtgccacataatttggaaacagaacaaatgactcctacaaagtattctattatcagtaggaatggggttgggaccacaggaaaacacatacctttacttgtgaatctctttgaagttgctgttaatgttccagacacagtattttttcagtatagtgtatgttgaccatttctgtctctgcaatttcccttatatgttatcttggactttagcttattgaaggatttccaggttgctattactttcgaagataaacaagctgttgaaagcaagggcattgggagaaaagtgattgataggctttaccaaacatactcttctgaacttggtggcaaaaggtttgtatatgatggagggaaaactttgtacacagtgggtcctctgccactaaataagtacgagttcaaagtgttgctggagaaatcatttacaaaacggtatttcttgtgtatgactgtcttatttatgtcatgttttatttttcccttaaagcttattgttccaactctagcagtagtgccaagagtcctggtgctaatggaagccttcatgaggaaactaaaaggtcaaaacattcatttcagtcaaagacattcatggtggagataagttttgctaccaaaataccacttcagtccattgttatttccttgaaagaggttgagtcggataccaattctcaagatgctttgagagtgcttgatactatactgaggcagcgtgcagctaactggtatctacacatcttctaaagatatcttgattattttcttgaatggaatttaaattttaatcataacctctttggtctaaattagttgaaccattttcttttgaatgtgaagtgggtgtctcttggtaaggcaatctttttttcatgatgactcaagaaatttcaatgatgttggggctggtgtaacagcagtctcaggttttcattccagttttcgttccacacagcgaggattgtctctcaatattggtagaagtgctttcacacatatcttggaatcttattttcataaaattgtattcttttcctgcttacactattcatttttttctagacgtgtcaacaactattatcataaaacctggacctgtaattgattttctgttatcaaatcagcaagtgaaggaaccccgttatattgactgggaaaaggtgacaaacttgtacatatggttaatgaatccgctttaataattgcccgtgatgttttttaatttttggtaatctgtaggcgaaaaaaatgcttaaaaatttaagggtgcaagcaactcatcataaccaggaatttaaaatttctgggttgagtgagaaaccatgcattcagcaactgtaagtgcttgttttctaaaagtcaagtgtctattatatttactagaaataaataagggggaaacaaaatcttaggggtctcttgacccaaaaaactattgagtctgatttcttcctcagttttagtatgaaggttaaaaatgatgacaacaatagcagagggcagacagtggatattactgtttatgaatattttgccaaacactgtggcatagagttgacctcatctgcttatcttccatgtcttgatgttgggaaaccaaaacgtcccgtctatcttcccttggaggtttgttgatattttgatcttagctaaaaaccttgtggttcatattttgtatcaattttattattttgcttcaacagtttagcactttggaccagttatgtctgattactattttcttgccttttctttacttttggtggagtagctatgttcacttgtttccctccaacggtatacaaaggttttatctctgatgcaaagagcatctttagttgaaaaatcacgccaaaagcctcaagatagaatcaaaattttaaaaagtgtaagtttataattgttatgttgttcaattttataattaatatgttaaacttgttaaaatatataggctgtaggaaaatgctatgatgatgatcctgttcttgctgcatgtggcatttctattgagaaacaactgaatctgattgaaggtcgtgttcttgaaacaccaaaggtatgcattgattgattaggtacctgcatgtggcatttctattgtttcacatttttgtgtgcacagaatatataattgaggagagataaaagagaaaatggtgtaaaggaggtggtatcatgataggtacctgttagtagttagtcaagtgtctgttagtgagagagctagttagttaggaaagttgattgaataaattagacatgttgccgttaaataagaggggttgagagggagtggtatggtgaaaaagaattgggactttgggagagacctggatctctttaatatctagggaattctttgaagaggatgcactcaatcaataaagaaatgctattttcttctgggggaaaattttcaagaaaatggcttcaagattgattccaagatttgatggaagtgaggcctattagtggcctgatcaatgcagagcagtatcttggggaaaacagtatacctgaagagttgaaattatcatgggtcggtgcattttgcattgagaggagaaactcttaaatggtgtgtttcttgggagaacaactagaatgcaacttggtggacttttcagaaggcagtgttcaagaaattccaatgtgtgtttgtcttgaagattcagaaactggggggcaagaaaacagatgcagggatgaagttcaagaagatagcctaagaccaatgacgtggagggcagaagttgatgatgcaagcagcagcaaaacataacataagatgacaattttgagagaacagaacaagtggatcatgggcaagaaacgggtgcaggaaagctacaaaaattgggagaaacccaacaaaagaaatccaacaacattttggataaagaatcagaaaacaaaagcaaaaatgaagttcttgagatcaagaatcaaagtggcagagatgacactgggatcggtctatttgtcagttgcatagaggagcctagaattgggggaagccctatgtttgacatgagggaagagccaatgactgaaccaatgacaacaatggaggttttggatttgggtagtgcaatgaacccaccacaggagctcaataaggtagagcatcttgatgatcgtcagctgctaccatgtgcagcggtgcagttaacaagggagccatgggatctccatataattacagagcctctgattctctgtctcacagcaaatataccatagaaggaagcacactaaaggagcacaggggcattcacatgtttgtgtttaacctgggaggagtggaagctattcttggaatgctgggtgcaattggcttggtcatcatgccttaataagttgcacataaatggaacgtcatttcagcagtcagaggtcattcacctcaccttcaggataaggtgtatggttagggagagtcattagtagttggttaagtgacttagttagatagttaggttagttggttgaagaaataaggcatgttgcctttaagagggagtgatatctagtcatttggtgaaatataattgggacttgagagaggcctggatctctcaaatttccagggaattctttgtagagatacagtcaatcaataaataaattctattttcttccatttctgatccggtttctatcatttccttcaattatctgagaattaaatgcacacattgatacaattctatttgagacacacagttgaaggttggtaagaatgatgattgcatcccccataacggaaggtggaattttaataagaaggtattgcattatttttcacattcagaaagtgttcaggacttactttttttaagagttatctaaaatttggttaactagtttagtaattgacgatgctatatttcttatttatagacacttctacaagcatcacatattgattattgggctgttgtcaacttttctgcaagttgtgatactagttacatatcaagggagctgatcagatgtggaatgagcaagggcattgtatgtcaccaggctttgtattctaatgtttgatgctatatttaatctgctttctttcttctttttatttgattaatccatttcaaatgtactttaaatatctacgcagaacattgaacggccatatactttgatagaggaggaaccacagttgagaaaatctcaccctgttgcaagggttgaaagaatgtttgacctgcttgcatcaaaactgaatagagagccaaagttgattctttgtgtcttgccagagaggaaaatttgtgatatatatggtatatctttaggcaaatgtttctatggtttcttttatatcaaatattttttattcaccttatgatcattcatcaactttagggccttggaaaaagaagtgtctgagtgaaattggtgttgtcacacagtgcattgcccctgtcaagatcactaatcaataccttactaatgttcttcttaaaatcaattctaaggtaactgagtataactgatatttttacaaacataactatttttgacttgataacatcacgtatagtttaaataatctattatgcctgcaatatatagcttggaggaataaattctctgttggcaatagagcattctgggcatcttcccctgattaaagataccccaacgatgattttggggatggatgtctctcacaattcacttggtcgattagatagtccatcaatagcagctgtaagactagtttggttttgtatttcttgtacctctatatttttggatttttggttatctctgcagcatatcgttctgttgtataatgttggattgtaggttgttggatctcgacattggccactgatttcaaggtatagagcgtctgtgagaatgcaggcatccaaggtggagatgattgatgctctatacaagccattggaaaatgggagtgatgatggtattatcaggttagagtaaaatgtatattgaacttctgttttgtatttatttaggaaaaaatgcaaaaaataccctgaatttcatctcattttgatgtagcctaatgggatccctgtaaacaaaaattatattgtatagaagggccagtggaggaacaagcgtagttattggactatccaacaaaacccgcatattagaggatatattccagtagaacaatgacccagagggtagagatgctactgagctggctgaagtttattagtaatagcatagtgaagcaggggggttaaggggaatttagcttatggtgtgagaaaaagggaagcagtttttatttttatttttcccccattctgacactagattaatgcatcatatcaattcctttaacagagttctatccaatagcctgtctgtgtatccaatgctatatgcattgttcctaaatcatttgttaaaatatattatgtgacaattatttatgttgtttatgcttcatgactatgtacaagatgtgtaatatgaggacattattatttctgtttatcatgacttgcacatgtgcacactgaattcttcttaattattaagatttggatttttttcttgcagagaattgcttttagatttctatgattctagtaatggacgcaagccaactcaatttattgtattcaggtgtcattctatccctgttttatttgatagatatccagtcatgcatgtttttaagtgaacttgtttgttggtcaaatgttgtaaactggaaaatgctgatgttacttattataaaaaatcattaatgtatgatgtgctgcttatacttatgttgtttaccactattttttttaaagtttgagaaaatttgcatttttgtgttaattatgatatggatatttttccataatttttctaaaaatcatcttttggtccctcatttatggaaatgtgacatatgtagtccttatttccataaacaaggggtgaaaacgagatatgattttttgtaaagaacaaggaccacatctgacatttccaaaaattagagaccaaaaggaggcaatttatttttgagggactaaatccacaacattgtcctctttatagatactaaaaacatatttaaccccgtgaataaatacaattgtatccattaaatacaaattaatcaactcactgaaatcaacaacaaattatctaatacagtaggtgtctaattttaggaaactaatgatattcaacaaattatgtctaaaattattatgaattgtatatctaaaattagtatgaattgaaccagtatttggtgagtggttattaaattcaaaatttattaaatatcacttttggttgtctcaatttcctttatcacttgttaaatatctgaagtatgttttcatgttcagggatggagttagtgaatcacaattcgaacaagttttaactatcgagcttaaccagataatcaaggttatagtgctactctgtcattgactagtttgataatctgattgattgctataatccttatagttacacatttttctgtgtgtatacttgaattactcattgtgctatttaaaaaaattgggaaaaagttaaatgataaacctttgatgatcctttcctaattttagaatgatgataaactattctaattacaggcctatcaacatcttggtgaggttaatgttccccagttcactgtgattgtggcacaaaaaaagcatcatattaagctgtttctgcctaatggcccagaaaatgttcctcctggtatgacacttatcttgttcacttgcatacagtatcacccaggatcgttgtaatataaattttcctcttcagggacggttgtggatacaacaattacgcatccaagaaattatgatttttacatgtgtgctcatgcagggatgcttgtaagtttacctatctagcttccacagccgatttcttcatttatatccattttactagcattttagttgcatgtggtaatagtgaagtgtatttgtctaccaattaaatttctgatgtttcaactttctcacgggccttcttttttctgtttcctcatcaaataatagggaacatccaggcctgtacattatcatgtgctacttgatgagattggtttctcggcagatggcttgcaaaatttgatccattcgttgtcctatgtgtatgcattcttcctttttgtttatacaaagtttcactacccctggcttatgcatgtatatacgtatttcaggaaccaaaggagcacaattgcaacctcagttggtaatttaatctactcctctgatatataactgtcagaattgtcgttttcacgaaaaaaatgtttaatttaataatttatgttttataataacttcccctcattttttccttcagtggcacccatatgctatgctcaccatgctgcagctcagatgggacaacttttgaattttgatgattcatcagaaacaggttcaagtcctgcttcagagggaggcatccccatcccagagcttccaaggttgcacaggaatgtcaggagttccatgttcttctgttgaggtgtgtagatgacaggtgctagtaaatacatttagattgatcaaaagtgtaaatgtacatttggtataacctgcaaacatatgaagcccaaattttgtttgatggggagatggattcgtgggctagggtacagtctacatattagtgatatgaattgtcattttgagacatcaatcacggtaattgagtcgcatgggcttactagcttttttgcatatattgcagctatgaaatatttctacccttccttttttttagagaaatgtgattttatgtcaaatgctctgatttagtgtgtttggttggatatttggggagcttttaagtcatttgattagctattaattttgacaattttgtttggcacactaaggttttagaggagc

SEQ ID NO: 177 - DNA, 10984 bp, Glycine max
  source 1..10984: mol_type = genomic DNA
tgcgatagtatttaactttcataaattattttataatttttttgtcattaaaattatattttaaacttgtcacaaaaatgttaaagaccaccacaaaatgttgatttattatctcatagaataaaaaaataatttatcaaaatttagaaatttataaaaatatttttaaatttcaggaattaaaataacacactcactacactgaagaactaaaacaataattaagtttatgtactaatatatattttattaattaaatataataaataaatacataaaaaaattatatatataaaatttataaattataaaattattacaagatacgagatactaattataaaatttataaaagctagttaattgtattttgtaaatcacataatcattgcaagaaaaaaaaagtaaaataaataattcaattaatattataaattcatgacaatcatccctctcaaatttctctttatttctttactaatttcacttctatctcctatcattttttgataacaaatatgagaaataaaaatataaaatttaattccaaaaaatataaaaagtgtgagcagtcaactttttattgtcactgagatacaaatttgttactgaaataattgagaacaaataaggaatttgttactgaaataattgaaaacattattgactaaattggataaaaatatcagtaagatatcatatttgaacgtatatataagtaatttttttgttggacaaaaatatcaatatttttttattaaagaaaaatatgagtgatttttttacctacatgtacattgaacagaaaatattaataaattattattattagaaaaaaatattaataattttttattaaacctatatatcataatgtttcttttgaactaatttgttcataaaaatttatttcatttaaaaataaaataattttatgataaatttttattatttttttatcattacaaatataacattataataataattaaaaaaatatattaacaaacataatttaaaacaaaacaatattattcacgcatactttattaattgtgatggagaaaaaaaattaactgccagcgttgcagttgttatactttcttatatttatttgtcagtgaattagaagcaaaagtgactattttttttaataccttttctggttgtcatcctctttccactaaatcccaccaaaaacccttcaaaatcccaaaacccttccaaagataagttgcttgggttcttccttctaccgcccaccgtcccaggattgaactcaactcaggaaactcggactcgtggaatgaacgatggaggttgcgattacgagaggttagggcattttgatttttcattgtctactctttctttgattctgttttttgattttttttttgttctttttcttttcccttgtacgttctgtgtttgattaagcattttggttcttcccctctgattctcggaaaagtaatgaactccaagcgtttttggataaaaaaaagtccattctgtgtcttgttacgtccaaaacgccgtttccttgtgtcagtgacaaacgatttttggccactccgcgatgtcgctgggtaacggtaacgccgcggtccgacaccgagatgttgcaaacgatattgtcgttaccgaccaatatttaaaatcttttcaaaacctgaaccagttttctttttttattattatttggtggtttaggttttcatagattattaggtgtttttgctgattcattgtctatgttccttaggtgtttttagtgctattctccgatcagaattgcagtttcacgtcgggaacctaagcctacttttagtgtaaacatttattatgaggaatatcgaggtgaaactccatttttgattggtgcttaaggaactgcatctaagttttttttcctgaaaggattttagtgcgtagatttgattaaaactaattagtacttatagctatatgttctgtacatgtattatctttatctttaaatagtatctcattttgtatgcaatgtctgcagtttgacatttgctttttaatatgcttatgtttttagctagctcgagccttttttggtggaactagtgttttggtaatcttcatgttccttattaagtttaataattcataataaacactttgtctttatttctgcatagactgctatatcttggtatcatataaaaaatggtcttatataatattcactgcaaatgatgtgttgcccttttacacatttggttcatgttgatatggattatgatatccttctttggatttttttaacgcaaatttatatagcaagcactgcaaatgatgtgttaccattacttatcaatcaatatttaaggttaaaaataaaaacacagactgtgctaatcatataggagtggccaaaacaaatttgagcaatcttttttgtttcttttctttaattacagacccatggtgcttcgtggaaacattcttcttttctaccccagcttgatgtgataatggatatatgacactatcctttagagaaaaactgcatctaactaagctactattcacaggacagataatggtgtgaatttggattgattttcaccatgggttgctttacataactttcatgcggtatttgtttcatacgggtcaaactagcatttctttttttgatcagcaaaagtaagattgtaatatatatagtaataatatcagtacaaggggtactgttgtatatacgacctagcaccatattatgcagaactatggtgtcctaatacgagctatacagcaagaattaagtagccatagatctgactgtaagcttggcgcccaactacacaatatctatattctatatgctaatcccccctgattacaaaacccatccctgatttgacttacctttaggtgaaaagttgtaagcatttttctgataattggtacaactggaacacttcgttgtagaatctttggaaatcctaacttataatatctgtgcttcgaattttaaatatggcctgttctttttgtgattgatgttttacagtgtcatttgtagctaagggaggaatgacggaggaagttcctgggattgtagaagctgctgaacctccaacatcatcacaatcacctgctgatgtgccacataatttggaaacagaacaaatgactcctacaaagtattctattatcagtaggaatggggttgggaccacaggaaaacacatacctttacttgtgaatctctttgaagttgctgttaatgttccagacacagtattttttcagtatagtgtatgttgaccatttctgtctctgcaatttcccttatatgttatcttggactttagcttattgaaggatttccaggttgctattactttcgaagataaacaagctgttgaaagcaagggcattgggagaaaagtgattgataggctttaccaaacatactcttctgaacttggtggcaaaaggtttgtatatgatggagggaaaactttgtacacagtgggtcctctgccactaaataagtacgagttcaaagtgttgctggagaaatcatttacaaaacggtatttcttgtgtatgactgtcttatttatgtcatgttttatttttcccttaaagcttattgttccaactctagcagtagtgccaagagtcctggtgctaatggaagccttcatgaggaaactaaaaggtcaaaacattcatttcagtcaaagacattcatggtggagataagttttgctaccaaaataccacttcagtccattgttatttccttgaaagaggttgagtcggataccaattctcaagatgctttgagagtgcttgatactatactgaggcagcgtgcagctaactggtatctacacatcttctaaagatatcttgattattttcttgaatggaatttaaattttaatcataacctctttggtctaaattagttgaaccattttcttttgaatgtgaagtgggtgtctcttggtaaggcaatctttttttcatgatgactcaagaaatttcaatgatgttggggctggtgtaacagcagtctcaggttttcattccagttttcgttccacacagcgaggattgtctctcaatattggtagaagtgctttcacacatatcttggaatcttattttcataaaattgtattcttttcctgcttacactattcatttttttctagacgtgtcaacaactattatcataaaacctggacctgtaattgattttctgttatcaaatcagcaagtgaaggaaccccgttatattgactgggaaaaggtgacaaacttgtacatatggttaatgaatccgctttaataattgcccgtgatgttttttaatttttggtaatctgtaggcgaaaaaaatgcttaaaaatttaagggtgcaagcaactcatcataaccaggaatttaaaatttctgggttgagtgagaaaccatgcattcagcaactgtaagtgcttgttttctaaaagtcaagtgtctattatatttactagaaataaataagggggaaacaaaatcttaggggtctcttgacccaaaaaactattgagtctgatttcttcctcagttttagtatgaaggttaaaaatgatgacaacaatagcagagggcagacagtggatattactgtttatgaatattttgccaaacactgtggcatagagttgacctcatctgcttatcttccatgtcttgatgttgggaaaccaaaacgtcccgtctatcttcccttggaggtttgttgatattttgatcttagctaaaaaccttgtggttcatattttgtatcaattttattattttgcttcaacagtttagcactttggaccagttatgtctgattactattttcttgccttttctttacttttggtggagtagctatgttcacttgtttccctccaacggtatacaaaggttttatctctgatgcaaagagcatctttagttgaaaaatcacgccaaaagcctcaagatagaatcaaaattttaaaaagtgtaagtttataattgttatgttgttcaattttataattaatatgttaaacttgttaaaatatataggctgtaggaaaatgctatgatgatgatcctgttcttgctgcatgtggcatttctattgagaaacaactgaatctgattgaaggtcgtgttcttgaaacaccaaaggtatgcattgattgattaggtacctgcatgtggcatttctattgtttcacatttttgtgtgcacagaatatataattgaggagagataaaagagaaaatggtgtaaaggaggtggtatcatgataggtacctgttagtagttagtcaagtgtctgttagtgagagagctagttagttaggaaagttgattgaataaattagacatgttgccgttaaataagaggggttgagagggagtggtatggtgaaaaagaattgggactttgggagagacctggatctctttaatatctagggaattctttgaagaggatgcactcaatcaataaagaaatgctattttcttctgggggaaaattttcaagaaaatggcttcaagattgattccaagatttgatggaagtgaggcctattagtggcctgatcaatgcagagcagtatcttggggaaaacagtatacctgaagagttgaaattatcatgggtcggtgcattttgcattgagaggagaaactcttaaatggtgtgtttcttgggagaacaactagaatgcaacttggtggacttttcagaaggcagtgttcaagaaattccaatgtgtgtttgtcttgaagattcagaaactggggggcaagaaaacagatgcagggatgaagttcaagaagatagcctaagaccaatgacgtggagggcagaagttgatgatgcaagcagcagcaaaacataacataagatgacaattttgagagaacagaacaagtggatcatgggcaagaaacgggtgcaggaaagctacaaaaattgggagaaacccaacaaaagaaatccaacaacattttggataaagaatcagaaaacaaaagcaaaaatgaagttcttgagatcaagaatcaaagtggcagagatgacactgggatcggtctatttgtcagttgcatagaggagcctagaattgggggaagccctatgtttgacatgagggaagagccaatgactgaaccaatgacaacaatggaggttttggatttgggtagtgcaatgaacccaccacaggagctcaataaggtagagcatcttgatgatcgtcagctgctaccatgtgcagcggtgcagttaacaagggagccatgggatctccatataattacagagcctctgattctctgtctcacagcaaatataccatagaaggaagcacactaaaggagcacaggggcattcacatgtttgtgtttaacctgggaggagtggaagctattcttggaatgctgggtgcaattggcttggtcatcatgccttaataagttgcacataaatggaacgtcatttcagcagtcagaggtcattcacctcaccttcaggataaggtgtatggttagggagagtcattagtagttggttaagtgacttagttagatagttaggttagttggttgaagaaataaggcatgttgcctttaagagggagtgatatctagtcatttggtgaaatataattgggacttgagagaggcctggatctctcaaatttccagggaattctttgtagagatacagtcaatcaataaataaattctattttcttccatttctgatccggtttctatcatttccttcaattatctgagaattaaatgcacacattgatacaattctatttgagacacacagttgaaggttggtaagaatgatgattgcatcccccataacggaaggtggaattttaataagaaggtattgcattatttttcacattcagaaagtgttcaggacttactttttttaagagttatctaaaatttggttaactagtttagtaattgacgatgctatatttcttatttatagacacttctacaagcatcacatattgattattgggctgttgtcaacttttctgcaagttgtgatactagttacatatcaagggagctgatcagatgtggaatgagcaagggcattgtatgtcaccaggctttgtattctaatgtttgatgctatatttaatctgctttctttcttctttttatttgattaatccatttcaaatgtactttaaatatctacgcagaacattgaacggccatatactttgatagaggaggaaccacagttgagaaaatctcaccctgttgcaagggttgaaagaatgtttgacctgcttgcatcaaaactgaatagagagccaaagttgattctttgtgtcttgccagagaggaaaatttgtgatatatatggtatatctttaggcaaatgtttctatggtttcttttatatcaaatattttttattcaccttatgatcattcatcaactttagggccttggaaaaagaagtgtctgagtgaaattggtgttgtcacacagtgcattgcccctgtcaagatcactaatcaataccttactaatgttcttcttaaaatcaattctaaggtaactgagtataactgatatttttacaaacataactatttttgacttgataacatcacgtatagtttaaataatctattatgcctgcaatatatagcttggaggaataaattctctgttggcaatagagcattctgggcatcttcccctgattaaagataccccaacgatgattttggggatggatgtctctcacaattcacttggtcgattagatagtccatcaatagcagctgtaagactagtttggttttgtatttcttgtacctctatatttttggatttttggttatctctgcagcatatcgttctgttgtataatgttggattgtaggttgttggatctcgacattggccactgatttcaaggtatagagcgtctgtgagaatgcaggcatccaaggtggagatgattgatgctctatacaagccattggaaaatgggagtgatgatggtattatcaggttagagtaaaatgtatattgaacttctgttttgtatttatttaggaaaaaatgcaaaaaataccctgaatttcatctcattttgatgtagcctaatgggatccctgtaaacaaaaattatattgtatagaagggccagtggaggaacaagcgtagttattggactatccaacaaaacccgcatattagaggatatattccagtagaacaatgacccagagggtagagatgctactgagctggctgaagtttattagtaatagcatagtgaagcaggggggttaaggggaatttagcttatggtgtgagaaaaagggaagcagtttttatttttatttttcccccattctgacactagattaatgcatcatatcaattcctttaacagagttctatccaatagcctgtctgtgtatccaatgctatatgcattgttcctaaatcatttgttaaaatatattatgtgacaattatttatgttgtttatgcttcatgactatgtacaagatgtgtaatatgaggacattattatttctgtttatcatgacttgcacatgtgcacactgaattcttcttaattattaagatttggatttttttcttgcagagaattgcttttagatttctatgattctagtaatggacgcaagccaactcaatttattgtattcaggtgtcattctatccctgttttatttgatagatatccagtcatgcatgtttttaagtgaacttgtttgttggtcaaatgttgtaaactggaaaatgctgatgttacttattataaaaaatcattaatgtatgatgtgctgcttatacttatgttgtttaccactattttttttaaagtttgagaaaatttgcatttttgtgttaattatgatatggatatttttccataatttttctaaaaatcatcttttggtccctcatttatggaaatgtgacatatgtagtccttatttccataaacaaggggtgaaaacgagatatgattttttgtaaagaacaaggaccacatctgacatttccaaaaattagagaccaaaaggaggcaatttatttttgagggactaaatccacaacattgtcctctttatagatactaaaaacatatttaaccccgtgaataaatacaattgtatccattaaatacaaattaatcaactcactgaaatcaacaacaaattatctaatacagtaggtgtctaattttaggaaactaatgatattcaacaaattatgtctaaaattattatgaattgtatatctaaaattagtatgaattgaaccagtatttggtgagtggttattaaattcaaaatttattaaatatcacttttggttgtctcaatttcctttatcacttgttaaatatctgaagtatgttttcatgttcagggatggagttagtgaatcacaattcgaacaagttttaactatcgagcttaaccagataatcaaggttatagtgctactctgtcattgactagtttgataatctgattgattgctataatccttatagttacacatttttctgtgtgtatacttgaattactcattgtgctatttaaaaaaattgggaaaaagttaaatgataaacctttgatgatcctttcctaattttagaatgatgataaactattctaattacaggcctatcaacatcttggtgaggttaatgttccccagttcactgtgattgtggcacaaaaaaagcatcatattaagctgtttctgcctaatggcccagaaaatgttcctcctggtatgacacttatcttgttcacttgcatacagtatcacccaggatcgttgtaatataaattttcctcttcagggacggttgtggatacaacaattacgcatccaagaaattatgatttttacatgtgtgctcatgcagggatgcttgtaagtttacctatctagcttccacagccgatttcttcatttatatccattttactagcattttagttgcatgtggtaatagtgaagtgtatttgtctaccaattaaatttctgatgtttcaactttctcacgggccttcttttttctgtttcctcatcaaataatagggaacatccaggcctgtacattatcatgtgctacttgatgagattggtttctcggcagatggcttgcaaaatttgatccattcgttgtcctatgtgtatgcattcttcctttttgtttatacaaagtttcactacccctggcttatgcatgtatatacgtatttcaggaaccaaaggagcacaattgcaacctcagttggtaatttaatctactcctctgatatataactgtcagaattgtcgttttcacgaaaaaaatgtttaatttaataatttatgttttataataacttcccctcattttttccttcagtggcacccatatgctatgctcaccatgctgcagctcagatgggacaacttttgaattttgatgattcatcagaaacaggttcaagtcctgcttcagagggaggcatccccatcccagagcttccaaggttgcacaggaatgtcaggagttccatgttcttctgttgaggtgtgtagatgacaggtgctagtaaatacatttagattgatcaaaagtgtaaatgtacatttggtataacctgcaaacatatgaagcccaaattttgtttgatggggagatggattcgtgggctagggtacagtctacatattagtgatatgaattgtcattttgagacatcaatcacggtaattgagtcgcatgggcttactagcttttttgcatatattgcagctatgaaatatttctacccttccttttttttagagaaatgtgattttatgtcaaatgctctgatttagtgtgtttggttggatatttgg

SEQ ID NO: 178 - DNA, 10095 bp, Glycine max
  source 1..10095: mol_type = genomic DNA
aatttgttcataaaaatttatttcatttaaaaataaaataattttatgataaatttttattatttttttatcattacaaatataacattataataataattaaaaaaatatattaacaaacataatttaaaacaaaacaatattattcacgcatactttattaattgtgatggagaaaaaaaattaactgccagcgttgcagttgttatactttcttatatttatttgtcagtgaattagaagcaaaagtgactattttttttaataccttttctggttgtcatcctctttccactaaatcccaccaaaaacccttcaaaatcccaaaacccttccaaagataagttgcttgggttcttccttctaccgcccaccgtcccaggattgaactcaactcaggaaactcggactcgtggaatgaacgatggaggttgcgattacgagaggttagggcattttgatttttcattgtctactctttctttgattctgttttttgattttttttttgttctttttcttttcccttgtacgttctgtgtttgattaagcattttggttcttcccctctgattctcggaaaagtaatgaactccaagcgtttttggataaaaaaaagtccattctgtgtcttgttacgtccaaaacgccgtttccttgtgtcagtgacaaacgatttttggccactccgcgatgtcgctgggtaacggtaacgccgcggtccgacaccgagatgttgcaaacgatattgtcgttaccgaccaatatttaaaatcttttcaaaacctgaaccagttttctttttttattattatttggtggtttaggttttcatagattattaggtgtttttgctgattcattgtctatgttccttaggtgtttttagtgctattctccgatcagaattgcagtttcacgtcgggaacctaagcctacttttagtgtaaacatttattatgaggaatatcgaggtgaaactccatttttgattggtgcttaaggaactgcatctaagttttttttcctgaaaggattttagtgcgtagatttgattaaaactaattagtacttatagctatatgttctgtacatgtattatctttatctttaaatagtatctcattttgtatgcaatgtctgcagtttgacatttgctttttaatatgcttatgtttttagctagctcgagccttttttggtggaactagtgttttggtaatcttcatgttccttattaagtttaataattcataataaacactttgtctttatttctgcatagactgctatatcttggtatcatataaaaaatggtcttatataatattcactgcaaatgatgtgttgcccttttacacatttggttcatgttgatatggattatgatatccttctttggatttttttaacgcaaatttatatagcaagcactgcaaatgatgtgttaccattacttatcaatcaatatttaaggttaaaaataaaaacacagactgtgctaatcatataggagtggccaaaacaaatttgagcaatcttttttgtttcttttctttaattacagacccatggtgcttcgtggaaacattcttcttttctaccccagcttgatgtgataatggatatatgacactatcctttagagaaaaactgcatctaactaagctactattcacaggacagataatggtgtgaatttggattgattttcaccatgggttgctttacataactttcatgcggtatttgtttcatacgggtcaaactagcatttctttttttgatcagcaaaagtaagattgtaatatatatagtaataatatcagtacaaggggtactgttgtatatacgacctagcaccatattatgcagaactatggtgtcctaatacgagctatacagcaagaattaagtagccatagatctgactgtaagcttggcgcccaactacacaatatctatattctatatgctaatcccccctgattacaaaacccatccctgatttgacttacctttaggtgaaaagttgtaagcatttttctgataattggtacaactggaacacttcgttgtagaatctttggaaatcctaacttataatatctgtgcttcgaattttaaatatggcctgttctttttgtgattgatgttttacagtgtcatttgtagctaagggaggaatgacggaggaagttcctgggattgtagaagctgctgaacctccaacatcatcacaatcacctgctgatgtgccacataatttggaaacagaacaaatgactcctacaaagtattctattatcagtaggaatggggttgggaccacaggaaaacacatacctttacttgtgaatctctttgaagttgctgttaatgttccagacacagtattttttcagtatagtgtatgttgaccatttctgtctctgcaatttcccttatatgttatcttggactttagcttattgaaggatttccaggttgctattactttcgaagataaacaagctgttgaaagcaagggcattgggagaaaagtgattgataggctttaccaaacatactcttctgaacttggtggcaaaaggtttgtatatgatggagggaaaactttgtacacagtgggtcctctgccactaaataagtacgagttcaaagtgttgctggagaaatcatttacaaaacggtatttcttgtgtatgactgtcttatttatgtcatgttttatttttcccttaaagcttattgttccaactctagcagtagtgccaagagtcctggtgctaatggaagccttcatgaggaaactaaaaggtcaaaacattcatttcagtcaaagacattcatggtggagataagttttgctaccaaaataccacttcagtccattgttatttccttgaaagaggttgagtcggataccaattctcaagatgctttgagagtgcttgatactatactgaggcagcgtgcagctaactggtatctacacatcttctaaagatatcttgattattttcttgaatggaatttaaattttaatcataacctctttggtctaaattagttgaaccattttcttttgaatgtgaagtgggtgtctcttggtaaggcaatctttttttcatgatgactcaagaaatttcaatgatgttggggctggtgtaacagcagtctcaggttttcattccagttttcgttccacacagcgaggattgtctctcaatattggtagaagtgctttcacacatatcttggaatcttattttcataaaattgtattcttttcctgcttacactattcatttttttctagacgtgtcaacaactattatcataaaacctggacctgtaattgattttctgttatcaaatcagcaagtgaaggaaccccgttatattgactgggaaaaggtgacaaacttgtacatatggttaatgaatccgctttaataattgcccgtgatgttttttaatttttggtaatctgtaggcgaaaaaaatgcttaaaaatttaagggtgcaagcaactcatcataaccaggaatttaaaatttctgggttgagtgagaaaccatgcattcagcaactgtaagtgcttgttttctaaaagtcaagtgtctattatatttactagaaataaataagggggaaacaaaatcttaggggtctcttgacccaaaaaactattgagtctgatttcttcctcagttttagtatgaaggttaaaaatgatgacaacaatagcagagggcagacagtggatattactgtttatgaatattttgccaaacactgtggcatagagttgacctcatctgcttatcttccatgtcttgatgttgggaaaccaaaacgtcccgtctatcttcccttggaggtttgttgatattttgatcttagctaaaaaccttgtggttcatattttgtatcaattttattattttgcttcaacagtttagcactttggaccagttatgtctgattactattttcttgccttttctttacttttggtggagtagctatgttcacttgtttccctccaacggtatacaaaggttttatctctgatgcaaagagcatctttagttgaaaaatcacgccaaaagcctcaagatagaatcaaaattttaaaaagtgtaagtttataattgttatgttgttcaattttataattaatatgttaaacttgttaaaatatataggctgtaggaaaatgctatgatgatgatcctgttcttgctgcatgtggcatttctattgagaaacaactgaatctgattgaaggtcgtgttcttgaaacaccaaaggtatgcattgattgattaggtacctgcatgtggcatttctattgtttcacatttttgtgtgcacagaatatataattgaggagagataaaagagaaaatggtgtaaaggaggtggtatcatgataggtacctgttagtagttagtcaagtgtctgttagtgagagagctagttagttaggaaagttgattgaataaattagacatgttgccgttaaataagaggggttgagagggagtggtatggtgaaaaagaattgggactttgggagagacctggatctctttaatatctagggaattctttgaagaggatgcactcaatcaataaagaaatgctattttcttctgggggaaaattttcaagaaaatggcttcaagattgattccaagatttgatggaagtgaggcctattagtggcctgatcaatgcagagcagtatcttggggaaaacagtatacctgaagagttgaaattatcatgggtcggtgcattttgcattgagaggagaaactcttaaatggtgtgtttcttgggagaacaactagaatgcaacttggtggacttttcagaaggcagtgttcaagaaattccaatgtgtgtttgtcttgaagattcagaaactggggggcaagaaaacagatgcagggatgaagttcaagaagatagcctaagaccaatgacgtggagggcagaagttgatgatgcaagcagcagcaaaacataacataagatgacaattttgagagaacagaacaagtggatcatgggcaagaaacgggtgcaggaaagctacaaaaattgggagaaacccaacaaaagaaatccaacaacattttggataaagaatcagaaaacaaaagcaaaaatgaagttcttgagatcaagaatcaaagtggcagagatgacactgggatcggtctatttgtcagttgcatagaggagcctagaattgggggaagccctatgtttgacatgagggaagagccaatgactgaaccaatgacaacaatggaggttttggatttgggtagtgcaatgaacccaccacaggagctcaataaggtagagcatcttgatgatcgtcagctgctaccatgtgcagcggtgcagttaacaagggagccatgggatctccatataattacagagcctctgattctctgtctcacagcaaatataccatagaaggaagcacactaaaggagcacaggggcattcacatgtttgtgtttaacctgggaggagtggaagctattcttggaatgctgggtgcaattggcttggtcatcatgccttaataagttgcacataaatggaacgtcatttcagcagtcagaggtcattcacctcaccttcaggataaggtgtatggttagggagagtcattagtagttggttaagtgacttagttagatagttaggttagttggttgaagaaataaggcatgttgcctttaagagggagtgatatctagtcatttggtgaaatataattgggacttgagagaggcctggatctctcaaatttccagggaattctttgtagagatacagtcaatcaataaataaattctattttcttccatttctgatccggtttctatcatttccttcaattatctgagaattaaatgcacacattgatacaattctatttgagacacacagttgaaggttggtaagaatgatgattgcatcccccataacggaaggtggaattttaataagaaggtattgcattatttttcacattcagaaagtgttcaggacttactttttttaagagttatctaaaatttggttaactagtttagtaattgacgatgctatatttcttatttatagacacttctacaagcatcacatattgattattgggctgttgtcaacttttctgcaagttgtgatactagttacatatcaagggagctgatcagatgtggaatgagcaagggcattgtatgtcaccaggctttgtattctaatgtttgatgctatatttaatctgctttctttcttctttttatttgattaatccatttcaaatgtactttaaatatctacgcagaacattgaacggccatatactttgatagaggaggaaccacagttgagaaaatctcaccctgttgcaagggttgaaagaatgtttgacctgcttgcatcaaaactgaatagagagccaaagttgattctttgtgtcttgccagagaggaaaatttgtgatatatatggtatatctttaggcaaatgtttctatggtttcttttatatcaaatattttttattcaccttatgatcattcatcaactttagggccttggaaaaagaagtgtctgagtgaaattggtgttgtcacacagtgcattgcccctgtcaagatcactaatcaataccttactaatgttcttcttaaaatcaattctaaggtaactgagtataactgatatttttacaaacataactatttttgacttgataacatcacgtatagtttaaataatctattatgcctgcaatatatagcttggaggaataaattctctgttggcaatagagcattctgggcatcttcccctgattaaagataccccaacgatgattttggggatggatgtctctcacaattcacttggtcgattagatagtccatcaatagcagctgtaagactagtttggttttgtatttcttgtacctctatatttttggatttttggttatctctgcagcatatcgttctgttgtataatgttggattgtaggttgttggatctcgacattggccactgatttcaaggtatagagcgtctgtgagaatgcaggcatccaaggtggagatgattgatgctctatacaagccattggaaaatgggagtgatgatggtattatcaggttagagtaaaatgtatattgaacttctgttttgtatttatttaggaaaaaatgcaaaaaataccctgaatttcatctcattttgatgtagcctaatgggatccctgtaaacaaaaattatattgtatagaagggccagtggaggaacaagcgtagttattggactatccaacaaaacccgcatattagaggatatattccagtagaacaatgacccagagggtagagatgctactgagctggctgaagtttattagtaatagcatagtgaagcaggggggttaaggggaatttagcttatggtgtgagaaaaagggaagcagtttttatttttatttttcccccattctgacactagattaatgcatcatatcaattcctttaacagagttctatccaatagcctgtctgtgtatccaatgctatatgcattgttcctaaatcatttgttaaaatatattatgtgacaattatttatgttgtttatgcttcatgactatgtacaagatgtgtaatatgaggacattattatttctgtttatcatgacttgcacatgtgcacactgaattcttcttaattattaagatttggatttttttcttgcagagaattgcttttagatttctatgattctagtaatggacgcaagccaactcaatttattgtattcaggtgtcattctatccctgttttatttgatagatatccagtcatgcatgtttttaagtgaacttgtttgttggtcaaatgttgtaaactggaaaatgctgatgttacttattataaaaaatcattaatgtatgatgtgctgcttatacttatgttgtttaccactattttttttaaagtttgagaaaatttgcatttttgtgttaattatgatatggatatttttccataatttttctaaaaatcatcttttggtccctcatttatggaaatgtgacatatgtagtccttatttccataaacaaggggtgaaaacgagatatgattttttgtaaagaacaaggaccacatctgacatttccaaaaattagagaccaaaaggaggcaatttatttttgagggactaaatccacaacattgtcctctttatagatactaaaaacatatttaaccccgtgaataaatacaattgtatccattaaatacaaattaatcaactcactgaaatcaacaacaaattatctaatacagtaggtgtctaattttaggaaactaatgatattcaacaaattatgtctaaaattattatgaattgtatatctaaaattagtatgaattgaaccagtatttggtgagtggttattaaattcaaaatttattaaatatcacttttggttgtctcaatttcctttatcacttgttaaatatctgaagtatgttttcatgttcagggatggagttagtgaatcacaattcgaacaagttttaactatcgagcttaaccagataatcaaggttatagtgctactctgtcattgactagtttgataatctgattgattgctataatccttatagttacacatttttctgtgtgtatacttgaattactcattgtgctatttaaaaaaattgggaaaaagttaaatgataaacctttgatgatcctttcctaattttagaatgatgataaactattctaattacaggcctatcaacatcttggtgaggttaatgttccccagttcactgtgattgtggcacaaaaaaagcatcatattaagctgtttctgcctaatggcccagaaaatgttcctcctggtatgacacttatcttgttcacttgcatacagtatcacccaggatcgttgtaatataaattttcctcttcagggacggttgtggatacaacaattacgcatccaagaaattatgatttttacatgtgtgctcatgcagggatgcttgtaagtttacctatctagcttccacagccgatttcttcatttatatccattttactagcattttagttgcatgtggtaatagtgaagtgtatttgtctaccaattaaatttctgatgtttcaactttctcacgggccttcttttttctgtttcctcatcaaataatagggaacatccaggcctgtacattatcatgtgctacttgatgagattggtttctcggcagatggcttgcaaaatttgatccattcgttgtcctatgtgtatgcattcttcctttttgtttatacaaagtttcactacccctggcttatgcatgtatatacgtatttcaggaaccaaaggagcacaattgcaacctcagttggtaatttaatctactcctctgatatataactgtcagaattgtcgttttcacgaaaaaaatgtttaatttaataatttatgttttataataacttcccctcattttttccttcagtggcacccatatgctatgctcaccatgctgcagctcagatgggacaacttttgaattttgatgattcatcagaaacaggttcaagtcctgcttcagagggaggcatccccatcccagagcttccaaggttgcacaggaatgtcaggagttccatgttcttctgttgaggtgtgtagatgacaggtgctagtaaatacatttagattgatcaaaagtgtaaatgtacatttggtataacctgcaaacatatgaagcccaaattttgtttgatggggagatggattcgtgggctagggtacagtctacatattagtgatatgaattgtcattttgagacatcaatcacggtaattgagtcgcatgggcttactagcttttttgcatatattgcagctatgaaatatttctacccttccttttttttagagaaatgtgattttatgtcaaatgctctgatttagtgtgtttggttggatatttgg

SEQ ID NO: 179 - DNA, 10095 bp, Glycine max; identical to SEQ ID NO: 178
  source 1..10095: mol_type = genomic DNA

SEQ ID NO: 180 - DNA, 13981 bp, Glycine max
  source 1..13981: mol_type = genomic DNA
tagttctttaatttaatttttttagattctaatttttatttcttctattttctttttacaactttctagcctttcattaatgttgtacatcaatggttcaatttcgagttgtgcaatttttttaaacatctgaattagtaaaaattgattaatttgagtttcattttttttcttttaatttgatccaaattgactcgttaatatctctaaatgtcagtttgactagttaaaattatggtactcaacaggatatgaaaaacaattaatattctacaaagacacaagttataaaaactttttttttatcttggacattatttttaatataatttatattaaatttaatgtgttcatcgaaataaaagtgagagaaaaatttaaataaaaatctagtatttttttttaaaataattatgtaagttaattattattttttcagttgttaaataaataaaagtgaggataaatatgtatttttaatattttgtgtatgaaacaaaattatcccatgatttttttaataataaaaattagagatttatcctaacctatttaatttgtgttttctcctgatgatttttttacatgtgaaacaaatttttttatcctgtaatcatcttcttaatatttttgtttattaagttcaaattttctttctctttttattacactttcttacctagtaatctgataaaagtacatgcatactagtgtttcattttttatttattttctttcttcccaacctcacgttaccaaaacaaataaaagagtgaaatttcattgtagaaacacactagatagtatttttttgtttacccaagacaaatattttatttctttattgatctgtgtttctttttatccatttactcattcattggtatggacataaaagaaatataaattttaaaaaaatcaaataagtatatataattttttaccttgcttaaatttgtttctctctgttttgttttttattcatccacgcagacgtagaggtaattaagctataaaattaaatatataatataattatatatatttaattgtaataatactatgattgaaatatataatatattttataaaataacactagctttatgatatttatggtttaaaattcgataaaaaataaaatacatatttaattttattaaagttattgttgttaaaaataaaataaatatttaaaattattaacatattaaaatacattcatgataaatatattaaaaaataagattaatttgaaatatgaatttgataatatcatataataactaatttaataaaaacttgagaataaattaaaatattttttaaaatttagaaaataaaattaaactcaacaaataaaaaaagatttaatctgacaatgaaacatcagcagttgtatgtgactctttatttttacataaatttgtttctctgttctttatattcaatttttaatccccaaaagaaggaaaggagcgtacgcgtgtagactgtagagtcacaactgttactaaaaaagttgacccttccctctcactggaaactaatgttcccgcgcgtgtggccattttgaaaaaaatctgcttttcattcgctcagacacttttttgtccccatctcttttcattcgctcagcgatacgctaccatggctaaacgcaaaacatccgacgcctccgatgcacaagacgacactgtatcgctgcttccttcccaacgcaataaggccaagcatcctaactctaactccaacgcctgcttcgccggaaagcccattccgcccgccgaggccctcgccaaatggccccaccgatatccctccgaggtcttctttttttcttctcaaccttcctacgttcaaaatcttttttttttttatattgttctctccatttttgctcattttgtttttcttgtatataaataatcaggggaaaaagaagggttcagctagaacctcaaaagagtgagtctttttattttctttcatattttatatttgtctatttcatttcttgttatagctacaactttaacactgacatgtatgacatgtatgtgactgtgtagggctacgagtgaaaacagtgaagttatgccggcacggtgtcattatcgtcaagctaaagtggatggggttgtttataacctctatgacgatgcttatgtcaaggtattggatcttgctttggaattttacactttggtaaaaacagaacatgttgaaaaaaaaaattaacattcttgttgaactattttaggccgaagatggaaaaccagattatattgcacgaatcgttgagatgtttgaaactgttgataaggaacaatgttttacggctcagtggttctacagggctgaggacactgtgagtctcactttttcaatgacttgtctttttaataatttttcattatcttttaactgttttatggcttattttgctttggagttttgaatgagtgcaggtgataaaaaatcacggtgaccttgttgacaagaagcgaatttttatatctgatgtgaaagatgtaaatccccttgactgtattgtttccaaagtcaaaatttacaaaaaaagtccaagtgtaagtgcttcatagtcactttgttttgtgcaaatgcttgatagtttatcattttatttaaggattatttaagcttttggaatccttttatatatatctatcttttatcagccaatgctagttgttagtttcttgttagaatgttagtggaagattcgaacccgcgaggtttccctcctttctcctttcaacccttagacccccctctcaaccaccaagccatgcttgtaaccctcttggaatccttttatataagttttagatcttgcttataaatttcttggataatctagtcaagataaactctcttgagctcattacaccaatgctatggttttgtactcatgcaggtggcttcttttaactcatcttctgttgaaggatagtcactttttattaaagaatttattttcctcttgcctttcaaaagaattaaataaaataagaattatgctgtttacgtcctgtaactttattatgtggttaatagtgtttgaaatttgtatactacaggtagatttgacttcaaagaagggaaaactcccttcttgtgattactattatgacatgaagtacactgtgccgtatctaaccttttccaacatcgtcaacggtaagaatgatgtggtttttatagatgactaatgaatggtctatcttgtttttgcacgacactttgctgaattttgtcattttatgtgtttttctctcacaatccagaaacagttaaaacagagagtgatgcatcttccacaatttctagtgaatctggatccaatggttgcgttagtaatgctaatctagctaatggaaagactactcaaaataatagttctggttcctcggagtggactttgctagacttgtattctggttgtggagccatgtccacagggctttgttttggtgcatccttggctggaataaaacttgtcactgtatgtagagctgttcttttgagcattttagtttttagctgttattttgaacaatttataatgattttttttttttattatttcaaagaggtgggctgtggacattaatgcacatgcatgcgaaagtttgaagctgaaccaccctgagactcaagtaaggttttgttaacatgtaattgatattgacacttgttattgtatcttctactgatattgcttccccaaaataacaatcaggttagaaatgaaccagctgaagacttcttaaacctaataaaatcctgggccaagctttgtgaagagtttgcattattaggatcagaacggttagattctgatccagacatggatgaagatgagaatgaagctgtgagaaaagaagagtcaggaaatcaatctgattcagaggaatttgaagtagaaaagttacttgctgtgtgctatggtgatccaaacgacgtcaaaaaaccaggactatattttaaagcatgtttccttcaagcttcataatacattaattggtttgcatatttagtttaatgttgttaatgttattaggattgacttatttacgttatagttctttgcgtgccctatgttttaataggagtctaatttttgggggaaaaatgcatgtatgagtgagtatcaatttaggttatgacacaacacgcacgtaccatcatccaatgcaatcatcttaatatttatggctttggttttttcatatcttgaatttggtgatttaaattattaatttcatcaaggcaggcaaagaggattattaatgtagatagcagttcttaaaatggtgcaacatttgctgcatatatatatgactataatttaatgtatttgatgtgataagatatgtacataattacatggatatgacgaaatgtttaaagaaaataaaatatagtttggtgttaatgttaaaaacgctcaatagcttgtagtcttgtactcatttttgaagtcataattaacgaaatacaatttgcaataactattttgatactttaaactatgaagtgcttgaactttgatactttaattggcttccttatcttttgtgctgaggtaccaagaacacctttagtagtaaactcaaaacaaatgtttgtcaaagaaggtaactttaggttttgtcagcatgtcccaacttaattggatttgatcttattcgatttccaagtgttaatttagcctctcatttttttcttcctgtgcaatgaaattccagttattgatccattctgatttttgccattaaatcactcaggttcgttggctgggttatgcttccagctatgacacgtgggagccaatagaaggattgaggtaaaccccttgtcatcaaaattattattctctccagctttgctttgtgaaatttttgtttgttatgcactttaggccaagtgcaaaattctgactcttattattttgtgccagtgattgcaaggaagctatgaaagattttgtgacaaaaggctacaagaaaagattattgcctcttcctgtgagtctctccattctaggataaacttaaagtcctggtttacacgctagtactggttacacttggagcggtttgtcaattgattttgtaacacttagcccttgtgtagggtgatgctaactttatttgcggtggacccccatgccaaggagtaagcggtttcaaccgcttcaggaatgcagcagctccattagaggacacaaagaataagcagttgcttgtttacatggatattattgattttttgaagccaaaatatgtcctcatggagaatgttgttgatattttgaggttttccggtggttatctggggcgttatgccatatgccgtcttgtagctatgaattatcaagcaagaatgggcatgatggcagcagggtcttatggccttccacaatttcgtatgcgtgttttcctttggggagctcgtcctactgaggtaagcttatttatgcatgtagattctattcttttggcggtgttgaatatttgttttattctatgtatggttacttagctagcttacttttcagaggagacaacaaggttaggttaggtcagtatgtgtaagttgtctctctcttctctttgtaccctttatatatgccattcaaaagcaattaatgagatgagagagagtgagaaaatttcctcacttattcaaatcttcaacttggcatcagagctgagttctccgacatcgttcgctaccgctaacgttcgttgcctccatcgccggccgccaccgtcttcggctactttttcttccggcgaacccagggttgggtgtgccttgaagagcgcgactttctcctggaagtcgcgccgccaccgtctcgcgctaattctggcgtgtgaagtccacgtgccattgtccagtcatcgggagcttactggacttgtcctggcagcctcgccgtcctctcctgagcaagtttcaggccttgtctttcgtttttggcgagtccttgtgttagcccttgtgtttttctcttctttttcgttagggttttcgttttttgatcagaaatagcctcctttggacttgttttctctttctctggaacaccaaccatcacaattgcaaagctcaactggaagaattatttattttggtctgtttcagtggagctttggtttctaggccaagggtaccatgaccacttagagaaaggtgttgatgttgtcctaaatgataaacgacctgaatgagaaaagcttgactatcaattgtgtaatgtgttatggcaatcagttgagccagatattttggatccttagatcgtttaaaacatgtcgctctttttggaagaagacccaagagatctttgccaatgatattcaaagcttgtttgatgcaaccatgaaggtttcagcccttaaacaaactagccatgacatgattgcacatgtaggtaaggctcgggctccagtgaaagagttgaaaaggttccttgtgggtaattcatttatctcaccattactcccatttattgatgaagcttgcacacaagaccatactccccctgagcaacaaacccaggaggttgcttcatataaatatcctcctcaagatcactatggaggaagacatttttaatataaagctgatgaagagaccaatgatgcatgacaatcatagcaagaaacagacgaacaatagtgattttggctacaggagaaaaagtatcacaataatcaagaccatatatttgtttgtagcctttagctaccgagcgatccttaagtcgatcaacctcaccattgggcccaactttaacagtatagacctatctataacccacaagtgttttgccaggaggaagaggaacaagtttccaagtatcattattttcaagagcctgcatttcatcaatcatagcttgttgtcagccaagatgatcaagtgcctcatggacattggaaggaatagtaagggaagataatgagaaaacaaaagaaacatatgaaggagacaaatgatgatagcttaagaaattataaataagataaggattacgagtagaacaagtatctttcttgatgacaatggaccaatctgagtcagaatgatgagaagaagtggaaggagaagaaggatctataggttgaggattggttgaagacggatgaggatcacgagaagaagcttcaggcattatagatccaacttgccttgtcctgtgttgatatgtaatgagaggtggaggaacaactttaggtgaatttggtggagaagatggaacaaccctgacattttggtctgagttacctagaggacaaggagaaggaattcgaagtacaacctggagagaagaggaatgatccatggaagggtgagaagaagggtgtgtctttaaagaaggttacatccgtagatatgtaatattgttttgtggttggagagtagcacttgtaacctttttgaaaatgagaataacccaaaaagacacatttgattgatctagcaaaaagtttgtctaaaccaggagaaagatcatggacaaaacaagtacaaccaaatactttaggagaaatatgaaataatgggtcatgaggaaaaataattgaatgaggaatttgattttcaagagaagaagacattttgttaattaagaaataagcagtaagcactgcatctccctaatggtgtgtaggaacattggaatttaatttaacattaggaaacgtgcaatttcaagaagatgatgattcttcctttttgctataccattttgttatggtgtttgaggacacatggactgatgcagaataccttttgaagataagaaggaagagatatcatgagagaaatactctttagcattatcacttctgaaaatcttaattgttttgccaaattgattctcaatctcattatagaatgacatgagtataggcaaaagtttagatctgtctttcattaaataaactcaagtacatctggagaattcatcaataaaggttacaaaatatcgaaaatcaaaagatgtaacacgacttggtccccaaaaatcaaaatgaatggtagagaaagtcgagttacatctttgtacagtttgaggaaataatgacctaacacgttttcctaattgacaagactcacattctaagactctaagattcttaagactaggaaccgtcattttcagttttggtagacttggatgacccagacaatcatgcacaagtttgggttttgaagttgcaaaataggacacaggaaaactggattctaagtagtaaaatcttcgtgattcacgtccttctccaattaatcgacccatcccatgttcttgaataataaatgatttagcagtaaaggtgttaacttgttggcaagtgtatcaaatttgtcacaagtagtaaagtactcggaagtccgagtgtcgaattcaaagggattttgtttgtacttagattaatgcaaatccaatttaaaaacaatagatcaataatttaaaataaagataagaaaatataagagataagataaagatttaaaagaaaggataaaagatttaaagataaaaatggaagatagagaaaataaaatatttaaattaagatatgataaagataaaagaaaataggagataaaagataagataagtaaaagataaaaataaaagataaaaataaaataaaatcagaattgggacttggcctgccttgtttgcctaggatgtatgagtttacttgccttgattcctcacgatgacaagcctattttatttatctatttttcaaattcttttgcaaagatccaacaaataaaatgcatgatgtatgaattttagatgtttgcaagaatgcatggacataaaattatcattcctaggaatgactttcctatgaaatcctttgtttttgttttagtagttactcttacgagcgtctaatctataaaaccaatgcatgcatatcttctttaaatcttatttagaagttatgttgctcctgagcgtctaatccctaatagaatataaagataaataatgcaagataaaagccaaaaagataatagaatagaaaacacctttgcattgataaatagtgagtacatcatacatcgcttggcttttaggcctgccaggccttaactaggggtttagctattcatgatcattgagggctttacaatgaatgaggtataagaattgagatgagataagaggggtgaaagaaagagagtaaatgaaacccctaggagagggggttttgtggtctctttctcctccttggcttcactgttggaatggaatggacttgggcctaatgttaaaaatcttgctcagtgatattttttttgatattttttggatttattttgcttttaatcatatcttcctgagacttcttgatattttggatattttcttgatctttttctcttttaatctctcattttcatatttgcaagtcataagtaagaaaattatcaaatcttaatatttaagccaaagataactgctaaataaacatttttaaagatatttttattatcaaaataactcatatttagccgttataaaaaggttgtaatttaatgagcgagtcaactgacttaatgagattagattgtatggacattgaggaacaaataaaacataattcaatttcaatgagggagataatgaaacttgagcacttccttgagacgcaactttggagccattagctacagtaacaaggtgcggaatttttggaaaagaaatggatgaaaatgaagacttattatcagagatattatcagaggcacctgagtcaagtatccaagaactaggattttcaatggattgagaaatacaggttgttgaaaaacctggtacagatgaagattgtgcttggttgttgggcttctcggatttgagctttaaatactcctgatactcttcatcagagaacctagactccgatttctctgacttagacacctgtgctactttgtcaggaaagtcatgcaatgaataacagttttccttagtgtgacccatcctcttgcaataggtgcaatgaggacgtccacctcttccactgcggcctcctctgttattgcggcctcttcctctcccacaaggtgccaccatagttaaagtttctgcagcatcagtaagagtttcatccttcaatacatgaggcacgcgaataaatctagtgatgagggaatccattgatggaacttgatctccagcaaggacttgatcacacacatgatcaaagtctgagtgtaggctcctcaagatgagaaacatataaaacttgtccagtttcctattaacctcttccaggctcctctctatgggttgaagcaatctcctcgagcttgatttggtaaatttagtcatgttgttcaactttttgggttgaaataaagtgaagctgatcattctattttttattgtcatacatcccctagaaagtgtgtttatctaatggtctatgttgatgatatagtgatcacaggaaatgatgctactaagattgtccagttaaaagagcacttattcagtcatttccagaccaaagacttgggatatctgaagtatttccttggtattgaggtgtctcaatcaggagatggtgttgtgatttctcaaaggaagtatgttttggatattctggaagaaacaggcatgcaaaattatagacttattgatagtcctatggacccaaatctgaagctcatggcagatcagagatgtctatcttgacctcgagaggtataagagacttgtgaaaaaactcatttatctcaccattacaagacctaatatctcctttgctattggattagttagccaattcatgcaaaattctcatgttgatcattggaatgctgccatgcgtattcttagatatgctaagagagttcctggacaaggattattgtatgaggacaagggtaatacacaactatcggggtattgtgatgcagactgggctggttgtcctatggataggagattcacattaggttattgtgtcttcattggagggaatattatctcttggaagagcaagaagcaaactgttgttgctcggtccagtgcagaagctgaatatcgatctatgactatagttacatgtgagcttatgtggattaaacaatttctccaagaattgagattttgtgaagttgtgcaaatgaggttatactgtgataatcagactgctctccacattgcttcaaatccaatctttcatgagaggactaagcacatcgagattgattgtcatttcattcgggagaaactattgtccaaggagattgtcattgagttcattaattctaatgatcagccaatagatattttgactaagtccttaagaggacctaggattctgtctatatgttccaagcttggtgcatatgatttatatgttccagcttgagggagagtgttgaatatttgttttattctatgtatggttacttagctagcttacttgtcagaggagacagcagggttaggtcaggtcagtatgtgtaagctgtctctctcttctctttgtaccctatatatatgccattcaaaagcaattaataagatgagagagagtgagagaaaatttcctcacttattcaaatcttcaactggcgggataacgttaatgttgtaaatgggaaggtaaatgacttaactattttttttctttgttggatagaaattgcctccatatccgttaccaacacatgaggtggtgtcaagaggttccgttcccactgaatttgaagtaaggactaatagactaagacaatttttctccattttcctcgaaaagcattgtctttgattttaatcaccggtatctgattgttgttgtcataatgcaggaaattacagtagcttatgataaaaaggatacctgtcatctggctggcgctcttttacttgaggatgcaatatcagatctaccacatgtatgtttattttgctctgcatttgtttattaagtttgttggcttgatatgaaattttgattttgatcccatttcttacctctttttcaattttcccttaatgaggttacaaatgatgagaaccaagatgaaaggaactatgaagctccttctgaaactgaatttcaaaaatatattagattgaagaaaaacggttagcttttgtatttgcttttgccattttgcgttttaaagcatgcttatgttgtttatactttgcatcaaggtctttgcctttgccagtgtggtaaactaaattctctgagcttctttaagacatagtagtagttgaatattttgtcatgctctacgttgcttttgctatgtctagaattttgttttggtggttgactgttgtttaatgtggtaataatatttgtcacatcgctttcttctcatgcaacaagtgcatagtactaccgtacagaatggatattgacattatacgttctctgttttgaagagatggtgggtagtatggctagtgctcaaagcgcaccagatagaatactatatgatcatcgtcctctgcagttgaacaaagatgattatgaaagagtttgccagattccccagaagaaggtaggttccataacttgaccgtatgtgctgtcagaaatttattttactctattctaaatttagatggtgcttgcttacttttctagggtgcaaacttcagagatctacctggtgtacttgtgaatggcaacaaagttcaatgggatccatcggttcaaagagtgatgctagactctgggaagcctttggtactagtcttttgtcaccttttcttagggacattattttgacacaacccctttgttgagtgccataatttatctctaatttattttattttgtggtcatgcataggttcctgattatgctatgacatttgtccgtgggacatctagcaagtaagtatatgcatatcacgtgatttccgttatgtttttggtcgtttgttatcaaaattcctaatgtaacttactggggggaaaacacaggccatttggtcgtttgtggtgggatgaaattgtgtcaacagtggtgacaagggccgagcctcacaaccaggttattattttcactttgtacattatttgatttggtaaacaaatggcacttatgcaaatatctcagtacaaactcttttaattaatgttgcatttcaagtaatgttatattgttatctacaaaatgattttgatgcatgcatttttctattaaactcatgtttttctgcatgtattataatgcattgtctcaatcaaaatgttattttattgtcaggccattctccaccctacacaaaaccgagtacttaccattagagagaatgcgagactacaagggtttcctgattgctataaactttgtgggcctgtcaaagagaggtatgtgaacccacaagttattttgttttagtttatcagtgaaatcatttaatactcgttatctcccttttactgtcaccttccttaccacaagttataactccagtcctatactaaattattttccctttttggccctcaatgattctatacttttatccataatataggtacatacaagttggaaatgctgttgctgttcctgttgctctagcattgggatacacatttggtttggcctgccagggattattgtcggatgataatcccttgacaaccctccccttcaagtatccaagttgtcttgccctttcatctcttgcagaaactgagaatgataacgaatcaagttgagattgttcccacacaatcccgttctctgtcattgccatgttaaacttgtccatatttccaactttccattttaatgcaagagtgagtgtacactaaaaggccgaaattttgtatcaataatgattgtatgtacactaatgacattgttcataatgatataagattcactttggtaatggttttgtgaaatttaagttgtagttaagaat

SEQ ID NO: 181 - DNA, 8119 bp, Glycine max
  source 1..8119: mol_type = genomic DNA
ttggtttatttttattgttaaaaattagtacttattttgtttatttttagtttctccttaaattgttttttttaagattcatatgtatttttttttaagatcgttcgaagtatttttttaagcaaaagggacataattatacatcaaagtaggaatagaaatcctaattaggttgatatagttgctttgattgatcactgtcacacacaagaaatatattgatagaaaaaaaagagaatgaacaaaacacttgaggaaccaaatcaaacccaagaaaaacaaactatttgttatttgcaccaaaactaactaacctgtctgcataaccattatcttcacgataaatgtaagtgatctttaaatttgttaggaaaaaacggagttgtactgccaaaccaacattttgcaacgaccaagggtaacacaacaaggaagaatttgttctcaaccacaagaaaagccggccattagctttaggattatctgtgacattaatagcaaccataacctcaacaaaaaatgccaaattgatatccaaattgttcgaagcattgttacttgctattgttaacccccttttttgctataaggaattcaaacctgattttcaacattacgagaaatcaacctcttttactaatcacatctataataaaaaatttaaaatttgagtttaagagaaagtaaaataaaaataaattttttgtttattaaattcaaattttctttctatggttcgcccttaagaaaaaaataggcaacatcggttcgaatccgataccgataaagggctttttccttcttctttttttgggtacgccgcttcttgctttcaccttctttctaagtaatctgacaaaaatacatggataatagtgtttcctttgttttttattttcttccttcccaacctcacgttaccaaaaaaaaaaacaaataaaagggtgagatttcattgtataaatagataattgattttttgtttatccaagacaaagaatttatttatttactcatctcatatctgaataacataaaagttaaattactcatttaattttatagttttatgatttttatttttttaattcttataatttgaaagtaatttttttaatttttattttaattattttttagtccatataattttaaaaatgatttttttagtttttttagtttctataatttttaaattaaaagataagaaaattaaaatataaattaaaaactaaaaaaatacttttaaattatgagaattacaaaagaattaaaatataaattatagacactaaaaaaattacctttaaattataggatctaaaaaggtaagaattaaatatgaaatgaataatttaagataacatggatataaattaaattaaaaaatcaaataagttgaatgaaattttttttaccttacatagattttctctctctaattttaagcgttagcgagtggcgtacgcgtacgtgtagagtcacaactattagtgaaaaatttgaccttccccgtcactggaattcatgttcccgcgcgtgcggccattttaaaaacccccccttctcttttcctcactcactttttgtctgcatctcttctccgcttgtccctctatccatcactggaagcagcgatacgctgccatggctaaaaaacgcagcgcatcagacgccaccgatgatgcacaaaacgacaccgtatcgctgcttccctcccaacgcaagaagcccaagcactctgctcctaaccccgacgcctgcttcgtcggaaagcccattccttctgccgaggcccgcgccaaatggccccaccgatacccctccgaggtcttcttttttcttctcaaccctccttcgttcaaaatcgttttttttatttattattattctctccatttttgctcattttgtttttctcgtatatatatggataatcaggtgaaaaagaaagctccagctagaagctcagaagagtgagtcttttattttattttatatttgcctattgtctatttcacgttagttacaactttaactctggtatgtttgtgactgtttagggttacgagtgaaaacagtgaggttatgctggctaggtgtcattatcgtcaagctaaagtagatggagttgtttataacctctatgatgatgcttatgttaaggtattggatctttttgctttggaattctatactttggtaaaatcagaacatgtttgaaaaaaaattaacattcttgttgaattgtttcaggccgaagacggtaaaccagattatattgcacgaatcgttgagatgtttgagactgttgataaggaacaatgttttatggctcagtggttctacagggccgaagacactgtgagtctcactttttcaatgacttgtcttttgttttttttataataattttcagcatcttttaactattttatggcttatttgttttggggttttgaatgagtgcaggtgataaaaaatcacggtgatcttgttgacaagaagcgggtttttatatctgatgtgaaggatgtaaatccccttgactgtattgtttcaaaagtcaaaattttcaaaaaaaacccaagtgtaagtgctttatagtcactttgttttgtgcaaatgcttgataatctattaatttatttaaggattatttaagcttttggaatccttatatatatatatgtgtgtgtgtgtgtgtgtgtgttattttgattcaccaatgttagttgttattcttttgttagtatgttagtaggggggtttgaacccatgacctctccctcctttttcctttcaactcttaaatccccctttccaaccatttagtcaaccttataactatccttttatataacttctagatcttgcttattataataattttcttggaaaatctagtcaagatgagctctcttaagctcatttcaacaagctttatagtcaagcaagtaaatgaattataatcttgataagaatttattgaataaatggttaactatgctgtttactaatgctatggttttgtactcatgcaggtggcttcttttaactcatcttgtgttgaaggatagtcactttttcttaaagaatttattttccttttgcctttcaaaagaataaaataaaataaaatcaaaattatgctgtttaccaaaacatgccctgtaaattgattatgtggttaaaagtgtttgaaatttgtatactacaggtagatttggcttcaaagaaggcaaaattgcctttttgtgattactattatgacatgaagtacactgtgccatatctaacattttccaacctagtcaatggtaagaatgatgtggtttttatatgaaattactagatgactaataaatggtctcttttgtttttttgcactgtactttgctgagttttgccatttgatgtgttttcctctgataatccagaaacagttaaaaccgagagtgatgcatcttccacaatttctagtgaatctggatccattggttgcgttaataatgctaatctggcaaagagaaagactactcaaaataatagttctggttcctcgcagtggactttgctagacttgtattctggttgtggagccatgtccacagggctttgtttgggtgcatccttggctggaataaaacttgtcacagtatgtagaggctgttcttttgagcattttggtttttaactgatattttgaacaatttataatgattgtttttttattatttctaagatgtgggctgtggacattaatgcacatgcatgcaaaagtttgaagctgaaccaccctgaaactcatgtaaggttttgttaacatgtaattgatattgatacttgttattgtatcttctactgatactgcttcctcaaaataacaatcaggttagaaatgaaccagctgaagacttcttaaacctaataaaagcttgggccaagctttgtgaagagtttgcattattaggatcagaacggtcagattccgatccagacatggatgaagatgagaatgaagctgtgcaaaaagaagagtcaggaaatcaatctgacttggaggaatttgaagtagaaaaattacttgctgtgtgctatggtgatccaaacggcgtcaaaaaaccaggactatattttaaagtatgttgccttcaagcttgcacattacattaattggtttgcatatttagtttaatgttgttaatgttattaggattgacttattcacgttacagttctttgcttgtcctatgtttttctttaaaatttaataggtgtctaatttttggggaaaaaaatgcatgtgtgaatgagtatcaatttaggttatgacacaacacgcacgtaccatccaacgcaatcatcttaaaatttatggctttggttttttcatatcttgaagggtagttatttggtgatttaaattattaatttcgtcaaggcatggaaagaggattatgtctgtattaatgtagataacagttcttaaaatggcgcaacatgtgctgcatagatatgactataattaatgtatttgatgtgataagatatgtagatagctatttttacaaatctaggacatgggtataacgaaatgtttaatgaaaataaagtatagtttgatgttaatgttaaaaacgctcaataacttgtagtcttgtactcattttaaaatcataaataacgaaatactatttgaaataactattgtaccaattaagttcatgaagggcttgaactttgatactttaattggcttccttatcttatgtgctgaggtaccaagaacacctttagtagtaaactcaaaacaaatgtttgtcaaagaaggtaactttaggttttgtcagcatgtccctgcttaattggatttgattttattcgatttccaagtgttaatgtagcctcttatttttttttcttcctgtgtaatgaagtttcagttaatgatgaattctgatttctgctgttaaatcactcaggtgcgttggctgggttatgattccagttatgacacatgggagccaatagatggattgaggtaaaccccttgtcatcaatattattgttctcttcagctttgctttgtgaaatttttgtttgttatgtaacactttacgccaaatctctgcaaaattctgactgattattttgtgccagtgattgcaaggaagttatgaaagattttgtgacaaaaggctacaagaaaagattattgcctcttcctgtgagtctctccattctagaataaacttaaattccttgcttacacactagtaccggttacccttggagcggtttgtcaattgattttgtaacacttaacccttgtgcagggtgatgctaactttatttgtggtggacccccgtgtcaaggagtaagtggtttcaaccgcttcaggaacgcagaagctccattagaggatacaaagaataagcagttgcttgtttacatggatattattgattttttgaagccaaaatatgtcctcatggagaatgtcgttgatattttgaagttttctggtggttatctggggcgttatgccataggccgtcttgtagctatgaattatcaagcaagaatgggcatgatggcagcagggtcttatggccttccacaatttcgtatgcgtgttttcctttggggagctcgtcctactgaggtaaggctatttatgcatgcaaattttattgttttggttggataacgttaatgttgtaaatgggaaggtaaatgacttaactactttttctttgttggatagcaattgcctccatatccgttaccaacgcatgaggtggtgtcaagaggttttgttcccactgagtttgaagtaaggactaatagattaagacaatatttctccattttcctcaagaagcattgtctttgattttaatcaccgggatctgattgttgttgtcataatgcaggaaattacagtagcttatgataaaaaggatacctgtcagctggctggtgctcttttacttgatgatgcaatatcagatctcccacctgtatgtttatttggctctgaatttgtttattaagtttggtggcttgatatgaaattttgattttgatcccgtttcttacctcttttttatttataattttccatcaattaggttacaaatgatgagaaccaggatgaaaggaactatggagctcctgctcgaactgagtttcaaagatatattagattgaagaaaaacggttagcttttgtatttgtttttgtcttttaaagcatgcttatgtttattctttgcatcaaggtctttgcctttgcctgtgtgtgaaactagatatctatgagcttctttaaaacatagttgaatattttgacatgctctacgttgcttttgctatgtctagaattttgttttggtggttgactgtagtttgatggggtaataatattcacattgctttattcccatgcatcaattgcataatactaccgtgcaaaatggatattgacattatacgatctctgttttgaagagatggtgggtagcatggctactgctcaaagcacaccacgtagaatactgtatgatcatcgtcctcttcaattgaacaaagatgattatgacagagtttgccagattccccagaagaaggttccataacttgaacttatgtgctgtcagaaaatttattttacattattctaaatttagatggtgcttgcttacttttctagggtgcaaacttcagagatctacctggagtacttgtgaatggcaacaaagttgaatgggatccatcggttgaaagagtgatgctagactctggaaagcctttggtactggtcttttgtcaccttttcttagggacattattttgatgcaagtcctttgttgagtgtcataatttatctctaatttattttattttatggtcatgcataggttcctgattatgcaatgacatttgtccgtgggacctctactaagtaagtatatgcatatcacgtgatttctgttatgtttttggtcgtttgttatcaaaattcctgatgtaacttactggggaaaaacacaggccatttggtcggttgtggtgggatgaaattgtgccaacagtggtgacaagggccgagcctcacaaccaggttattgttttaacactgtacattatttgatttggtaaacaaatggcactcattcaaatatctcagtacaaactcttttaattaatgctgttgcatttcaagtaatgttatattgttatctacaaaatgatttttcgcgcattcatttttttaattaaactcatgttgccatcttagtcgtttggacttgttatggcagtagtagttttctcttggttatgattttctgcatgtatcataatgcattgtctcaatcaacatgttattttattgtcaggccattctccaccctagacaaaaccgagtacttaccattagagagaatgcgagactacaaggatttcctgattgctataaactttgtgggcctgtcaaagagaggtatggttagctgggttcagaatccacaagttaatttgttctactttatcagggaaatcattcaatactctttatctctcttttactatcaccttccttaccccaagttataatttcaagtcctatactaaattattttccctttttagccctcaatggttctattcttctatctataatacaggtacatacaagttggaaatgctgttgctgttcctgttgctctagcattgggatacacgtttggtttggcctgccagggactgtctgacgataagcctttgacaaccctccccttcaagtatccaagttgtcttgccctttcatctcttgcaggaactgagaatgataacgaatcaagttgagattgttcccacacaatcccttctctctgccattgccatgttgaacttttccatatttattcaaattttccattttaatgtaagagcgagtgtacactagaaggccgaaaagttgtatcaatgatgattgtatgtacactaatgacattgtttataatgatataagattcactttgttaatggttttgcaaaatttaagttgtattaaaaacaaaatgtatttaagaattaattaaacttgaga

SEQ ID NO: 182 - DNA, 10154 bp, Glycine max
  source 1..10154: mol_type = genomic DNA
gtagataattaaaactaaatatttaaaatgcatgtctcaattttctaaaaattagggatcgagatatgtttattgtaataagattttatttaaattatgaataaaataaatactaacaacacactcttttaacacactctatattattaattaaaattaattatatatcacaaacttttagtctcaagtgtgattctatgagtgtctaatgtgattttgtagttttttttactaaatttatataatagtacaaatgtgtgttacaaatagtgtgttcctactttgaatgatataaagtttatattttttttcaaatagtaagaaactgaatataaattgttatcgcaaacaataaaaaaatgtaagcttaataatctgaattttaaattaggtcttaaagataaattttcatgtgtcattcaattttaaaactatgtcttaaagaagaattttcacgtgtcatacaaaaatgagctttttttttaacaaattgacccattaaaacaattttggtactaccagacttattatccctagtggtctctgatcttaagcgtgtgactcacattgcctcacatcgtctataattttaaggtcttattttgtgtcatacaaaaattctctaaggtcttattttatgtaaatctttcctcacacttattctttaaagatcccatcattataagttggaatattattaacatgatttatttctcaataattattcaatttccatatagatctttgtttacatgattatgtgactttcatgcaaggaattaggtttgattgttgaatcacattgcctcagtaaaatattaataataaatatatttgtacaaaaattaatagtaaattatggtgaaagtataaaacatttgttagtgtttctttttccattgatgggcttaaaataagtgtttagattgcattttgcttgaccttgcaaatacttacctaaataccttaatttttttttaaaaaactcaatttttccttcacaaaaaacatttttaaaattatatttaacttatgcattattagtaacacaaacaaggttagaaacaatttgaggaccacacatgtgtttggaacttcattatgtcacaagagacttgtgttaaataaatatccttgttcacaacaaaactactcaaagtagtttccaattttcacatttgttacaagcattcttcttgttaaatgcataaccaaacgcctcatatacactttttacacatccaaaaactaaataattttttttattatttaatggattaaattatcacattaaggaaccaccctaatttatatttccccgaaaaaagaaatcccaatgcattgcgtttagcccaacttgggaaacagtaaacacaaaaagaagcccaattgtaaagaaaaatatcccaaacccaaaagttcccattttacccctcagaccgaagagacgacttcagaaaggcaatgcattgttgtttccatctcattcattttcgccttcccgcccactccctccctcttcaaaaaatttcagcgcctactataaatactctcgcgcttccccattttcaaaacactcactctttctttctctctctaatttattttcgcactcgccgcaccactctcctcctccgcctccgccatgcctagcaagcgcaagaccagatcctccgcctctcccgctgccgcgccgccgagcaagcgcgcctccagatcctccgcctctcgcgtcgccgattccgcaccggtcaaatctgaagccgaggaagttgtggcagcttcctctgtcgtcaaagaagaggcgcaagcaagcttcacggacgttactgacggcaacgttagcgatggcgaggggactaacgccagattcgtcggagagcctgttcccgacgaggaagcccggcgccgctggccgaaacggtaccaggaaaaggtggttttttcttttctgccacagtaaaaacatttgaatttttggaaatgaagcgatgtgcttattattattagcacaacgcttggttatgttttgatactaagtacactaaatttcgattaaaatgacgattgtgaatttggtttttcgatctcgaagacacacgaaaatagtttggaatgtttcatataactcttgcaagatgcaaaatcaatattactattgactgaatgactgcctcatgaaaatgattttgttttaattgtgttttgggccaacttggtcctgtttttgaatataatcagctttaatttagtctgctgatttcctggtttatttaggattaaaaatggattaaggtttagaaaattagcttggtcaaaattgagcacgtagttagacacaatcaaaatttggcacctagcttatgtcattgtggttggcatcagccccatttagattagctttttagcttgtgagaatttttaagatttcaattgaaagtaatcttttttttttttttttaaattttattgaaattcccttatgaatttatagttatgaataaaaaatttatattcatgagtttatggaaaaattaaggtgtattcgttgttttcaatatcaaaagtttgatttattttatgtttttaatttttcaactgaaattattgttttttaattttttaattaatatttccttatgattttatagttacaaataaaaattataattacacatttatttataattaaattaagattaatacattggttaacttaattggttgagtaaaatgtgtactttattattagtatttgatttctacttataaaacaaatttcaaaattttaatttattatataatactcttaaaataacacagaaaatgtgcttaagtaaattgagcgtaattttacgttaatagctggttttgtgattttttactttttagttgcaactctgtatcgacaaacttcagtgttttaaagttgattttcagttacaaccccaaaatttttaattttagttattattttttgttgcttttaggaaaagaagcaatccgctgggccaaaatcaaacaggtatgttgtatgttaggacctgaaaaccttttaacattgttaattgtcatttcacatccctttcgttggagctcctcacagttggtcacaatttagtgatgatttttttgactctgttcgtatgcacagaaacgatgaagacgaggagattcaacaagctcgacgtcactacactcaggcagaagtagatgggtgcatgctttacaaactttacgatgatgcccatgttaaagtgagtcagaatttaattccatctatcataaacagttgtaacatttatgcttcaaacttgactggttcaggttgaattgatttgccattgcctcattgtttatatatgttggaaaacaattgcgctgaaaactagaaatcactgtggtcttggaagctataagtgatcagttatagattgatatgcaattatttaaattgtatgtctggtggtaaggtgtgttctccaagttgtatgatcatactcgaaacattgaaacaaaatattagacttgtaaaaaatttctatattttaataattgaatgggtatatatgtacttgttgagccatcacatattaaccttttgtatcattgattattgattatattctttgagtaattttgaggttgttgtgtgtacatttttgatatttaggcagaagaaggagaagacaattacatttgtaaaattgttgagatatttgaggccattgatggggcactgtattttacggcacaatggtattatagggctaaagacactgtaagttatattttgttctttgtttttaaatcttatgagatgtttgttttcaattattatttgatcgtaattcatttattttgaattcctcttctactttacaggtcattaaaaaacttgcatatctcattgaaccaaagcgagttttcttttctgaagtccaggatgacaaccctttggattgtctagttgaaaagctgaacatcgccagaataacattaaatgtaaatgcgctggttgcaattatattttatgtcattttctttatttttcgagtgcaattattaataatattaattttgagatttttgtaaaaattttatttattttcaggtagatttagaagcaaagaaggaaaccattccaccttgtgattattactgtgatacacaatatcttttgccatactccacatttgttaacttaccatcaggtttccttttatctatgtactttttgtatcctgttgtcattttttaaattgcttctcagttttggtatataattttcactcagaaaatggggaatctggtagtgaaacttcttctacaatatcttctgaaactaatggaatcggaaaatatgaggtgaactctcaacctaaggaagcttttcttcccgaagaaagtaaagatccggagatgaagttactagatttatattgtggttgtggtgcaatgtcaactggtttgtgccttggtggaaatttatctggtgtgaaccttgttactgtgagttctttgcttgttctgattaaaagcaattctttgaataaatcttgttttgtctgtgtttattttgatgccgttctttttcaatagagatgggcagtggacttgaatcaacatgcttgtgaatgtcttaaattaaaccatcctgaaactgaggtaattccatgtttctttgcttttatgtaaatttgttcacttcggtttagcttgcatccttgaaatacttaatatttttcaaggtagatttctattagtatgggtgacaagaacttgtgtccctggttaattgccttgcatgttaaaaagtatgattttgactgaaaaatttaggtgcaagggttagcactattgtagtaaggtaactctatctttatggaagtaagtcgatactcctaattgacttgacaagagcaaatgggtgtgaaacctgtactgactaagtgctctgcttggatgaattcaatcccagcaccagaggagtaacctttgtgttgagagtactgggtcttaatgaatcttattttggcaaaacgttctaaatgcttcttaatttaatgttgcttgcattaataactctgaacattaagtaggatgctaaactccacatgagtaggtttgcatttcttttcaaattttatattttaatgggttctgccttgttttggagtactgataccggtattgtttactcttctaatcaggttagaaatgaatcggcagaaaattttctttcattattgaaggagtggcaggaattatgtagttacttctctctagttgaaaaaaaggtgtcacatgagaaatatgtgaatctttttagtgaagatgacgatgacactagcagtaatgaagaggttaatagtgaagatgacaatgaactgaatgaagatgatgaaatatttgaagtttctgaaatccttgctgtctgctacggtgacccaaataagaaaaaagaacaagggttatacttcaaggtagtcattgttgagcgacaagctttttttcccctctggttgtaattgtaactccttagtttactacgttatctatttttgcctttttgccttagctaagattattttcattgcttttacttgtttgtctttaaggttcattggaagggttatgaatctgccctggattcttgggaaccaattgaaggtctaaggtaagccaaaatatttcagacttgttgctaatccttggaagtaggcattatagttctatttcagaactaggtgttgtgttattttaaagacagtacataggtatgttattttttttttttttttttgacaccaggtatgttttgttgatgtataataatatccatatgaagtaatgagttcacttaaaaaatataaggagttgcagccatggataaagtatatgcggttgtccaataaacgcttattgtttaaatttgctctattaattttttcatcaggggttgtaatttgctgcttttccctttaaagaaacttccttgctcaaaggatcaaacttctaaggatttttgaaatgggatgcagattttgttttcatttatatttcaatggatgaattctttttattctataataattggatattttaaagttcaattttgattctcatgtttttttgttttggataattcatagtagttttattatattcagacatgaggcaaattttgctgatttaaatattaacactgcaacagtaattgcaaggaaaagattaaagaatttgtcagtcgaggcttcaagtcacagatattgcctttgcctgtaagttccaacttccatctgttttttggtacactttctttaagaattgtatttaaatggaggtacgcattttgatataataaaatatgggtaattgtgttaagtatgcaacttatgatgtttgttgctgttgttgcttagggagatgttgatgtaatttgtggtggacctccttgccaaggtattagtggtttcaaccggtttcggaacaaagagagtcctttggatgatgagaagaacaaacaactagttgtttttatggatattgttcaataccttaagcccaaatttacattgatggaaaatgtggttgatcttgtaaaatttgcggaaggctttcttgggagatatgccttgggtcgccttcttcaaatgaattatcaagcgcgtttaggaattatggctgcaggtgcttatgggcttcctcagtttcgtttgcgcgtctttttatggggggctgcaccttctcaggtgattaatatttatctttatttttggggtatagggatatagtatgtgtttaattgtatttctttatgcgatgcagaagttgccacaatttccgcttccaactcatgatgttattgtaaggggtgttattcccttggagtttgaggtatgtgtaaattgataaaattcgctatatccatattttgaatttgaataattttggtgcatagtgggagtaagcatatgattttacctttgtataagtggtgtattatttaagaggttataatagagtgtatcctgcttattcactaaaaaaacttgttctatgttgcttggagataaacactgtagcatacaatgaaggacaaaaggttcaactgcagaagaagcttttattggaggatgctatttctgaccttcctcgggtactcttacgttattgttgcatctcccaaaccctgtctatttttgttgtgttaacttgtttattaatgagctttactttgtcaatgtgttttataggttcagaacaatgagcgtcgtgatgagataaaatatgacaaagctgctcaaacggagttccaacgattcattagattaagcaaacatggtaatacatcattaaatgtttatgcttgtgatttatagtaattcatgcataacagtatcgacacttctgtcaaagtctgcttggacacatttgttagtaatgactttgattgctcgttcatggtcttgcttcttacatcaaactctactcatttaggtctttcattttttggactagtaactgaaattaaattaacaaatattactattttggaaatttacatgtttttaaaagaatgagatactaattatgaagtggagagcatataaaagttaacggacttaccgatttagacacgcctgataatataatatatatcttgtctcgacttttgatgtggatttatgtggcaaactttccgattgattattcatttaatgaatgcgcagaaatgttggagcttcaatctagaacaaaatcgtcgaagtctttgctatatgatcatcgtccactagaattgaatgcggatgattaccaacgtgtgtgtcggatccctaaaaagaaggtttttgtttaccacaatttaacatttatttgccattatatagtactactatttgtaagtttaattttctaataatgaatttttattgttatagggtggatgcttcagagatttaccaggtgttcgtgtgggagctgataacaaggttgaatgggatcctgatgtcgaacgtgtatatttggattcaggaaaaccattggtaaccgataaatttatggcagtaaaacttttttattactatttactgttgtattgatgtttaattgttcagcatgcttacttgcctcaataaataatgttcctgttggtgagtttattatgtttggttttgttttgggcaaaactgcactcttaagttaatagcaggaggtatagaaagacattattgaataacatcttttgatgagagatatgaacaagaagctttaggtgttttcctatgaaaccagtaaacaaacatctaatccatggatatttgaatctgagtacttaatgattgcatgtcttttgatgactgcatgtatagatgtcatgatgggttgtcatttctcatgtatttgtacttaaatatgaatgcaaacgtgcaaaacattacgattatgcagcaaatactaaaattgttctgttctcccatcttttttctctgttctttatgtttatggtgtttgtgttttatggtttcatacttattgctgtcttaatttaaacggtaacacattttatttacttgagcatcctgtttttataattttattttgttttaagtatcttttttcgtgaaatgcactaattcaaaaaatgcatattatttaacatttaacttatgactttaattatcatgttttatcaatgtaatgactttactataaaaaaaatatttttcagtatgttttttaaaataattattataaaaattaaattattttatacttgtctttataatatgatttcattgacgtcacaggttccagattatgccatgacttttgtgaatggaacttcatcaaagtaagttttcttaaatattttggattttaagtccagtttgtgttgactcagattttatttatgcgagaaatttgatttattttaaatttttggtgcaattctttttcttttcttataattgtttgttgaaaaatttatttaaattaactcctaattcttagtattgtaattcttttagaccttttgctcggttatggtgggatgaaactgttccaactgttgtgacaagagcagaacctcacaaccaggtattatatttattttttaaaaattaaagtaaaattcaactgtgggatgtgacatctttatcaacagtcaattatataaatttaatgtaaaaaattataatttcttaacaatttcttctaggacccatttgaacaaaacaacttaattggaaaaagaacttacattggtggttaaagttactttgattggatatgtatgttaaaatgtgtttatacatgttcatgtgtttggatacactttttaacatgcatatccaaaccaatcaattatttttgttgttgaaggatggaaaaatcaatcaatttatgatttgttaaagttaaagtgatttaagaattactttttaaatgatgatttttaggcttgctcaaattcaaaagtgaatcttagaacatacgaaagtttaatttgttttatcatgtatttgcacttttgaatggtcattttacgtagcctgctaaatattgtttttaggcaattttacaccctgaacaagacagagtgttgacgattcgtgaaaatgcaagactccaaggttttccagatttctacaagttgtgtgggccggtcaaagaaaggtaacttttgtttatgtctttggctctttgcactttagctgcttgtgtttttgggatgtctccttgatttgaatttgatatttgttttcaggtacattcaagttgggaatgcagtggcagttccagtagctagagctttaggatacacactaggccttgcatttgaagggtctacttctacaagtgatgatccattgtataaattacctgataaatttcccatgattagggatcgggtttcttctgtatcttccgaagatgatgtgtaattcaacaacttttaataagttgcgattttgcatctgtgcaactataatttatgtatgatcggaaacattgttgtattatccagtctattgtttgagaaattgttcaatttatatattgaagcagcatttttagaaggcgcttaatttactgatgatatatataattgtagctagagttttactggtcttaatgatggt

SEQ ID NO: 183 - DNA, 5752 bp, Glycine max
  source 1..5752: mol_type = genomic DNA
tggtaagaccttgaatgctgtaatgctcatgaaagaggtgggttaagccatcaagactagtggtgtaaagaagctgattcttttcttggctcccacagttcatcttgtcaaccaggcatgttacacagttttttttcttccctttctgtttttgcttcctgttagtttttttctttgacaaatgtggtattgaaagcttaaagctctcaaatttttaacataacagcaactaacatggtcttaatttgacaagtctcattgacttagaggtcctacataccctcccttaaactgaactgcaaactgcagtcagtttacttctggtgcctagcagatctctttatctcaagaacaactacagcttcaagggctcagtcataatgccagcaatttgatcttttgaatcacagtgcaccaagtcaacaatccaatcttttgttaaatcataaagaagataaaatcttatgtgaatgtgtttacttctaccatgtaaacaggattctttgaaagtttaggccctgttcagagtgtttttaggtttttagttttaaaattttcaaaatttaaatccggttttagttttcagttttgatattttcaaaaaagaaatgggttcagttttaaaatgacctaacacattttgaaaataaacattttgtggggcacccagctggaaggtacaagtcaccaacaccaccctttcctaagtgtgcaactctcttcagtcatccacaaatagtacacattcacccacgcctttttcacctttagatctttctgttgctgctccttgatggttttcctctgagcctttgtcggcttaaccccatttgctaccgtgagaattcttgtctccaccaaatgctaatactccttagatcgaagaagattctacatgagcatagcccaatggtcataatggccatcaaacttaggtttggctggttgcacaaaattgcttccttttgctgccatctcaccctcccctattttgttcaccaaatgtttctctcacacattaggggaccacagttcctaacgtacacaaccgggccacttatgtggagctctaatgccaatttgttgaaagcttaaaacagagaaatctcagtatgggagttcaaaagctctattattcaataacaaaactgtggctctatgctggccttacaaaacaggaataaaatcaaaatataacatccatgtttacattacctaaagatatgataagtaaatctggcaaggaatagaagctatactaactacttataactaggactttattaacataacagcaattaagatgatcttaatatgacaagtcttgttgacatagaggtccaacatgtggctgatgagatgttgtactcttccttcataacaaagtgtggctgatgagatgtactcttccttcataacaaagtgtgtggtttattcagttacaggttaaacttatttggtgtttgactgtttgtgtccactttgcagcaattcaagaatatgaaatttctgactgattttcaagttgaggaatactatggagctaaaggagttgatacatggagtttgaagatgtgggagaaagtgattagtaacaatgatgtatgtttattgtttaacctgctaattgattgtcttactttttttgcggtggcttttactttcattgatttgtgcagtattgttttgggcccaatggcatttaccttaagatctcttatagtcttattaaagttaatttattgtataattatatagcttacatattttcattcattaatcatgggacacaagatattacataattaagaacttgtggtattttctttgccactatcttggtccatggccctccatccttgctcaacattgattgattctccattttattttatgtgatatttcggcctgaaaagtgtataattaattcaactactgaattttttaattgttctgaattcctagccttgaataatagttaattagttatatcaactgtaacgcccttgattgtcgtcttcttggcggcttacatattacaacacttcacacggtgacacttcacacggtgacacttcactcaacattcttattggtcagaaccctctgtaggtagcctttttcgagatctcgaaaatttgtttcgactgctttcaggagtaatgactatcttgggaagtttttcgctggatgtgttcttaagactattgctgactgtgttgaagctctgataggagcatactatgtagatggtggactctttgcttcacttaatgtgatgaaatggcttgggattggtgttgaacttgaactatcatcacttgatgaagcaatcactgctgcatctctgagtacatgtgtgccaatagaaagtgatattgcaagccttgaaaagaaaattgagtatgaattttcagtcaagggactcttactggaggcaatcacacatttgtctgagaaagaacttgggattggctgctgttatgaggtagttgcgaagtttcatatattatttaagtaattgatatttaacttgtaaaagtatagtacgatttattgaatttatggcagaggcttaaatttcttggtgactcggtattggacctgcttatcacatggcatctttatcagagtcacacagatattgatccaggggtgttggctgacttacgttctgcttctgtcaataatgacaattttgctcaagttgctgttagacataaccttcaccagcaccttctacatagctcaggattattagtgagccagatattagaatatgtgaaggtcatttctgaatcagatcccagatcacttccaagtattagagctcccaaggtttagttttgttgatcattatggtttattttttataatataaagttacttatatgattgtaattacttatttgaatttctgttgcattatgttttgaattggaatatatttgatttagaaaccaattacaatgcttgaaactcgttacaacatattttaccaaatctggttgttaactgtattattcagtgtattggggttgcaccatgtatacccaaatatgtacaacaaaaatgctatctaaaagataaaccaatctaaaaagtaaaatataaaccaaacttatctaaaagataaaagataaacccatcttatctaaaagataaactacttatctaattacaatcaacaacattattttccttgatttgcaaattgttttccatgttttcaacaccaaacgaagatgagtgaaattcattttatttcaatgactttattatattacccatacttggaatggatcaaatggataaactaataaaggcaaaattgttaatcaattatttaaaattaggattagaaataaatcaaatttacacaaatgcaaccaaattttgttggttttcgacatgcacacaacacaaatcaaggcgatttacaaaatcaaagcaagtcctattttataaagattatcatttataaatagagacaattcctgaagcatgtggctccaaacatatacctggcacttcttttaagttgtaacattgttatttttgttataaatgtcaggcacttggagatgtagtggaaagtattgtcgggcctatactaattggtaccaagctaagtcttgaccaagtgtggaacgttttctatcctctattatctcccattgttactcctgataaacttgaattgcctccatttcgtgaattaaatgaattatgtgattcacttgggcattttgtaaaagtaaaagaaaattgtgaaaaaatgggatcagcaatgcatgttgaggttagtgtacagcttccaaatgccctattggttcgtgaaggaaaggggccaaataaaaaaactgcaaaaggagaagctgcttttcatttgttgaaggatcttgaggtttgttgtttaatgattgtgttctggtccagtccagtctaccttacctgaaatgaataagattttttgggcatgaattttaatttatttttttatgaggaacttgatttgtaaagttgattagttattttaattttttttcatattactgctatctttatttgtatatatttcgatgaccacttggcttatacttgtgatgctacagaagcggggaattttacatggtagtctcatgtccaagggaaaaagagacaatcctgaccatatctatgattcatttcatctcaaaagggattctagtatttgttcttctctaattgaagaacattcctcagagccagcatcacataaaaggcacacattggatgaaactaacttaactgcatgtaagttgcctcccaagtcccaaagactcttgcagtgacatctctggttttgatagcaagttttgtcttcccagtgacagtgtccacttctgggaaattttctccattagcttctttgtatggttgttaagtgttttgagtttttgagaagaaacagacaaattagagcaaattgaagtgatgggtttatttccattgtctatcatgcaattttcttattcttttgttccattttacccatgcatataattttggtctatctaaaattatttatgaagaatggaaaaatatcagctattcagttctgtgagacatctgaattgatcactcctgctgtagcattcattaaccaaatcatagataatgctatgagtgttgtatgaagctagtttgatggggttttgttcctatctcaaagcaaatatgttttaattttcagcttaatgtgaaaagaagagaaagagagtagagtagatatttttctttgcacctagttaaattggtagaaattcaattcagatatcatcatatttgtcaaatataatatattaaggggctgcaaatgaaaggattggtgcttagtggtctctctaccttgtcttctttttgtcattttaaacccgtttattccctgctattttcaaatccaagggcaatgagttaatttattatctacctatagattaacttcattttggattcatgttacacagttaattgatcaatgaatatgaaagggaggaccacggaccacactatatgatgtatgtaagaaattacagtggccagtgcctgcatttgattcaagagaatataaagataggtgagtccgccaactaatttgtacttttaattgcttgagcaactttaatctgaaaagatttttttattatgtagtactacatgaaggatttgtgtgtgtaatatgtggagaacagaattgatccctaaacttaaaggactgaaatcatctagcaaaggaaacaatcaactagctacagaaactgaatgaaagagtattacaaaatcaaacaatatagatcatactcaaaatgtcatataatatttctcatacttattctgatttctgacaatccaatgtatttgaagcatggggtttctttttttagggaattgtttgcaccaccttacatcatgcatttcaaaaattggtttgatatggcaaaaaacggattttaaatgatattattgtttatatatgatttgcagataatattttgttctagaatcggtagtgctgtgacatgtgaatcggacaagtttttattttgtcacagatctctatttgaatcctgtgaagggctgcaaggaagcaagggacaaaactgtttctttgtcgaaaattaccttgtgcatacccaattatggtaatatagaatgcaaaggagaagctagaagtgataagaagagctcctttgactctgctgcaatttaa

SEQ ID NO: 184 - DNA, 21767 bp, Glycine max
  source 1..21767: mol_type = genomic DNA
gacatcccaaccttgccggtaaatatattagtggctatttttattgccgtttaaggcaaaatatataattgcattaaaatgtctgagtgtcatcattatatattgacgtgtggttaatataatgaatcagacttaaaagtccactaccgcaaggcctattgcatgtgaccctaggaatggcaaagagcatctaactttcctgccaagtgaaagtcaacctaacttgtatcataaattttctgatgccaaactgagagaggaactgtatagaaattaaccatgtactcccatatcaacatataccaaagcttatagtgttgcttgaaatctgtgtttctatgcaccatgtttgttcttggaccagttcaaatcaggtgtttatgtacagaaaagattcagtttccttttgataatgttttctaagcttttagctgttctaaataagtaagctttaaaggttattgtcaatggaatgcgccccaccatggaccgagcccgaggctaggggtgccctttcccactttgtttctcatatttggatatatgctttctaaggcttgtatagtattagagttattaggaagaaattggttacctctggtagcttttctgttaaatgctagttacaacttatcatcatttccatgctttgtctataaatttgacatcatgtactgtcaacagtgtgagatatcattttctaccgaatatcataaataaagaaagtgtttctttctcttattagtgtttcctgatatatatatatatatatatatatatatatatatatagtggagaatatagcgcctgcagctacattagccgtgttggacaagctcgaagtgaaacttgttggcattgatggtggggtgcgctttttattgtcataaaagtaaaaaaaaaataaatattttataacaaatacgttcctccgtgccaagtaacctatttttactaatagttacacttaatcgcgaaatatatttgtcacactcctataaactaaaatttgtatatttttattttttatgattgtatttgttagcaaattataaaagtgactattaaaaataaaagaagaaaggataacgggaaaaaagaaagaaagaaaaaataaaaacaaatttcgccatgtgaaacttttaacacatatttttatttaggtgtgatcacacatatgttatcatatatctaaaaagaatatatatatatatatatatatatatatatatatatatatatatatatatatatatatatataaaaataatataatataatttatagtgtgattaaaaatataaaaaataaaaaatattgacaaggtgtttaaaataaaaattgattcatattacattactcttattcttatcaaatcaaaggaatagttaaaaactaactaaggaatagttaaaaactaactaaagccagttcacctcaacttgaaatgaaataaattattattttttttttcttcaccctttggaaccttggatcaatcgttggacacttaacctaaccttttcgttccaccgagtcacatgaagaaaaatatgacaaaccaatcttgtccaacacagctatttcatttttactctcgcaagatgcatagaagtttgctttggcactgtacacctcgtctactctagcaaacaaacaaacccgacgtatacttctgaaactcacttgactacttcacattcacactcactgttctgcgttgcgtcctacgtagtaaccaggaccatgaattccaacattgattcaacagaccatagccaggatcaaagcagaaaacgaaacctacccgatgctgatgattctccggcgccgaatttccacattgattcatcagaccataaccaggaccaaagtaaaaaacgaaagcaacccaatgatgaagattctccatcgcttgaatcgccttgttccaacatgaaccccagaaggtgcctttttttccctctgtttttttgggtagacacttcatgaattttgcatcttcttcatttttttatttaagaaaagccattttatttgtttgccccttcttttcgagttttgcatttggtgcgggtaatgttgcaatatgcatgcatgcccccatttacgcttttcgtgttttaggcataagggttttggaaataataatgataaagattgcatttttcttattttctagatcctttctcttcgagtttgataataaagattgcgtttttttttgttattttcttgctcctttctgttcgagtttgatcataaagattgcgttttttttgtcattttcttgatccttcctcttcgagtttgatcataaagattgtggttttgctattttcttgaccgagtttgacagagggaaaattttgtttcttttatcaatcatgcgttttgggttttccctataggtatcagatagaggtgtatgaagttgcaaggagaaggaacactatagctgtgttggatacagggtcaggtaagaccctgattgctgtaatgcttatgaaagaggttggtcaagccatcaagactagtggtgtaaagaagctgattattttcttggctcccacagttcatcttgtcaatcaggcatgtcacacagttttttcttccctttctgcttttgcttcctgttagtttttttctcccacaaatgtggtattgaaagcttaaagctctcgaaacagagaaatctcggtatgggaattcaaaacctctattattcaataacaaaactgtggctttatgccagccttacaaaactcgaataaaatcaaaagataacaaccacgttcacattacctaaagacatgataaatctcattaggaatagaagttatgctaactcctaataactaggaatttattaacataacagcaactaacatggtcttaacgtgacaagtcttattggcttagaggtcctacatatcctcccttaaactgacctgcaaactgcagtcagtttatttctggtgccaagcagatctcttaatctcgagaataactacagcttcaagggcttagtcataatgtcagcaatttgatctttcgaaccacagtgcaccaactcaacaacacaatcttttgttaaatcataaagaaaataaaatcttatgtcaatgtgtttacttctaccatgtaaacaggattctttgaaagtttaataaatgagctatcgtcacaaaacaccacattgaactcacaaagtggcaccaacaatagacccacagtaaggctttttggttgcacatcttctcttcttcacagcttcttgagcaatatccttcttatgttgctttcggtactgtctatgttttatattattcctgattttgtatttattattagaatattctatttcctattaatcattaattgattgatcttgtaatcaatactgattcctttttccacattattagcatgaggtgtggtctacattaacacacaacattacacagtaaaatactgttatatggtatctagagcttaagttattcttgacagaggaataacgaaaattgtgttccaccagggtcagtaggtccctggtggatctctttgctaacatctctctttccggcaatttccccccttttcgccacaacattccttccgtgtgaacagtaatgcgcaaacggtgagtgcgcttacactgccactgcattgccatcagattgtccacatacaagctaactataagaaatcttcttcattgttctgtctttgtaaacaaagtgggctgacaaaaacatttttctaacatctccttggcaaaataggattcaatattattgtaccaaacttgaggagcttgcacatttattcttcacttgcagcaatatcctccctttatggtgggagacaatgtcctgggtaaatttatcaacagcaatgcctcaaaatcctaggtagggatcactacctgcagcatggacacggggttgctgaagggaaaaagtcgacaagatggaagtgttggtggattgccttaacatccacaatctggcagcacagaaataaaatagtcttccaaaatgctacttttgatggaagtaaattgatggatgatgcggtccttttaatctggacatggatcaaaaccatggagaaggactttgtaatgcatattaatcaatggtcatccaatctcaaggaagggtttaaaagttaggagggactgggtgtggatggattatgtaacatattagtgtgttttcagcttggtccagcttaaaggatggaaccctgctggatgcataattacccatatgtatccatagtaccactggtactatttcaatctataatatatctatttttgctgagcaaaaaaataaaataaaatatagggctttttgattcttctcatacccttaaggttgctcaataaacactgcctcattcaactcaccatgcagaaatgcacttgttacatcaggctggtacacagtccacctttgtgggctacaagggcaagaatcattctaatggtatcccgactagctactggagcaaacaccttggtgtaatctattccaaactggccacaagccgagctttatatttatcaacctcaccattgtcattcaacttgctcttaaatatcgatttcactcctattttggctccatctagtaatgctgctaattcccatgttccattcttctcaaaggctttgatttccaaatccataattatgagcatttggcagcttcttcgaatactgaagttaggggtggactctgatcaatccaaaccaaattgatgagaaaaatctgaattggttcaatttggattttaaaataccaaacccaaagacattggtttgggtgtttgaaacttgcagaacccgaactgaaccaaacaataacgattctgtgtgcaagttggatcaattgaaggaggtgagcttgtacactcatactattttatgagttggactgcaaaattgacaaccacagttaacttcttctgggtaggggtgatcaaattctcttttgggaggactcttgggtggaaagagggattaggttaaaagataagttcccggaattatacaatctctcatctcagaaatttcacacagtggcaacgatgggaaccttcagtgaatctgggtgggaatggagcttttcttggaggcgaaatctgtttgatagtgaaatgggaagagcttctgagtttattgatcaaactgctgcaattaggccttctacagctttaaaagattcttggttatggggagctgactcaaaaggaattttttccactaactctgcctaccttgatattaaagctgatcatcttaatgaagatcaatgtcttggtttccagcacttatggaacatcaaaatccctcctagagccctagtatttgcttggaggcttctatgggacagattgcccactaaggataatctacttaggaggaatgtcactattgataatgacctgtgccctttttgtcagaacaaagctgaatctgcctcccacatattcttcttgtgtcctaaagttatgcctctatggtgggaattcagctcatgggtaaaggaacctagagtgcttcattggagacctttggataatttcatccagcatttctctacggcaggtctgaaagacaccaacagaaagtggaaaatctggtggatagcagctacaacatcaatatggaatcttagaaatgacattatcttcaacaataagccttttgtcatctctaaattggtggataatacaattttcctctcttggtcctggatgagggggtgggaaaaggattttcatgttccttttcaccaatggtcctcagctatggtagtagcttttaagtaatgtttgtcttgttgggatgggttgtttggtttttgttgggtcggtagcttctgtttattgcggtttgtttcaggaggctctacctcctgtggtctgttatagtacctctggtactttgtatcttctatctttaaactaatatattatatttttggccgttaaaaaaaaaaagttaacttcttcaacagtagtactccaattgcacttgtcatcttccatgatagttcgaccaatagcctggaaaaggtagtttttcacctttagatctttcagttcctgttccttgatagttttcctctgagcttttgtcggcttaatcccatatgctatcatgagaattcctgtctccaccaaatgctaatactccttagattgaagaagattctacatgagcatagcccaatgttcataatggccatcaaacttaggtatggcttgttgcacaaaattgcttcctttcgctgccaactcaccctcccctattttgttcaccaaatgtttctctcacacattaggggactgcagttcctaacttacaccaccaagccccttttgtggagctctaatgccaatttgttgaaagcttaaaacagagaaatcttagtatgggagttcaaaagctctattattcaatagcaaaactgtggctttatgccagccttacaaaacaggaataaaatcaaaatataacatccatgtttacattacctgaagatgtggtaagtaaatctgacaaggatagaagctaaatggagatataagattagggagggggaagaggccgcgggttcgaatcccccaactgacatttctaacaaaaactaacacactaacatttgccgattaataaaaaaaaggaatggaagctaaactaactacttaaaactaggactatattaacataacaacagctaacatgatattaatatggtaagtcttattgatttagaggtccaacatgtggctgatgagatgttgtactcttccttcataacaaagtgcatggtttattcagtcacaggttaaacttatttggtgtttgtgtccactttgcagcaattcaagaatataaaatttctgactgattttcaagttgaggaatactatggggctaaaggagttgatacatggactttgaagacgtgggagaaggagattagtaacaatgatgtatgtttatttattaacctgctaattgattgtcacaaagatactttaggcttactttgtttcggtgaattttactttcattgatttgtgcagcattgttctgggcccaatggcatttaccttaagatctcttatagtagtcttgttaaagttaatttattgtataactatatagcttacatgttttcattcattaatcatgggacacaagatattacataattaagaacttgtggtattttctttgccactatcttggtccatgtccctccatctttgctcaacgttgattgattatatggtaccattctgtggttgtcatgtgtttatgatgctcttactggtttttgattctccatttttattttatgtgagatattagcttgaaaagtgtataattaatttaactagtgaattttttaattgttctgaattcctagccttgaataatagttaattagttatgtcaacagcattgttgtggtgaaatattattcaaactcttgtttgattagtttgtaataacacaatgaatcaacaagtattcattttaaacaagacagtgtattgttaatttcattcttaaatttttggggtttacttagtgttttgtaaaacaaagaatattctatagaacttagtcttaaagcatttatggtgtttagatttgaagctcagaatttctggcacttgcaatgattcttaataatgaatttgtaccatttaaaacaactctgttttttggggaaattgttgttatttgataaaataaataggatgtattaaaggaaaaaaaatcaatgtggagagcattcgaactgctcccgtgtgttgaatatttctgctttattattatatttaaattcttttatcacaactataagtattaacaagcatcactaagttgttttcacttttgatgattatcatttatggttctaagtgaattttcaaatagccttttgtgtgaacctcaagtctcaattatgctgataaactcatgaatacccttgacttagatctatggttgctattaatatctttctgtcttttaggttctggttatgacaccccagattcttttggatgcgttaagaaaagcattcctgcgtatggaaatgatatgcttgattgttattgatgaatgtcatagaacaattggcaatcatccttatacaaaaataatgaaggtgaggctacaaaatattatcctttttttccttgtaggtcatgcatgatttctctatcttcttgtcaattaaaatttttggggttagagaatagatttacaaatagctattgtcttatgccaatgaaggaattttatcaccaagctaatgaaaagccaaagatttttgggatgacagcatcacctgttggtaaaaaaggtaattgtttatgtgccaactttgacagcatcaccggttgaaaaaggctttccttgtaatttgtgactatccaatttattccccaatcctcatatagagggttcttctttgtttatttattttgtagttagttttgcttcttcattctcattttaaaaaaaaatccttgtgattcatcaatacaacatccattgtaaatttgaatgtcttatttctttcactaaaaagagtaaatgaaaaacacacttaagaagacaaatcagtgaagatgactatgactacctacagtaagaaagaaacaaaaacactaaattagaagtagaacaatcttctgaaactggtaaatagctagtacttgattcattttgttcaacttacttgtgccccggaagtgtattgttttcacatgttttattagagtgtgcccccatttttaaatttgtgacctgttaagtatcaccaaatttcttaccttccctgtcatatagtatacttttttcttaaattgtatgatgtatgtctgttttaaaagagtttggtcctatttatttcccctcgattaccttccccatgatggggaaaaatttgttttgtgatctgactgctaaaatctctgtatagttttttttttaattatttgatagaatgaaagggccttttagggtaaaaatctactcaatctgccttgcctttgtgctgcttccacttacacaaaaaatatatattttagattcaacattcttgtataagtcttccaacgtgattatagaaactgaaaaacattaataaaaaaagagaaaaatttaaaagtgtatttgtacttgttttacttgtatttgccacccaatttcaaaacaacaaatgcttataatatagggggcaaatgctcaaaattttgaaaattaggtggcaaaatgcatgacatattgaaagttgggtggcaaaatgtgcaaatttcatagtttggtgacaaaattcgcaaaaacgtgaaagatagtggcaaaaagtgcaattattcttgtaacataaaaaataaataaaaaataattttattttaggaaaaatactatagtaaaatgtttaaattttttcgggttaaatttaattttttaattagtataaaacctttaacacatttttatactctatttctttaacttctatctttcctatttatttttctcttatttctttccattctatttcatttctaatctatatagagcaaaaaagcccttccaagggacagctatggttttaatcaatatgttttgtgcgaaagatgaaagttttagccattgctgcaatttgcaatttaaaaaatatggatatgcaatttatctctgcttcaaatacaaccatcaagttaactttcttttcatataaaataaaagctctccagcaagcgtatttatctagttattttaaattagaatttgatgtatttatgccatgatttgctgtgccctgcctcctgatgaagctcttcactgtgcatttttttaatgattgcttttttcttaaggaattattattttgtgatgttcatattacgacaatcacttggagtccatattgtgaatataaagacttgctataatatgtaatttatgtattatatcctgaatcaggtgtttcctctactatggattgtgaggatcagatatcagaacttgaaagcatcttggattctcaggtaattaatctcttgactttgatttgaactaatttttccacgagtgcacttgtgatagtatgtttataccaataaaaggtaaatgcttttttttgtttttttctgtagagatatactgttgaagatcggacagagatggataggtgtgtcccatctgctaaagagagttgtagatattatgaccaagcacgattttctgctttgagtttgaaaccaaagattgaagccttgtcgttcaaggtatctgtgggtcatcttgctatgtacaaaatacactgcttttctgccccgtactcgttatttcttacagcaaaagatactgactgaatttaatctgtttggacagtttgatgcattgttatcagaaaatcaaagtaactataaggatgtggaaaataaatttaagacactttctcagcggatgtccaatgaacttgcaaaaattttacattgccttgaagatcttgggatcctatgtgcttatgaggtatttatcaaactttcattgcggggaaaaagttgtgcgatacagaaaaagaaagggaagcttttgtttaatggaattttaaagctgacataatttctgatgtttttaacaagggtttactgctgccagtaaattattaatgttttgtaattaaggaagagtcactgaagtctctatttttgaattggggatatattttgttaaccaatccattgcttcttataaatcagatgaaaaatatcaactctcacccacttaaagttttttgctttgaggtggggtagaaagtcttcctgatatgtaaaaatatcaccatatagtcgcattgaatttacacatttatatacatacaccaataaggggttattgctgatggtaaattattaatggtttgtaattaagcaagactaattaaagtttctctgtttttgaattgggtttatattttgttaacaaatcaatttcttcttattaaatcaaattaaagatatcaactctcaattaacccacttaaagttttggctccgaggtttctttcttttaccttcactgattatgtgtagcaagcaaatcttaatgatatgtaaaaatatcaccatatattagaataaaatgtacatatttatacacatacatcagtatgtacatgtagaaattgacaagccaccagatttttttaatcataggcttatcttttgttcctgacacacacacattataacatgtctagctttacgcaggctgttaaaatctgtcatgagaatttttccaaatctgaaggagagtgtgaaatttacagaaaaggttatcttcaatgtataacttttcttgaagaagtaatcaaattaatcgaagaatccctccatcttggtatgatttttttatagtatcttcccccctccccctatttgggctattgatgtttttgaatctttatgcatttttgagaattgaaattgcaagtatctatatctaattcaggcaatctggaatatttttattagtttatctgctactagtatattttaagaaattctttcgaactctatttgtcataatatgtggcaagattttatgctgatgctatagtatgtagcaatattttatgtcaacaacaattttttattcatgtttctttggttttagaatagttagtttcctctttgaaagggccccatttgcagactttccattggtgcattctgcttttgacatcacaagcaatctgttgcaaagccaaaatgctgtggataaatggatcttcctttgttggtttcatattcagttcataattagccaaaaaattacagtagcatgtccttttagacagcttttggagaaatgacacatgctaaatgcttatgaggctatggtaatttgttcattcattgcactttgccttaatctttgctaactaattaactattattgctgcagctgataaaaagattttggaggttgattttaattattctcaggcagaagatttgggatacatatctcccaaattaattgaacttattaaactctttcagtcatttgggtatggagctatgatctgccgttctggtcatataaatagtttttctatgcaataaagttgtattacatatcatggtaaattggtaatctatcattctttgtctttatagagaatctagtcaggtgttgtgccttatttttgttgatagaatcattaccgcaaaggtgatccaaagattcgcaaagacagttcccaatatttctcatttcacagtttcctatttaactggtaacaatacatcggttgatgctctggctcctaagaggcagaaggagatattggattctttccgctctggaaaggtattttgtttattgcatcatgtgaaacaaatgatgtacaataaatttgtcctaaatgttggtgttgaaaatctaataatagattattaattctttttttaggtcaatctattatttactactgatgtacttgaggaaggaattcatgtgccaaactgctcatgtgtgatacgttttgacctcccaaagacagttcgtagttatgtccaatctcgtggaagatctaggcaggcaaactcccaatttgttgtgatgttggagaggcaagtattctgattttcacaatctgtttgatgttggagatttcttctcccctgaacactcttagtacttatttaaggattgtgcagtccagattttgaaagaataatatgcaagctgggaatggaaaacatctgttctccagcttgagggggagtgttggaaatatgagcatttaatgtttatttcctttccaagtagcttagttaatatttagctgagttcaatgtatcttggaaagttgtgatattttacttgttctcttgaaaatagctttagttatttattatctatgtaatcattctgattataaatagatcaatctgctgggtggaaggataaccgaaaagcatattaagaaaatagtctttgtttctctcttttcacacttaattatcaacattaacccttgtatctacaggggaaacttgaagcaaagagatcaactctttgatatcattaggagtgagcggtccatgactgatgcatctatttataaagaacatgaatctagtttaagggcatgtatggtggggaaaacaaatgcatactatgtggaatccactggagcatctttcactttagattctagtgttagtctcatccaccgatactgtggaacactccctcgagataagtaagattatatcctgttgtccttgtatgctttttaactatttgaaattgaaacatagtctttacatacttctgcatgcaatttggattaggtactcctgtgtaaagcccaattttgagtttctgtctgtggaagggggttatcagtgtaaattaatattaccatctaattcagctttccaaacaataattggtccttctggaaaagatatgcgtttggcaaagcatcttgcatgtttcgaagcttgtaagaagctgcatcaaatgggtgccttaaatgaacatttggttccattaattgaagattcttcagaagatgaccatattgtgaaaaataaagaatcaagttctggtgcaggtataatttatctgctaattatttttcatttattttttttatcattgtctgtaaattgtggggaaatattttgcttaatttgaaattttcattaacacctcagacttcccaaacaatggctgtgcatatttcaaatatcatttgcaatttttttaatacaatttttatcccttttaactacatgcagcactgcacaaattgatttaataataaatacttacaaaacatcacccccgtgtattttgtttgcaaacaaccactacgaacttctgaatctgtgttgcaaaatttgcataattgattttttaaattcatacaaaaaccatttgtctgccgatgtgtgtttggattagctgtgagcaaaagattatccattagttgattatatgtatgatttatttttttcaaatcaattattataagattagtttcatgtttagaagatgtatgtactgaaaagtgatttcatggtaatatgtttatttggattgtatgaaataatttaaagaattgttttttggtggcaaaaaagtatttctctgccctagttgtgaaataagcaagaatcaataataaagcttcaattttatggggaaaaaattgtttttaccctaaggcatcaaccttttcaaaacagtgtttatgatgataaaagtctattatatggtagtttttcatttgtacttctatttttgtaattaatttttttttccttctaattattcaatatttttcaatgttagaaatacaataaattaaatagatactattggtcaaatgcaagcatgtgatgaattatttccatttattaggtataaggtaaactattgtgagtttatcaaccctcaacaagattacataaactcatgagtttgacaatttatgatgttatgttaggtttggatatttggtatttttaatattattttggtataaggtaatgattttattgaccctccacaagtttacacatgctcccaagtttgacaaccatggactgaatgagtatgcatgcagatttgaaatgtttaagcttcatgggacctatgtcagaatgtgtcggatgttgcattgttccttttatataggaatctactgaatgtttgtttgcattgaaatgcatgttgattttgctttgcttttgacatttgaagggaccacaaaaagaaaggagttacatggaaaagctaacattcatgcattaagtggtgcatggggagacaaactcactagagtcaaatttaatgcgtataaatttgaattcacatgtaatattgtaagtgaaatatactctgggtttgctcttttgattgagtcagagcttgatgaggatgtgggaaatgtaaatttagatctttatttagtctcaaagattgtgaaagcttccgtctcttcatgtgggcaagttgatttggatgctgaacaggtataaaaataaggattgatccaaagtagtatataggactaatctcattttgttttgaaagttaacttgatgctttgttctctactagatgatgagagcaaaatgcttccatgagctttttttcaatggtttgtttgggagactggtcttgaagtccaaatcagcaggagaaagggaatttttacttcagaaagacacaaactcattgtggagcccaaaacacttgtatttgcttctaccactagagaaattgaatgatatctgtgagggatctttgcaaattaattggtgtggaattaattcttgtgcttctgctatcaaatttttaaggaggaaattttctttggtcactggagattgtgatgataacggcacaatcacatcacctcatgataccagttcatcagagatggaatgtgtaggagcaaacaagattcactttgctaattgtgtggttgatgctgataatataaaagacagggtagttttggccattcacactgggaaaatatattgtattattgagatcgacagtaacctatctgctgaaagtcctttctatggaaacaatgaaaaatcaaaggaaagcattaccttctcggattatttcagcaaaaggtgcataaattgttttatcccgcctcatgctttttcttgcccaatcaacttaaaattttgatatactttactaaacaacttaaaattttgatcagttatggaatttcactgagacatcctggacagcctatgttacggttgaagcaaagtcataatccacacaatcttcttttcaacttctatgaggaaggttagttgttcctaattgaagtttttatcttgtggctcttaaatgctgtttcaaatttctgtattatgattttaatgagatttcatataaaattaaaatttaccatctcagttgaagttgtcttatggaatcacatttgacaccctgatgatttgaaaaaatgatagcagatatgaccttctctattactttctgtcttgatagaatttatgtgaatcctgcatgcaccatcactttgattatgatattttctttgagttgagcagatgcacgagacaagtcatcaaaaattggccctgcagcctcaaaattgccagtgcatgttcatattcctcccgagcttctatacattcttgatgttaaaagagatgtgttgaaatcactgtacttgctgccatctctgatgtaccgcattgaatctttgatgttatctagtcagcttagagaagagatagatggtcaaactagcaagttcaacatacgtagctcactggtttgttctatatacgattttgaataaaatactcattgattgttgatgtctattttcattatgataatcttatgcgttttttttttctttttgtatatgatagattctagaatcacttacaactttgagatgtagtgaaagtttttcaatggaacgtcttgagttgctaggagattctgttttgaagtatgtggtgagttgtcacctctttcttaaatatcctaaaaaacacgaaggacaattatctgccagacgatcatcggctgtttgtaactcaaccctacataaactggggacagatcgcaaattacaggtattcattactgtttttgtttttttggtagcaaaacaaattctgatgactcgggagacaatcaaactcttaaccaaatgatgaaaactttgataccatttaaaaaaccattggatgattcatcaggtttagctgctggaatagttattttctaacaaatacaattccacgccatgcatttattcatggcatgaatgttatttgtctactattatggatgtcagtatcaatattgaaaactataatttacgttaggcaagtccgggaaattattattttcattgttttcaacagattaaaatttgcatatagaaaaattataaaagtcctttcagttcccggaccatcctgcttttgtaattcccacctttatttttgtgttttttttataatttatcattatgggatttttaatagtgggcaagcattggaatgaattaatcacatgtttttttgtcatgttatccgttagggatatattcgagactctgcttttgaaccacgccgttgggttgctccaggacagcgttctatacaccttgtttgttgtgattgtgggttggaaacccttgaagtgcctttagatgcaaaattccatactgaagatccaaaagttgtggttgggaagttttgcgacagaggtcactgctggatgtgttctaagactattgctgactgtgttgaagctctgataggagcatactatgtagatggtggactttttgcttcacttaatgtgatgaaatggcttgggattggtgctgaacttgaactatcattggttgatgaagcaatcactgctgcatctctgcgtacatgtttgccaaaagaaagtgagattgcaagccttgaaaagaaaattgggtatgaattttcggtcaagggactcttactggaggcaatcacacatttgtctgagaaagaacttgggattggctgctgttatgaggtagttgcgaagtttcatatattctttaagtaattgatatttaacttgtaaaagtttcttaatatgatacacatataatacgacttattgaatttatggcagaggcttgaatttctaggtgactcggtattggacctgcttatcacatggcatctttatcagagtcacacagatattgatccaggggtgttgactgacttacgttctgcttctgtcaataatgacaattttgctcaagttgctgttagacataaccttcaccagcaccttctacatagctcaggattattactgagccagatatcagaatatgtgaaggtcatttctgaatcagatcccagatcacttccaagtattagtgctcccaaggttagttttgttgatcattctggttaattttttattatatagagttacttatacatttgtaattacttatttgaatttctgttgcattatgttttgaattggaattgattagatttagaaaccaattacaatgcttgaaactcgttacaacatatttaccaaatctttttgttaactatattattcagtgtattaggttgcagcatgtatacccacatatatacgacaaaaatgatatctaaaagataaaccaatctaaaaggtaaagtataaaccaatcttatctaaaaggtaaaagataaactgcttctctaattacaatcaacaatatgatttgccttgatttgcaaattgttttccacgttagcaacaccaaacaaagatgagtgaaattcattttatttcaatgactttactttattacccatacttagatggatcaaatgggtaaactaataaaggcaaaattgttaatcgattatttaaaattaggattagaaacaaatcaaatttacacaaatgtgaccaaatttgattggttttctacatgcacacaacacaaatcaaggggatttacaaaatcaaagcaagtcctattttataacttcccaaataaagattagcatttataaatagagacaattcctgaagtatgtggctccaaacatatacctggcacttcttttaagttgtaacattgttatttttgttataaatgtcacaggcacttggagatgtagtggaaagtatagttggggctatactaattgataccaagctcagtcttgaccaagtgtggaacgttttctattctctattatctcccattgttactcctgataaacttgaattgcctccatttcgtgaattaaatgaattatgtgattcgctcggttattttgtaaaagtaaaagaaaattgtgaaaaagtgggatcagcaatgcatgttgaggttagtgtacaacttccaaatgccctattggttcgtgaaggaaagggggcaaataaaaaaactgcaaaaggagaagctgctttttatttgttgaaggatcttgaggtttgttctttaatgattgtgttctggagttttcttttccctttttgttagttttaaggtcttctaaaatctgcccatattatcttaatctgagtcggtcaatagtttatttagggagaatgtttattttgagaactcccacagacttctttcttttttatgaataagaagctagtagacgcttctagggaaaacattagtcaaaattattcctgataataaaacatgggtggttttatggtagataacaataatgctattaaatacttaggcaagctgtagaatatacacacctaaacatataaaatggagagatataagcttctcaatttgatcatgcttgaaatttcccaaaagaaaacataatggaccaagctaacaaaatgtataaaatatttcacccacctttctccctggttagtttcaaatttgtccttctccaagtgctgaactttttgtatagcctagcttctttaattggccccaagaaaggattccatactcgataacaaggtaagaataaatagctagcagtactgcctacttttgcgctaaacacaattacaaagcaaaccatcataaatttttctgacattatttgtcgtccagtccaccttacctgaaatgaaaaagatttttttggaatggatttaattttttgatatgagtgaagttgattagttattttaattttttctcatactactgctatccttattagtatatattttgatgaccacttggcagaagcagggaatttcacatggtagtttcatgtccaagggaaaaagagataatcctgaccatgtctatggttcatctcatctcaaaatggattctagtattctaattgaagaacattcctcagagccagcatcacataaaaggcacatattggatgaaactaacttaactgcaagtaagttgcctcccaaagactctttgtaattggtttctaaatcaaatagagcaagttgaagtgatgggtttgtttccattatctacaaatgaaaggattggtgcttagtggtctctctaccttgtcttctttttggcattttatacccttttattccctgctattttcaaatccaagggcaatgagttaatttattaactacctacatattaacttcattttggattcatgttacacagttaatttatcaattaatatgaagaagggaggaccgcggaccacattatatgaagtatgtaagaaattacagtggccagtgcctacatttgattcaacagaatataaagataggtgagtccatcaactaatttgtactttcaattgcttgagcaacttgaatctgaaaagtacttttgttatgtagtactacatgaaggatttgtgtgtgtaatatgtggagaacagaattgatccctaaactttagggattgaaatcagctaacataggaaacaatcaactagctagagaaactgaatgaaagagtatttcaaaatcaaacaatatagatcatactcaaaaccgtcatttctcatactcattcttacaatccaatgtatttgaagcatggggtttctttttttagggaatcgcttgcaccaccttacatcatgcatttcaaaaattggtttgatatggcaaaaaacagattttaaatgatattattgtttatatatgatgtgcagataagaatattttgttctagaattggtagtgctgtgacatgtgaatccgacaagtttttattttgtcacagatctctatttgaatcctgtgaggggctgcaaggaagcaagggacagaactgctttgtgtcgaaaattaccttgtgcatacccaattatggtaatatagaaagcaaaggagaagctagaagtgataagaagacctcctttgactctgctgcagttcaaatgcttcttgagctgcaaagactgggaaaagttgaaattgatcctctcccttctagttaggggaagagaaaggaaagaaaagggaagggaaggaaaagaaaagggagagaatataagagaagggatagtaccccaattttgtgcccccaaaaaacatgaactgttgttttgtgccattgatctggtaaattctctcagattaatggcagaggaccattagtttacagtatttttggggttgcaaatttgtggtactagtattgtgaccaagaagagaaaatgattggaaaaaaaaaggattgaaaaaaatgaggtggtgtttgagaagattcaagtgagaataaacagaagtccttttcctttcctttcctttcctttccccagggaaggaaaagaaaactcaaacagcaaaggttgatcaattttattcataaaacataaaattgcagaacatgactttgacgcaataatattgcatgtacatgaatgtagtagctgttcttagggcacttgtgcatgtatgtagtatcttgttcaatttttttccgtacataatttaagttgatttcatcttcatatacacgaagacacttttatcctgacttgtcaatcctcatctcactctggcacgcggtgatgtgcaagtgcaagcataaagttgcaccaaagtatctaagtctttcaataaagaatgttgggcgtgggccgggtgggtctttgaagtatgaatatggtaatttcatttattattgttatctattgtgttatttctt

SEQ ID NO: 185 - DNA, 6649 bp, Glycine max
  source 1..6649: mol_type = genomic DNA
ctccaaaactcagaggatagaagtttcctctgatcacaatcaactggttgctcttcacaaagtcttacctccacgtcatctaactcatctaccacagtccttatcccaaaggataaattcccataaacctccttatgccactccttgagcttaagcttctccttcaaaacaaagcacttccaactttggacctggatctaatcccaccaacttcacaaatcatagatgttccaaccaacaattataaaaatatagggccccgatccttcacacctaccttcagaaaagtgagcaatggttgttttattccttataaattatatttgttttatttttaattcttaaaataatttagataagactttgaatattgaaaaaaaaaattataaaaataaaattaaaacaaacataatttataacaattaaaaataaaaaaagtcataagaaaaaattaaaaggattaaataaatatttaagtctttttttaagtgtctttttttaagcgtcattttttatctaatgaatttgtcttgatattgctgtttttattaaattttacttgagtgtgtcaaatgtattgatggtaatagtacttttcatctatacatttataattttttttcttcttctcacttattctctcctactttctaactctctctctctctgtttttttagggttaattaagtttttagtcatcaaattatgaggattttaaattttttatccataaactattttttaaaatagttgattttaaataattttttgttattataaatagtccttaccgttaataatctttattaagtgataagttgtctatttaagtgaatataaatatcaccatagactccagatgagaaggatgaattgttaatctgtgtcgcaaatcttctcatgggtgattattgtacgtttatgtgtgtttagagcgttaggattcaataatcactatcctctcttccttttgcattttaataacataatattctaattatttatctaaatataataaaacttacatggtatgtatgtgatatatatacatgtgacatttaatctatcttgtttcatgacacttcatcacttaacaaaagacattaacgacaaagattatttttaataataacaaattattttgggatcaaattttttaaaaaaatatgttaggaacaaaaattcaaaagtccatagtttgaggactaacaacttaattttttttttttatgtaacagttactgtgcaaaaactaaaaagcttattgcacgggcacactcctctgcctctcacttttattttacagcattcattttttttttcatttatcacttttttcataaaaattgaattgtctaaactaatctagtaataataataaatgccaaagaaaaaaaagagtgtatgtaatacaaaagagcgtgtcagagaatgttctagaacttacgatgtattcaatttaagattcctcaaggtgggccattttttgagtctgttcgtttttctctatctctgttccttaaaagcaaactcatacttcacgttcttctgtttcaactctcaattaacaaacccaaaacatgtttctcctttgatcttgttcttctctagtacgcctcatgcagttccacaactacgtggttagcaacatttttcttcttttttctcgggttccttaagttttaataccaatgtaacaatgtagtttccgtaaccttgtagttttgaggcatcttccgttcattcttctacgacttgggttctttagttttaattccaatggaacagtgtagttctcgttacgtagtacttttgtctgcctcagtttttaaaacacaaaaatgaagttttagttttactgcagcatttcattgtgtaattaattccttaatttacttgttttctcactctctgatacattgatagtgctacgaacataggaaacttgtttgtggagtcgagagttcttacttatctgctaagtcatggtatgtttcatgtcgttccctctctaaatttaccattactcattctatatcatacccatacaaaaaactttattttagctcaaggttaaagcttcagcgactaatttgtttcactgccattaagcttgaatatttgaacacctgcggtttagatttgttgattacaagtttggtagttagaaatagaatattgattaagctttgaaaactcattcctttgttgagtttttttttgttgtaaaattatgtagggttcagaaggtgatgatagctctcccagtgactatgattggaacactgatgatgagcttgaggtgtttggaatacctccctcggatccaaccatttctagtcaagagagctgtgaagatagtgtgggggtaaatcctgcattcagttacttcacaatgattttgctaagtttgagactttcatctctctgaagttcctaggatatacctacaatgatataatgatatagaaggacctaagaggggattttgtgttgctcttgtccctcgtgtattcacttgtccggtggttaaattcacacataatgtgtctaaccctttgtttgtttgcaaaaatgatttgtggacactaagaagctatgtgacacctaataagagaaagagagaaatgtaagtatgataataagaagagatagataaaaaaaaatgataaaatgttatatatcgaggtatttggactagagaggtgttcaccaatcattacttgtttgtttgagaggaaagagaaaattttgaaatttgaattgaagaaaaaattgaattttatctttaaaggtcaatttttctcttcaaacaaattaaagaaaatgtatagttatctgtgttggtgcaaatttgttttttgtatttctttttataatgttgaagtattctgtgttctgtttaggagagtagtgcaagttgctcgagcgctaaacattccaagctgattcatctcttcgtgggaatgggattttccagagagacagtgatcaaagcaattgatgaaaatggttctttttcacgtttaatatattcaataactattacctgtttactacttctagtacttgtcttgaaatgataacattttgttttttgtccgtggtaggaagagataatgaggaggacattatggaagctctgctaacacttactgctgtgagtatactttaagtcaatcaacgggttttaaattatttcaattttttaagttattagttttcacttccaggattcagtgcattatatatgttgattctgttgaagtagaacaaatgaattacaaggaataacgaattgactttacagggaagaatctgaagttctagagtgtatcatggattcatggtaggaaaattataagagtaggaatgtagctcatgtcattggattaccaacttaccacaattgcattaccagatgaagtctaaaactctaaatttaatataaggttctccattacttgtatttgatctttaattttctgatacaaggttgattaaacaattttggtacatctaatagtaagttcacatgtcatttctagttagtgggtaacatatatctatattgtgaaagtatagaagtttgcagcagctggtggatatattataggtcgtggttgattaggtatatatatgaagcatttagaacagtaggctttgttttacaaactggcacgtgaatagaaactagaaactagagagatgttctttgcagatacatacttaatctggatggcctggtttgttatgctgacattgtgtatatgggttccatttaactggttccttttatgcaggaaaaacccttaacagtagagaaagatgaggcattgtccgtacttgtcaatatgggatacccttttgaggaggctttgacagctatagacaaatgtggtgcgtatactttactatataattgttactcatatatgttattaacactttttatgtttcttatttctttttcttccgttttttcccactatcagcagcattaaatgatctcagatggataattaaatcctgaaaaatgagctaacaaacctttagttttaaaactttgagcttaaatttctcagtttgcattttaacacatttccttattaaagtgataatttcaacataggatagatgaggtcaaattatagtgataatttcaacataggatagatgaggtcaaattatgaacatctctttggtttgaatacaatgcaaataattagtcacgaaaccaaatgagttttactaacctaacatgcaatgcaaggatagggctcctactttccatgtagcatgtagaaatttgtctagtggtagttctttaatattttggtttctcgtttggcaggtcctaaggcccatatcagtgagctagcggatttcattagtgcttctcagttagaaaagggtcttcactcaccgcaagagtcacctaacaataaacatgatgcatctgattatacgcatgaaaaggtgtggtttacagtcctatcaaattagttttattaagtcttcttctaattaaaatgtcagtaaatcaagtacttttctcaaaattatgttatatcttcagccctgtcaaccaagtggtgaatattatcttcatacaagtaagaaagtaaaacttggattgggtatatttaatgaagccagtcaagtgatttcaagaaagttcccaagagaagtagcaaataaaccatacttctattttgaaaacgtggctcttgctcctaaaggagtttggaaaactatatcacgttttctttatgagattgaaccagaatatgttgattccaaatacttttgtgctgcaacaagaaaaagaggatatatccataatcttcccacccacaaccgctcccccctgcttcctatcccaccactaactatccaagaggcttttcctacaactaaaaaatggtggccttcatgggatagaagaacaaagctcaattgccttctaactagagtagcccctggcccagttacagagagaataaggaaactccttgagaaatttggtgatgaacctcctctacatgtccaagaaaatgtacttgtagagattagaaagtggaacttggtgtgggttggaaaaaacaaattggcacctcttgaacctgatgaatatgagatgttgctgggattcccaagggatcacaccagaggtggtggagtcacccggacagagagatacaagtcacttggaaatgcatttcaggtatgctattgaatcttacactatatgtactttttaagagtttttacagtgatgatatgataactaaatgaaaaaaaaaatcaaacttctttctattgtaggacaagtcgacaacttgtagttaaatgataattttaaaaggttctaatcaaacttaggcttctttttgtattttaactcttaaagatgtatttcatttgtccctaattataagattttttccattaattcacgtcctttaattaaagtagttaatttagttaatcatattaaatctatcaattatttatactatcatatcaaaattacccttttcttatctatgtattcatttaattgtttttcattaatgtttggagaaagaataattaagtaagaatatataggaaaaaaataattaatacatctaaaaatttaaaaaaaaagtcttataaaaagaaacaaataaatttctgaaaaagtatttgagtaaacaacttatttactatgctgttatcttataaggactaatgccataaacatcaaactttttttttgacaggagaccatcaaacttactgaaatatgctaaaaagaacatattttgataaaaagcttgagttgtgatactcgtacaacattttatagaacattttttgtgtctctctctctttgtgatacatgtatgagttgttgtatgagtatcatttctcaaaaagcttatagtagtcttaagttcaaataagatttccataagttctttcaaacaccctcttggcttcctttgaaaaagctctttgactgaatgtaaatggaattgatttcaggttaatacagttgcctaccacctttcagtgttgaagggtcgttttccaaatggcatcaatgtcctgtctcttttttctggcatcggaggtgccgaggttgctctgcatcgacttgggatgatgcttaaaaatgtggtatctgtggaaatagctgaggtgaacagaaacatcattcgcagttggtgggaacagactaaccagaggggaaacttaattgaggttgaagatgtacagaaagtctcttcaaatgagctgagccagtggataaccaagtttggtggatttgacctcatcattggaggcagcccctgcaacaacatttctggcagtaatagagttagtagacatggactagagggagagcaatcttcactattttacgaatattttaggattgttgaggcagtaatggaaatacagagagatgagcttctgtgaaacaaaaaaaagtacatcagtggattttgttaattcccatttttgtatggaacaactaaaaattatgtacacataataggaggaggagaatccaatagatccaagaaatgtaacaaaacatttgtaatttcgaatttatcttatattggtaatgtttttatgttctttttgtcacac

SEQ ID NO: 186 - DNA, 6649 bp, Glycine max; identical to SEQ ID NO: 185
  source 1..6649: mol_type = genomic DNA

SEQ ID NO: 187 - DNA, 7892 bp, Glycine max
  source 1..7892: mol_type = genomic DNA
aatctcttaccaaatggactcaaatgatcaagtcccacaatcacaaaattcccttcacccaaaatattttgactcaagaaccttattccaaaggtcaccattattgttaaataaatactatttatattttgccaaaagagtaaaattgaaaaacaatatatctttaacccttaacccctcccccataagcctttggagaacatattttttccaactcacccaagatacattctccctcccatcctcacacttcacaaaaatcttttttgtaatgtgttgaactattgacaagtatatcaatttgcacaagtagtaattaaaacggtaagtccaagtatcgtgtccacagataatttgttttacttagatgtcgtatattcagtgtgtaaacattttcaactttggtaataaaaatagagagacccattcattgtttgattttctttgattaattcttctaaacttaaacaaatgacaaattaaacacaaagatgtagaacgaaataaatatcaaaataaaagcgtcggggagtattctattgaacttcctcttgtcgtactaataaatttttctctatttaacattactctagcattcttgcaccatcgatttactcagaccatgattcattacatgaaagagcctaactctcttagtttgtgttcttgattcctcaacaaactcattctaatggagttgtactacgcacaagatgcaaaatatattagattactgcactctattcttagatatacagacctctagctgctctaccaagttctaaggattctaagcattttccaacacccaaaacctaaccaagcatacaaatggatgattaaaccacaagtatgtacaataaacacagatagaagcaaagaacactaaaaataatattaaataaatagttagaagttttacattaagaatgttcagtagagaaactccccaacaatgaagtttctagccctccagtaacaaggagagctcaatacaaggagaaaacaatgtttgaatgaaagaaaatggtgaaagtatgaaaaaaatgtcttctctttagctctggtgtcgtcttccttctatctcaagtcgtcactccctccaacttcctctcttctcagtgttcttaaagacttttgggcttctcagcatacgaaggcgcgttcagttgtctatttttttaaaataaaataaaaataataacaatttttaaccgtcattatattaaattaattattttaaaatttaaaatataagcaaagttaaattttattaacaaaaaagtaataaaatgaaacatttgagagtaaaaactatttttttaaaacttaatatacgaaaagtaaataataaaaatttaaaagaacaatttaaacaaatttttaatgataaagaattatttatttattttatatttaaaaaccatttaaacataattttgtaaaataaaattaatgttatattaaccctaattcactttgtagagtatgatttctacatttctttccatttcttttccttactcctcccgaaaacaaaaccagctctagagctggtgttgcaatcaaacggttcagatcaaaacacgtggactgatttgtgagaaactttgtccctgattaacgtgtccccagcgggagtggaacacagaaattttcacagaaaaaactgcgcgagtatggaaagtttttccatgcttgtgttgttgcattgtccctgaatttgtacttgattctgggacgtcactcagtctgagtctgtttctgcaaatttcaaaaccctctctctcgttactcgccatcactagcgagtgctccttcttcctcttcgcgaaattcgtatgcgaagaagggttgtgttctctctctttgccgtttttgtttgtttaattttgtgtagttttacgaggttgaatttgagctgacgtgcattttttttgagttttgtgcagaggtagggattcgcgctcctgctttctcagactggtagggattctaatcgtggtttgtgaatctctgtgttgtttgaatttgtaatcggtgttgaattcgtttgtttagggtttggcatgattttaggcttgtgtgtttgattagcttagttttgtgtgatgctaatactcttacttctgtgcttgggcagcctaattatcttttattctgcgaagtaactgagagattgaagatggtatgagcatattttggttctttacgagtcctcattcttagtttctttgggagaatatcttagtttctttttggcagggaggagatgattctggtttggagagtgacaattttgattggaacactgaagatgagcttgaaattcagaactataactcgtcgtcttcatgtttaacccttcctaatggagatgctgttactggctctggagaggtaagcttttagagactttttctttttctttatgttttgagtggttgaatattaagaattttgaggatatattaccagaaagtttaagataatgcaaatacgttgtctttggcaactataaattttcttttgggattttggccttctctaattccgattgttgctggcgtacttgataaccaactaaccataatgaaccaaaatgataaactaaccttgcaggtcaatgcagaaagaaaaaaaacttccggattgaaaccatacaaaactatttttcatgtataatgtctattttactgtttagattttgtggaattcatacatgtattaatttttagctactaatgtcctattctctcccccttcaggcaagctcgtctgcagttttggctaattccaaggtgcttgatcacttcgtcagcatgggattttctagagaaatggtttctaaagtaattcaggaatatggtaaagcatttctttattctatttaaatatagatttgattcataaagttcacaaataaatattgctctgatgaatatccaggtgaggaaaatgaagataaactacttgaagaacttctcacatacaaggtgagttaatgttttcataagtcttgagcattgttgtgacctttgtctctttgagctattattgaattataatgaatttctcttccgtagttgtcttgcctcatgttttcgaaattaataaagagtttcatttccatattgtgaagttgttagcatcttacaatctacacaatgaattgtgaatcttgttggttttcattggtagttaatttttttgggccatcctgtctaatctggagagggtgagccttgtagcaagggtaaggttgctatcttgtgacttggaagccacaagttcaaattttgaaaacagtctctccacgtgcaagggtaaggttgcatacatctacacatagcagtcaataatgcactatagcggattggtggaactgagtggccatggactgctatgggattcaaatagcataatggtttttatcagtggccaaaatagtggcttttcatgtgctatggcactatagcggcgctaccatgatatatccttcaaaaacccatttttacccctggaactctgttgtttggggtatttttaggtaaaatattccacaaaaagttacctctgttttgacctttgatccttcacactttatacgactgttttttcacgtgttcttttcttcttttagactgcccatatcacatttttctaatttttatctaatttgctatacacttttctatttttgtcatcatcttttttttatatatatatatttcccgacaatgttcttaattctcttagattgtgtgtgtaatttgtgacttgttattcatcttgaattcctttaattttggtacctttcattttgattcttttgttctactgacatatttttagatttctttctgatatctttaatataccatttgcatattataagtttttgactattatgttacaattgtcttgatatttttgttttcatatttgcaggctctagaaagttcttcccgtccacagcagcgaattgagccagatccttgttcttcagagaatgcagggagttcttgggatgatttctcagatactgatattttttctgatgatgaagtaatctcttctttttgtgctttgatgttttttttagactgtatgatctgattcatcttatatcttgttattatctgcctttagtgtcatctagtgggatggtttctgcttgtgctataggacatgcaatgtggcatgtaatcattttcaaacatgaaacagattaggatggtttgtgtttctttgttgggcatcttagggacttgtacaatttcattttcctacttcaaagaaaaatgaaatgtcatcatgcttccacttgcttttacaaacatttatgagaggtctggaattgcttgctaggaaacaataaaggggcatgttatatattataagaaacagcctgcttattttatttgatattttttgtaggaaattgcaaaaactatgtctgagaatgatgataccttacggtctttggtgaaaatggggtacaagcaggtggaggctttaattgccatagaaagattaggtgcgttttgtatgatccattcatatgtatggcttgagttgttagcttgttatttttgcaaaaatgatagaaatttattttattattgttgcttgttgtatgatactgattcattatcttcaattggttttgagcaccttgatttgtgtcccttgggcaattgagccattaaataaaaaaaaatattgctgctcgattatttttgtttcctaggtttaaggattgatattctatttactgtaagttgttggatattttatatgagctcttagcacaagttgttgtcacatttctaaaatgcatctctgaaagctttttctgggtgaacacttcatattcctaatgtttgatttagacatactaaactcttttacattggaatttgaatacttgtagtttcaaatgtgattatgagtgcttgaagaatgaagaacaaacattgtcatctaaacaccttgcattatataatatgctttagttaagtgtccagctttatgaagatttaatcatatagcctttttgaaaggtccaacactattagtttcatagagatcgggatcaactagtccagcaggaccatggttttgaagttattcttggaatctttttaatgaatcaatgctatccatcattttcatcactctcatttcacatggttatccaggatagtgtttcctcattctctgccacagtactaactttttgaatgtctcagtggattcctacctgctgaatgcatatcaatctgcattttatactattgtatactcaagataatggacagaacatatgtgcctagtagttttttcccttgcctgaagtgaagattacatgcttcaataatttccagagaagagacaaattcatttcagtttggaatcaccgttattgtggataatagatgatgaaaatcttctaatacgcaatcaccttatgaatatactgtaattacttctagcgaagaatgatttaattgctaacactataatcagggttgcatgccagatataatggctataaatcatcatatgagaatcagatcatgtattatataattatctctaaagaatgatatactgtttaacgcatttgtgaagcttgtataataaattaataggtcctaaattttggtgtttttccaaatatcaatttaaacaaattaacatggtcaactgcaataataacctcacacagtctcttgtttgtttgtgttcgcaagtttacatagtgtctgtttatgagctttttactctattttcttggctcattgttctaatgaaacactgcaggcccaaacgcctcacttgaagaattggtagattttataggtgttgctcaaatggcaaaggctgaagatgctcttctgcctcctcaagaaaaggtagcaatgtagccataatggtaatctttggatgaataaaatagaaatttaatgcatttaattttctgtaaatttttccttcaaattatctagcatcatccatttgttgctcccccttccccctttcatttatctgtcacatgtttaagttattttaatgttctttttacagttacaatacaatgactatgctaagtccaataaacgaagattatatgattatgaagtgctgggaaggaaaaagcctaggggatgtgagaagaaaatcctcaatgaagatgacgaggatgctgaagctcttcatcttccaaatccgatgattgggtttggtgtacctacagagtcaagcttcataacacacagaaggcttccagaagatgccattgggcctccttacttctattacgagaatgtagccttagcaccaaaaggtgtttggcaaacaatttcaagattcttgtatgatgttgaacctgagtttgtagattcgaagtttttctgtgctgcagccaggaaaaggggatatattcacaatctccccatccaaaataggttcccacttctaccacttccaccgcgcacaatacatgaggcttttcccctaacaaagaaatggtggccctcatgggatattaggaccaagcttaattgtttgcaaacatgtattggcagtgcaaaactaacagaaagaattaggaaagctgtagaaatctatgatgaagatccacctgaaagtgtacagaagtatgttcttcatcagtgtaggaaatggaatttggtttgggtgggaagaaataaggttgctccattagagcctgatgaagtagaaacgctgttgggcttcccaaggaaccacaccagaggaggtgggataagtaggactgacagatacaagtcacttggtaattcattccaggtatgataattccctctcttcctatataaataatgtagcctccatagagatccttccggatgtgtttactgtcataaagaaatgtgataccgcttggaactattcagtaatattttaatttttatgcatattcagatgaatcaagtagaggaagaccaagaataatagaaagaacctgttaaaaatgatttatatgtaaataacctcttacctccataaagaatattgatttttggcagaaccctatggcaacattcaatctatgttgtgagaccttagcaaaggctttggtttgttgtattaagaataatgctgtcaaagtgaaatcatatgcagtttcagcatgttttctcttctatgaaactagtggttaatgcattaatgttatcacgtaaatttctctttccttatttggttcagtttatttcaggttgacactgtggcataccacttgtcagttctgaaggagatgtatcctaatggtatcaatcttctttctctcttttctggaattggtggggcggaggtagctcttcatcggcttggcatccctctcaagaatgttgtgtctgttgaaaaatcggaagttaataggaatattgttagaagttggtgggagcaaacaaaccagaaaggtaatctatatgatatggatgatgtaagggagctagacggtgatcgcttggaacagctgatgagcacatttggtggttttgatctaattgttggtggcagtccatgtaataacctggctggtagcaacagggtcagccgggatggactggagggaaaagaatcttctctcttctttgattattttaggattctagacttggtaaaaaatatgtcggccaaatatcgatgatttttgtcccaagaagcctctttctccggttttgtatttaatccaaacaattaggatcttcgtatataaacctgaaacattagagacagatacttctcattccatttttgttgccaaagaaaggcaacgttttcaaataaaaaaattatcttaaaatttctgattccaggttactattttattaatacgt

SEQ ID NO: 188 - DNA, 7892 bp, Glycine max; identical to SEQ ID NO: 187
  source 1..7892: mol_type = genomic DNA

SEQ ID NO: 189 - DNA, 11232 bp, Glycine max
  source 1..11232: mol_type = genomic DNA
taaacaggtaaaaatatataacacgaatctatcacaaagtgatctaagatttcaatttagaatctcctattaaaaatattctccctcctaaaaagtcctctagtacaacattattctagtaaaattctattgtcatggctctatacaaacaagattttgagcaagcaaattgaatttctcaatatcagaagatattacttattgcctagtagtttatcacaaaaagatgcttgaggttcgctaaaaatgcaagcttcacattatttcaagtaatttgaacgactttctcaatgatggttgttgtcctgtcgaaagaaaacaatcactttcatacctataagatataaacatgttattaactatttttaattatgtaaattatattttgaatacatatataaatgattcaaattgcaatataaaactatttcaaactatcaacatttaaaaaaatgattaaaacttaatataaaataaaactaaaataaaaatattggattagataagcaaataaaaaaaatactcatataagaatataaaaaaaatagtttgtaatatttatgtaattatgtcataaaaagtttaacttattataaaaaagaccatataaaaagtacattttaaaatatttaattaaaaattaaattatgtattctaatttataatacaacaaataatttattttgtcctaatatattattttcttatttttaaatagtatttaaaataataaaattatacaaataatacttaaagtgttgaattttcatgactaaatatcatttttagtctattatgttttagtattattttattttaatacattaaattttaaaaaatttattttaatatttttttatttttcattaataatgtttaattctgtttgtttaacataataaaggttaaaaatcttcactatctttattttgttctttccccttgaacatcattacacgccgccctccgtgtcgctagccacacaccattgtcctttaaaatgtaagcataattaaaacaaaataaagagatgatgtttttttgttgtttaaccttttaaaacaaaataaagacagtgatgacacttagatttcactatgtttgattaatttttttaaaatttaaagtactggtgaagttaaatgttactaatgtaaaataaaataaaaattaaaataaaattttcaaaaacataaaaaaaaatacatttgactaatattaaaatttaaaagaccaatttaaacaaacttctaatgctaaagaattatttatttacttttttattttaaagccattaaaaaatatttaaagaataaaattaatgatttatttattatattttaaaagaatagaataaatggttattgtggagtaacatcaatgtcaaaaatccttatcactaaggcaacttttttcacctgactcactctatcgagtatgatttcttaatcatactcgcgcatcacaccgttccctcttattttctttccattccatttcctttggtgttgcaatcaaacggttcagatcaaaacacgtgctgattggtgagaaactctgtgtcccccaaccgtcggatttccctgattaacgtgtccccagcgagagtggaacagagaaattcccacggaaaaaagtgcgcgagtatggaaagttttttccatgctgcattgtacctgattcagggacttgattctgtctgagtctgtttctacaaatttcaaaaccctctctctctcgtgagttactcgcaccactagcgagttcttcttcttcttcttcttcgcgaaattcgtatgcgaagaagggtttgatctctctctctctctcttttacttctttatttatttttgtttaattttgtgtaattttacgaggttgaatttgagttgacgtgcatttttttgtgtgttttgtgcagaggtaggaattcacgctcctgcattctcagaccgttaggattccaattgtggtttgtgaatttcttctgtgttgtttgaatttgtaatcggtgatgaactcgtttgtttagggtttggcatgattttaggtttgtgtttgattagctcagtttttgtgtgatgctaattctcttacttatgtgcttgggcagcctaaatatatcttgtattctgcgaagaagaagctgagagaggttgaagatggtatgagcatattttgtttctttacgtgtcctcattgttagttttctttgggagaatatgtggttcaaaataacctttttattttgattggcagggaggagatgattttgattggaatactgatgatgagcttgaaattgagaactataactcttcatcttcgtgtttaacccttcctaatggggatgctggagaggtaagcttttagacactttattctttttctttatgttatgagtggttgaatattaagaattctgaggatatataacaagaaagtttaagataatgcaaatacattgtctttggcaactataagtttttcttttgggcttttggccttctctaattcctattgttgctggcgtacttgataaccaactaaccatgataaaccaaaatgataaactaaccttgcaggtcaatgcaaaaaaagaaaataaacctttcgaattgaaaccatacaaaactatttttcatttataatgtctattttactgtttagattttttgtaattcatacatgcattaatttttagctactaatgtcctattctctcccccttcaggcaagctcgtctgcagttttggctaattccaaggtacttgaccacttcgtcaacatgggattttctagagaaatggtttctaaagtaattcaggaatatggtaaagcatttctttactctatttaaatatagatttgattcataaagttcacaaataaatattgctctgatgaatatccaggtgaagaaaatgaagataaactacttgaagaacttctctcatacaaggtgagttgatgttttcataagtcttgagcattgttgtgaccttgtctctttgagctattattgaattataaccaattttctcttctgtagttgtcttgcctcattttttctaaattaataaacagttccatttccatatcgtggagtcattagcatcttacaatctacatgatgaattgtgaatcattgttggttttcatgggtagttaattttttttgggccatcctgtctaatctggagagggtgagccttgtagcatggttagggttgctatcttgtgacttggaggccacaagttcaaattttgaaaacagtctctctgcatgcaagcataaggttgcatacatctacccatagcagtcaataatgcactatagctgattggtggaactgagtggccatggactgcaatgggattcaaattgcagaatggtttttattagtggccaaaatagtgggttttcatgtgctatggctctatagcggcgctaccatgatatatccttcaataacctatttttacccctggaactctgttttttggggtattttcgggtaaaatattccacaaaaagttacctctgtttcgacttttgatccttcacactttatagggctgttttttcatgtgttctgttcttcttttagattgcccagatctcattttgctaatttttatctaatttattatattctttttctattaatttcgccatcatcattttttatatatttcatcacaatgttttaatgctcttagattgatggtgtgtgattgtgtacagtgtgactttttattcatcttgaatttctttaattttggttattctttctagtatttatatattttttttaatcagcgaaggtaatattgtattatatataaagcagtacaagttgtactgtgaaatttacacatggaggccaatttgagcagtaatatggtgccctaatacaaggtatataacatgaattaagaaaccataattctaacaatatagttggcccaaaactacccacaattagagttatcccaccctaatcacaaaatgcctccctcatattactggaccagtgatgaaaaggtatgttgaaacctttatccaaattttttaaccaagtccagcataggaaaatagcatcctccagcagcttactagcattaaagctttcatctgcaaaaacaatcctatttcgatgctgctagatgctccatgtcaaggagatccaccagcactgccatttctgaaaactgatgctagtatccctcccaaacacatgctggaggaagtgctgtctcggactttgcggaaatgctcttgaaatgtttgtccacgatattgatccccaccaaagtggtagaatttttctgcaactaaagaaaaggtgtgctgcatcctcttctttatttttgcagaatgggcatgtgggatcatttatttccacatttctcctgcgtagattcattttagttgacagtctgcccctgattagtctccacgtgaagaaaaaagctttactagggacctttaccttccacagcacagtaaaagcaccatcctgattttcatcattgtggtctgtcataagcatcttgtacgcgttccccactgtgtatacaccagatgcatcttccttccaaattcacttgtcttctcgatccgagtgaatgttgataccttctaattcttccaagaactttgcagccatatctatctcatcatcaaaaagttgccgtctccattgaaaatcccactcccagcctgtagctgtgaaacttcccatctactgtatgacatgttgttgctggtaggaaatagagtaaagtctagggtacttcaacttaagtgatactccatcctccttccatccatcctcccaaaatttgacctttgctctacaccccacttttcattttatccctttatctagccagttgccatcttcaccggaatgagttatgagattgatgtccttccaccatgctgattcactgctgccccttctttccccatccaaaatccgccatccaccatattttgaaatcagtatccttgagtccccttggttatggaaaagcttccatctccactttccgaggagtgcataattaaacttccttaaatccctgattcccattccccctttctcctttggtagacacactgactcccactttactcatgctatcttcttttgctccattcctccaccccacagaaaccgcctgtgtatccacaccagctagtccaaaactttattgggaaccctgaaaaaagagaagtagataggaacaaaatttagaactgacattatgagagtgacccttccaccaaatgaaagtatttcaccaactttctctcacatttcttgacaataggatcccaaacatcactatgccttgggtttgccccaatcgggatacccaggtaaaggaaaggtatggccaatagactgcaatttaaatacctagcagcatccaccttccatatctccgacatcccaattgccccaaaactactctttgagaaattaattttgaggcttgagacaagttcaaaacttctcaaaatcaccttgatcgcattgacatttttcatggatgctttcccagagaaaatcgtatcatctgcatactgtaagatactaatttccacttcatttcttcccattaggaaaccttgaaacatgtttttctctgttgcttctctcagcagtccattgagtccatccacaacaacattaaataaaaggggagctagtgggtccccttgtcttatacctctttggggaatgaactcagacgaagggctaccatttaccaatatggagatagaggcggattttaggcagccctcaatccatgatagccatctatcgcagattcccatcctccttaacatgtactacaagaaattccaggagactgaatcataggccttttcataatctactttaaacaccaagcacaacttgttgcttctctttgcttcatgaattacttcatttgctataagggtgctgtgtaacaaatgtctgccctcgacgaatgcagtttgtctctcatctattattaatggcagcacccccttcatcctcctcgctagcaccttggccacaattttatatatgctacctattaaagaaataggcctatattcatttaggttcaacggatcattcaccttaggaatgagagcaaggaatgaggtattgcaccccttcgggaacgttccatgaacaaagaattcatccatgaaccgaagcacatcagccttgataacttcccaaaactccttaataaatttgaaactaaggccatctggtccggggctcttgtcgctcctgcattctcacacaacagcctttatttctttttcattaaatggctccgacaatctgacattgtgttgctgtccaatggctctaaatctgaccccatctagtttgggcctcacccaatcttcctcctgaaatctgttcttgaagaacattctagtatttatatgtgtagcatatactatattctttttggtttgtattatactagcagtcattgcacttactgctatcctgcagtagcaatttaggaattggccactacatatattgctatttgagattgataactatgcatctacgcttcctaattttgcatatttttagcagacttgtcattgcagtcaatttgcaatgatattagttcatgaaatgaaataaaattgtgtatctttgtgtaaaaaaaatagcagttttaatttatattgtatgaaatataaggcaaaagactgatggctgtatatttattcttcaaacttagaggaaaatgctttctaaaaaaattatgcatttaaatttttaaactgatttcatttacatgttatgattctttcctcttatgaagaaaataacagtttcttattttaatctttcaatgattgcaattttgcttctactaattttgtctcaactctttagttgtgtaagatgtataggtggggttaattgagcagcttgatcaccctaaaaatggtaatatggaaatttgggtactgggatggtaaattctttctacaactataatagtgccttaatacatttgcaataatattttaccaaactcaacaagtgatctgtgtggttcttttgtgcatataattgctccttttttaaccatttacctatgtcattttgtttcttttgttctactgacatctttagacttatttctgacatctttaatataccatttgcatattataagattgactattgtgttacacttacacatgtcttggttttggtatttttgttttcatatttgcaggctctggaaagttctccccaaccacagcagcgaattgagccagatccttgttcttcagagaatgcagggagctcttgggatgatttctctgatactgatattttttctgatgatgaagtaatctcttctttttgcactttgattttttttagactgtatgatctgattcatcttattatcttgttattttcggcctttagtgtcatctactgcgatggtttctgctagtgctataggacatgaaatgtggcatgtaatcattttcaaacatgaaacagattaggatggtttatgtttctttgttgggcattgtagggacttgtacaatttcattttcctacttcaaagaacaatgaaatgtcatcatgcttccacttgcttttacaaacatttatgggaggtctggaattccttactaggaaacaatataggtgcaggttatgtattaagagaaacagcttgcttattttatttgatatttttttgtaggaaattgcaaaaactatgtctgagaatgatgataccttacggtctttggtgaaaatgggctacaaacaagaggaagctttagttgccatagaaagattaggtgtgttttgtatgatgcattcatatgtatggcttgagttgttagcttgttatttttgcaaaaaatgatagaaatttattttaatattgttgcttgttgtatgatactatgattcattatcttcaattgatattgagcaccttaatttgtgtcccttggacaattgagccattagaccaaaaaaatattgcggctcgattatttttgtttcctaggtttaaggattgacattctatttaatgtaagttgttggatattttatatgcactcttagcacaagttgttgtcacatttctaaagtgcgtccctgaaagctttttctggatgaacacttcatgctgtaattcccaatgtttgatttagtcatactaaacgcttttgattggaatttgaatactcgtagttccaaatgtgattatgagtgcttgaagaatgaagaacaagcatggtcatctaaacaccttgtattatataataagctttagctaggtgtccagctttatgaagattcaaccatagcctttttgaaaggtccaatacttttagttccatggagatcaggatcaactagtcccgcatgaccatggttttgaagttattcttggaatctttttaatgaatcaatgctatccatcattttcatcactctcatttcacatggttattcaggatagcgtctcctcattctctgccacagtactaactttttgaatgtctcagttgattcctacctgctgaatgcatatcaaatctgcattttatacgattgtatcctcaagatagtgaacagaacatatgtgcctagtagttttttcccttgcctgaagtgaagattacctgtttcaatgtctagagcagagacaaattcatcagtttggaccaccattattgtggataatagatgatgaaaatcttcttatatacaatcaccttatgaatatactgcaattacttctagccaagaatgatttaattgctaactctataatcagtttttacatgcagatgtaatggctatagatcattatacgagaatcagatcatgtcttttattattatctctaaagaatgacactgtttaacacatttgtcaagcttgtataataaattaacaggtcctaaattttggtgtttttccaaatatcattttaatcaaattaacgtggtcaactacaataataacctcacacggcctcttgtttgtttgtgttcacaagtttacatggtttctgtttatgaactttttactctattttcttggctcattgttctaatgaaatactgcaggcccaaatgcctcacttgaagaattggtagattttataggtgttgctcaaatggcaaaggctgaggatgctcttctgcctcctgaagaaaaggtagcaatgtagccatattggtatcttgggatgaataaaatagaaatttaatgcatttaattttcgataattttttccttcgaattatctagcatcatccatctgttgctcctcctccccccgttcatttatctgtcacatgtttatgttattttaatgttttttttacagttacaatacaatgactatgctaagtccaataaacgaagattttatgattatgaagtgctgggaaggaaaaagcctaggggatgtgagaagaaaatcctcaatgaagatgatgatgaggaagatgaagctcttcatcttccaaacccaatgattgggtttggtgtacctacagagtcgagcttcataacacacagaaggattccagaagatgccattgggcctccttacttctattatgagaatgtagccttagcaccgaaaggtgtttggcaaacaatttcaagattcttgtatgatgttcaacccgagtttgtagattcaaagtttttctgtgctgcagccaggaaaaggggatatattcacaatctccccatccaaaataggttcccacttctaccacttccaccgcgcacaatacacgaggcttttcccctaacaaagaagtggtggccttcatgggatactaggaccaagcttaattgtttgcaaacatgtattggcagtgcaaaactaacagaaagaattaggaaagctgtagaaatctatgatgaagatccacctgaaagtgtacagaagtttgttcttcatcagtgtaggaaatggaatttggtttgggtgggaaggaataaggttgctccattagagcctgatgaagtagaaacgctgctgggcttcccaaggaaccacaccagaggaggtggaataagtaggactgacagatacaagtcacttggtaattcattccaggtatgataattctacctcttcctatataataatgtagcctccataaagatccttctggatgtgtttactttcataaataaatgtaatatctcttggaactattcagtaatgttttaatatttaggcatattcagattaatcaggtagaggaagaccaagaaaaatagaaagaaccattttaaaatgatttatatgtaaataacctcttacctcgataaagaatatattgatttttggcagaacactatggcgacatttatgttgagacctcagcaatggctttgtttgttgtattaagaataatgttgtcaaagtgaaatcatatgcagtttcagcatgttttcttttctatgaaactagtggttaatgcattgatgtttccgtgtaaatttctctttccttacttgattcagtttatttcaggttgacactgtggcataccacttgtcagttctgaaggagatgtatcctaatggtatcaatcttctttctctcttttctggaattggtggggcagaggtagctcttcatcggctcggcatccctctcaagaatgttgtgtctgttgaaaaatcagaagtgaataggaatattgttagaagttggtgggagcaaacaaatcagaaaggtaatctatatgacattgacgatgtaagggagctagacggtgatcgcttggagcagctgatgagcacatttggtggttttgatctaattgttggtggcagtccatgtaataatctggctggtagcaacagggtcagccgggatggactggagggaaaagaatcttctctcttctttgattactttaggattctagacttagtaaaaaatatgtcagctaaatatcgataaatttttgtccaaagaaacccctttctgcggttttgtctttcgtccaaataattaggatcttcgtatataaacctgaaacattagagacagatacttctcattccatttttattgccaaagaagggcaacgttttcaaataaaaaaattatcttaaaatttctgatttcaggttactattttattaatacctatgcggg

SEQ ID NO: 190 - DNA, 6296 bp, Glycine max
  source 1..6296: mol_type = genomic DNA
ctacccgcctaatgtatttacatttgtcagtgcaattcacgattcatgtgaatatgatgtaagacctggattcgatcttcggattacagttgttaataaaaaaaaaaagaggaagggtaaataatttggaatattaaattaaaatgatttacaggacgagccctggagcggtaaagttgtatcttggtgacttgttggtcatggatccgaacccggaaacagcttctttgcatatgcaagggtaagtcttcggggaatgggatacgaagttttttattaaattaaaatgattttagttgttttcccattaaaaaaattgattaaagaaacaaaaggtgaaaaaaatttaaagccataattttttttattacataaagcaataatatttgatttcaaatgtggccgcggatgaagtcagcttattttcttgtatttctccccaaattgaaattgaagatcgtatctaatgttaaccgagttaaaaatgagagttcgttttctatacaattattttttgaagttcttttctatacaaaataaaaatatttttatcattacaaattgtaatcaaatatttgtgtgcgcattggcatagcagcaccttgtactgcaacaactttcaaccaaaacctctctagcttccaattcaaagtaggaactctaccattttcgtgctcgtagtcgagacaaaggtaacaacaacgtttcagcttctacagtgttgattcacgattgctgatttctggacttctactctcactaaaatatagttttagtgttgagaaagggtttaggtttttttcgtctatttctgcattccttttctaacatcatctcttgattttctcccctgctcttcaggttgatcgacgtccgaactcgtcatcatcatcgtgtcgccattcttccagcgcaaggtattacaatataggttttcttcttcggaaaattttcttaagctttgtgagtgagtgaaggcatatataaaactgtgacagtagcgtttttcacactctatgagtcagcttagctacatgtaaaatggagaatctgttgatgattgacaaactgtaaatatcattgcgcaggataatcatcttagttttttttttttttttacgttttttatacatatcgtcatgattttaattttaatattcctttgtttgtggacgtttgacgaccaatgtgtggatcaacttttatataaagcctgcaactgattgtatatatctttatgctgttaatgattttgtatacacaatgtaatattctgtgtgaagatgttgatgtgtttaagagtgtatgggaaacacgaattcctttgaatgtatctgcttttgtgccgagggttgtgcaggataggatacaaacataatggaatttgaggaggataaatgtctaattacagtcagcagactatgggtgtcccttttgcaatctagaggaggaatctatggagcatttgatgttcagctgtacattttcatcaacatctggaataagtattatgcttggttggggatacatactgcccaacaaaaatgcacccaaggcaacatttgtgtgggatcttatgaaagaagttggtggtgaaatggatggtggtatggtgcacagtggtgtggtctctatggtcacagaaaatttctgttttttaaggatggaaacattgatggtgaacaggtatgggagatgtttgaagtccatttgtggtcatggttgtcaaggaaaacaaaggactttaacttgtcgttctatgaatggtcaacaatccctttgaaaggtttgtaggtggctcaatgaaaattcaagtagcagttcatggttacagtgatatcaagactgaagcagcagcagagccttgcacaacaaggcttccttttgttctctgtgatggaaggaagttacatgtcaatactggcagcatagtccatggtaataggacaaattcaatattcatgtccagcaacatcataaagaattctgtttcggtattaagagggaatgactcaactgagatgatatattgctacctgggcgaaatattggggtggttggctttacaagataaatttcagaaagttgtcatttgttggttggttggaatttttgggagatgaagcaaaagggaatgaattcacgaggaacatgttggggtagtttcttgcattgtccaaatttaggaaacatataatattgtttatcttaacttcagttgtgctgggaaacaccatacaacattactatttctgtttttatatgtttccttcatgtattttggctcattaaactgtgtggaatattctgtagggaaccttttgtaacagggcaggggtacttcttgtactgtcatcaatatatatcttttattggccgattaaaaacagaagcttgcaactaatcttaaatctctcatttgcagatgtctggtagacgagaacgagtccgggagtctgactttgaatactatgaacgcgtgtattatgaagacttgaagagtggttactataagctcaaaatctccaagtcatcatataagtgtcccttttgccaggacaagcgggaatactcattgaatgagctttcgaagcatgcagtaagatttgaaagggactcacggagcatgaagataaaagatttagccaagcactctgctcttcaattgtacattaaaaagtatcttgatgtctatgataaagtaggaagtgttgtccatgataaagtagaaagtgttatccatgataaagcaggaagtgttgttcatgatagaccaggaaaagtggtcctagatagatccggaaaagttgtcaatgatggatccggaaatgtttacagtgatagatttggaaaagttgtgaatgatagaccaagaaatgttgtcattgccaatgatagatcagaaaaagttggcaaagatcaactatttgtctggccttgggtgggcattgttgcaaacattgccactgaatttaaaaacggaatgcgtattggagacagtggttccaaactaagggatgagtttactttgaaaggatttcatcctttgaaagttcaaccattatggaaccgttatggacattcaggctttgccattgtagaattctccaaagactgggatggtttcaccaatgcaatgaactttgaaagaagttttgaggcagaacattgtgctaagagggactacgacaatttaagagaccgaggaggtagactgtatggatgggtagctcgtgatgatgattaccactccaagagtataattggtgatcaccttcggaagacgggggatttgcaatctgtttctggaaaacaagcagaggaaaaaaggaaaacaacgctgcttgtctcagatttagctaaaaccttgatagtgagaaatgagaaattggagcaggtatgcagcaaatatgatgatattagtgtgtccctgaacagagttatggatgagaaagaagcaatgattgaatcatataataatggtatgctgaagtttgaagtggtttctatttcggcatagcttattgtgtgtttctgtgttgaaaggtgaaacaatctggttgtgattatatctttccattccagatagcctatggtttgttttactttctagtgaaagttttctaaccttttcttggtggcttacttcgtgtttcaccttgttcgattagaaataaaaaagatgcatcaaattacccggaaatattgggaggtgttttatagggatcgtgaaaaggccggattgaaactacatgcgcagaggaaaaaactagagagccgtgagaaggatctgcagagaaatcaagtgcagaatgagaatgagagaaaaaaactgtaccttgaaaggaaaaatgtaatcttttttggctgcttaaatttttggatatcccagtttctttgtgtcagattgggaataatgctccatttatttgaatttaaataatttgaatagtgatgaactttgttcttcatctttctgtttgcagaatgagatggcaataatggagcaaaacaaagccgatgagaaagtgatgcatttggccgaagaacacaaggcacaaattccatattcttctttccaattcctttgtgtgtaatcataaagttttttacttagtcattcttttttggtttgaaatgcagaaagaaaaggagaaaatgcacaaaaaaattcttgaactacaaaatgaacttgatgccaaacaaaaattggaattggagattcaacaattgaaaggaaatcttcaagtaaggaatcaaataggagaggatgacgaggaggagaaaaataaattggatgcaattaaaacggaactagaagataaggaggaggaattagaagatctggaagcacttcaacaagctctcgttgtcaaggaacgtaaaaccaatgatgagttgcaagatgcccgcaaggagttaatacgtgtatgtgtctattaccaaccgtaaatgtaaatctgtttgatattattacaactctaggttttcaactgaacggtcttctccaagtaatctttttattaactgggattgagggctttttatttgtataaattaactggtaaagtgctgcagaaatgtaaggtttgtcttgatttttttaattgacatactacttgttatatactaatcacagcagagtgtttcatgtttactagtatgcttgttaacattaactggaatcatattccgaatataacattgttgattagctgcaataacttgaactcatctgttttgcatatttttgcaatgcgcatgctacacatgctgtgttttaactcttgtctccatatttgagaattgcagtttttcaatggtatcatcttgtgaaataatgtggttgcttgcctttcctttgtcaaatggctatatatttgttggtgtctaaaggagatgatttaaatctacatggtttaaaatttttggtaaaaagtggtagaattaggtcaggtctattgtctataaaactggtataatgcttaagctagtagcaaatatgctctatagttcagcttgtatgttgtgttactgctgctccgatggttttgtatgtattttgtttaagtaatatgatttacttgttcacagtggctgaggaagacaaacagtagtcgggcttttattggtgtcaaaagaatgggggagcttgatgaaaaaccctttttgagtgcagcaaagagaaaatattctggtgatgaagtgaatctgaaagcagtggagttgtgctcacaatacgaggcttatcttagagacccaacctggtttccatttaaagttttaatagataaggaagggaaggccaaggtacaatcacttccagaattacttgttcaaatagaagtcatcttttttatccctaggatttgttcatatggtcattttaattgcggattgcctcattatccaagcttgtaataatagtataatactttaaaaagtcattgcatcatttcataatagttaaaaccatggtatgctgtagatattgttcaaagatttggcagggtaaggtgctactcatattttgagcactttgttggcaccatttcccctgatgtttggtgcatggatcatgatctaatatatgttggatatattatgcaggaagtgttagatgaagaagatgaaaaactgagaactttaaaggatgagtttggtgacgatgtctttcaagcagtggttacagctctgaaggagttgaatgagtacaaccctagtggtagatacccgttaccggagttatggcattctaaggaaggaaggaaagccttgttaaaggagggttgttcttttataatcaggcaatggaaagcattaaagcagcgaaagaagtaggactgatgcggaacttacattttcggttcttattccatcaaacctactgttgtcatcgtcaacatcatggtgaaattgatttagttcaactctagtgccaaaggttggttatagtatgttacatgcaatactgatatcatataatgtacttttttcccgtgtgatagaggtttcttctattgccttggaacatttttgtttagaatctatttgaagttatatcagaccttgcttgaaattgaagtggcatattatgttgtttagatttatatttttagttaacactgctatttataaatatactgtactattcaacaatgtcagaaaattgggggttgaattgaaactgactctgccgtcagttattctcttattacgggttcggtgcagtatacccatcattatgggtctgttatcaggtttataaaacagtttgttaatagagattgggaggt

SEQ ID NO: 191 - DNA, 7616 bp, Glycine max
  source 1..7616: mol_type = genomic DNA
gcggatgaagtcagcttattttcttgtatttccccccaaattgaagatcgtatctaatcttaaccgaattaaaaatgagagttcgttttctatacaaaataacatattatgtaattcttattcttatattataatatatatatatattattgtcattataatttgtattcaaattattgattgttttttttaataataataagtagatttttttgaagaataatactactaagtagataaaattagcttttggaaagaggaaaaaaaaagaaggcataacgggaaacgaaagggtatattaatcatttttgccctgaacgctagcatatgcgtttttaaatgatgaaaatataaaatttagtttttaaaagtgtaaaaattgtgacaaatctaaccgttaataaaatagcctacgtggtacaaagatacatttgtcactgaaattgttaatgtgtctatctcaaattgtcaatatagaaagatgtttgtcatttaatattataatatttttgtgactttttgtccgcccaccggtaaaaaatacaaaatttagtcccaaaaaatataaaaagtgcgacaaatctatccgaaagttaataatatattgtaactaattattataatttgaaaaaaatttacaatgattacaacaaaaagatcaaaataataatttaatattttttttaacttaactcatctcaaataacaaaggtgtatatttaaaattttgatttggttgttaactaaaattcagatcatggaattaaggggaaagaaaaaaattaaataagaaaaagtataataaataattatttttatatttgctttattaactttaaattaatgataaaaacttgtaatttaaattgagtctaaaataaaaaatatattttttttataaactcgtaaatgatttttttgtactcccatgcctgatgaaatgttcaagtaaaaaaaatgcttattgtaaattaaattagattcatgaataatttttagagaaaattacaattgtaatgacacttttaatttgtaaaaaacacttacttcctttgaaatgattttcttttaaggttataattttttaaatgactaatcaataagaaatatttgtgtatgatttaaaaaaaatcaatttaaaaatcaacaaacttttattataatttgtaatttgatgtcattgtatatactaatagacatttatattttattatgaaaaaattattataaaattaattaaatacatagtatttgatttaacagaaacaataatttttttatcattttataatgaaatttatttttctttttttgtgtattgatagcttaaaagtaatataaaagaaacaaacagtgtgatatatttctttcaagatatatttatcgtacttgttaactaaattttatatttttatttttaaatattatataataaatatagtcatatgctcgcaattagaaatgtgacaaatttatcttatgtgtcataggctatgttattaatcggacagcaaaagtgactatttgccccgtaatacaacccaatcgcccaaccggagtatgcgcgcaatcgcatagcagcacctgcaatgcaacaactttgaagcaaaacacctctctctcaacctctttagcttccaattcaaagtagaaaccctaccagttttgtgctcttagtcgagacaaaggtaacaacagcgtttcagcttctatagtgttgattcacgatttctgatttctggtgttctactctcagtaaaatatagttttagtgtcgagtaagggtttaggttttttcgtctattttttcattcgctttctaacatcatctcttgattttctcctctgctcttcaggttgatcgacgtccgaactcgtcatcgtcaaagctcagttgctattcttccagcgcaaggtactacattataggttctcttcttgttcggaaaattttcttaagctttgtgagtgagtgatggcatatatatataacaacgacaaaagcgtttttcgcactctgagtcagctacatgtaaaatggagaatctgttgatgatagacaaactgtaaatatcgttgcgcataataatcatccagttttttttgttttgttttttatacatatcgtcatggttttaattttaatattcgcttgtttgtgtacgtttgatgacctttgcggggatccacttattttgaaaaataagctactagtatttgttttttaatttaagtgttataaagcttgcaactgattgtatacatctttatgctgttaaatgattttgtttacacaatgtaatattctgtgtgaagatgctgatgtgttttaagagtatatgggaaacaccaattccttcgaagatggctgcttttgtaaggagggttgtgcaggataggatacaaacaaaaaggaactcgaggaggagaaatatctaattacagccagcagactatgtgtgtcccttttgcaatctagaggaggaacctatggagcatttgatgttaagctgtacattttcatcaagcatctggaataagtgctatgcttggttggggatacatactgcccaacagatatcctaaaatgcacctaaggcaacattcatgtgggatctttggaaagaagttggcggtgaaacggatggtggtatggtgtgcagtggtgtgatctctatggtcacagagaaatattctgctttttaaggatggaaacatggatggtgaacaggtatgggagatgattaaagtccattcttggtcatggttgtccaggaaaacgaaggactttaacttgtctttctatgaatggtcaacaatcttttttaaatgtttgtaggtggctcaatgaaaattcaagtagcagttcatggttacagtgatatcaagaccgaggcagcaatagagccttgcacaacgaggcttccttttgttctctgtaatggaagttacatgtcaatagtaatactggctgcatagttcatggtcataggacaaattctatattcatgtccagcaacttcataaagcattctgttttggtatttagagggaatgactaaactgagatgatatattgctacctgggtgaaataattacgtgattagctttacaagataaatttcagaaagttgttgtctgttggttggttgggatttttgggatatgaaggaaagggagtgaattcacaaggaacatgttgggtagattcttgcatagtcaaaatttaggaaacatataatgttatttatcttaacttcagttgtgcagggagacaccatacagcattactgtttctgtttctaaatgtttccttcatgtattttggctcattaaactgtgtggaatgttctgtagggaaccttttgtaacaggggtacttcttgtactctcattaatatatatcttttattggctgataaaaaaaaagaagcttgcaactaatcttaaatctctcatttgcagatgtccggtggacgagaacgagttcgggagtctgactttgaatattatgaacgtgaatattataaagacttgaagagtgattactataagctcaaaatctccaagtcatcgtataagtgtcccttttgccaggacaagcgggaatactcattgaatgagcttttgaagcatgcagtaagatttgaaagggactcacggagcatgaagacaaaggatttagctaagcactctgctcttcaattgtacattaaaaagtatcttgatgaaaatgataggccaggaagtgttgtccatgataaagcaggaagcgttgtccttgatagaccaggaaaagtggtccatgatagatccggaaaagtggtcattgatggatctggaaacgtttacaatgatagatttgggaaagttgtgaatgatagaccaggaaatgttgtcattgtcaatgatagatcagaaaaagttggcaaagatcaactatttgtctggccttggatgggcattgttgcaaacattgccactgaatttaaagacggaaggcgtactggagatagtggttccaaactaagggatgagtttactttgaaaggatttcatcctttgaaagttcaaccattatggaaccgttatggacattcaggctttgccattgtagaattctccaaagactgggagggtttcaccaatgcaatgaactttggaagaagttttgaggcagaacattgtggtaagagggattacaacaaattaagagaccgaggggatagactgtatggatgggtagctcgtgatgatgactaccactccaagagtataattggtgatcagcttcggaagacgggggatttgcaatctgtttctggaaaacaagcagaggaaaaaaggaaaacatcgctgcttgtcttagatttagctaaaaccttgaaagtgagaaatgagacattggagcaggtttgcagcaaatatgatgatattagtgtgtccctgaacagagttatggatgagaaagaagcgatgattgaatcatataataatggtacgctgaagtttgaagtggtttctttttcttttttttggcatagcttattgtgtgttgaaaggtgaaataatctggttgtgattatatctttccattccagatagcctattgtttgttttactttttagtgaaaattttctaaccttttcttggtggcttacgttgtgtctcaccttgttcaattagaaataaaaaagatgcatcaaactacccagaaatattgggaggtgttttataggggtcgtgaaaaggccagattggaactgcatgctcagaggaaagaactagagggccgtgagaaggatctacagagaagtcaagtgaagaatgagaatgagaggagaaaactgtaccttgaaaggaaaaatgtaatattttttggctgcttaaatttttggatatcccagtttctttgtgtcagattgcgactaatgctccatttatttaaatttaaataatttgaatagtgatgaactttgttcttcatctcttttgtttgcagaatgagatggcaataatggagcagaacaaagccgatgagagagtgatgcatttggcagaagaacacaaggcacaaattccatattcttctttttaccaataattaatttaattcctttgcgtgtagtcatataaggttttttactgagtcatttttttttggttttaaatgcaggaagaaaaggagaaaatgcacaaaaaaattcttgaactacaaaatgaacttgatgccaaacaaaaattggaattagggattcaacaattgaaaggaaatcttcaagtaaggaaacaaataggagaggatgacgaggaggagaaaaataaattggatgcaattaaaacagaactagaagataaggaggaggaattagaaggactggaagcacttcaacaagctcttgttgtcaaggagcgtaaaaccaatgacgagttgcaagatgctcgcaaggagttaatacgtgtatgtgtctattcccaagcataaatgtaaatctgtttgatattattataactctaggcttttaactgaaaggtcttctccaagtaatcattttactaactgggattgagggcttttatttgtataagttacctggtaaaattctgcagaaacgtaaggtttgtcttgatttttttaattgacatacaactttgttaggagtccttgttgattatggagataatagggatgtaggaagagaaagaagagatatgagagtaatgattcagagagaacagagaaaaaatggttgctatcatgaaagatcagtaactgttttctcctttccacaaggactagccttctcaacatcaaaaggtaaactctacataatccccagctattgctaaaaaggtctatttatcctcattacccctaactactctagctgctctagcataatgatactaactgtcataacagtatgataacaaactctttattactcaaactacaattaatgggccttattcctcctttggtacactcacaaggcctttggctcctgctgtgactgaatctgatcaaccttcctaacaaacttgttatatactaatcgcagcagagtgtttcgtgtttactagtctgcttgttaacattaattggaatcatattcagaatataacattgttgatttgctgcaataacttgaactcatttgttttgcatatatttgcaatgtgcatgctacacatgctgtgttttaactcttgtctccatatttgagaattgtagtttttcaatggtaccatcttctgtgaaataatgtggttgcttgcttgccctttgagaaatggctatatatttgttggtgtctaaagggagatgatttaaatctacatggtttaaaatttttggtaaaaactggtagaattaggtcaggtctattgtctataaaactggtataatgcttaagcttgtagcaaatatgctctatagttcaggtagtatgttgtgttactgttgctgcgatctttttgtatgtattttgtttaagtagtataatttccttattcacagtggctggggaagacaaatagtagtcgggcttttattggtgtcaaaagaatgggggagcttgatggaaagccctttttgagtgcagcaaagagaaaatattctggtgatgaagtgaatctgaaagcagtggagttgtgttcacagtacgaggcttatcttagagatccaaactggtttccatttaaagttttaatagatagggaagggaaagccaaggtacaatcacttccagaattacttgttcaaatagaagtcatcttttttatccctggggtttgttcatatggtcattttaattgcggaaattacctgattgcctcattatccaagctagtaataatagtataatactttaaaaagtcattgcatcatttcataatagttaaaaccatggtatgctgtagatattgttcaaagatttggcagggtaaggtgctactcatattttgagcactttgttggcactttttcccctgatgtttggtgcatggatcacgatataatatatgttggatatattatgcaggaagttttagatgaagaagatgaaaaactgagaactttaaaggatgagtttggtgacgatgtctttcaagctgtggttacagctctgaaggagttgaatgagttcaaccctagtggtagatacccattacgggagttatggcattctaaagaaggaaggaaagcttccttaaaggagggttgttcttatataatcaagcaatggaaaacgttaaagcgaaagaagtaggactgatgcggaacttaaattttcggttcttattccaatgaggctaatgtagttgtcatcgacatcatggtgaaattgatttagttcaactctatagtgccccaaaggttggttatagacttatagtatgttacatgcaatactgatatcatattgttttttcccttgtgatcgggttcttttattgccttagaacatttttgtttagaatctgtttcaaattaatatcagaccttgcttgaaattgaagtggcatattagatttatatttttagttaacattgttatttgtaaatatactatactattcaacaatgtcagtaaattgtgggttgaattg

SEQ ID NO: 192 - DNA, 9648 bp, Glycine max
  source 1..9648: mol_type = genomic DNA
ctagccaaacttgttactattttctggtaacatggacttaggtatacgtgtgttgttccaaagagtcgaggagcatgattttttttttccttcccaaatatgttgttatatacccttcattgtaatttatcatttgcattctttgacatttaaacatttcaatttttcatctttttttcttaaggatgggtaaacagactcaagttcatggatcgacttgtgggtctcgtggtctgtgcaagccatggaccatttttttaaatccatgactatgttggattttaggcttgcctcgcataacccgtgggctttgcaggtttggattgtgggttggtccgcaaacttggaaccgctaatgtaattttttctataaaaaaactagactcgtggaccagtctgtttggctcacgggattcgcaagacaggaggagaccaatgtattaaattcatgtaatagtgcgagatgggctgactcggtccactaccaacttatccacctctacatagtgtcgggcaaacctttacgtgggacggaccgactcgcttacccacccgtactttctctaccatttatttgaagattccaaaatgaataaaccatcaattttgtcatagaggtatgaccctttctcataagttgtctccaaagtaataaaagttctaaatattcatcacttcagttcttaagttgatgtatttgagtagagttaaggaaccaatttgaaggatttttaatgtttggagtattacttagcatgaattttaatatttaggaactacttgagagatttatttatttatttttacactagggatcattcaatagaaagggtaatagtttgaggacaaaattaatgatttactcattccaaaataggtccaaggggcatttagaaaaacttatttgaatttataatagtgatcttttgtaagcactttttatcttatttcaataagtatcatgaggaaacttattataataagctcttttcaataaacttcactatcaagcttatgaataaattctcatttaataagagtttattgggccgtgtccctaatattattacattagaacttgtttttgattcaccggatgcaaaatatgttgataatctctacatgtagagacatgcctttgtttcgattctaacacatcatgattttatcccaaagcatgttttggaactttactctgcataagatgtggctactgcatagttttgatgcgtgatttagcaattgcgtccatatacagattgttaatttttttcgtaaagttaacttgatatttcagatagacccctttgaaacaaagttccagtaattacatatttaaaagtactttgataagtattatccagcataaagtttcattttatcaaacatacttttgagcaaagaaatattcacgtaaatcacactatataaattcatttttttaacaaacttaagttttgaacatacttttaattcaaatttaacatcatgaactttaatatgcactaagtaatccaaaatcctatgaaggtggaagggaaattccaaaatgcaatgaccattttgatttccatgtaagttttgtaaccaaagcttttgcaattttccttttctaattttcaaatttgctaaaatttcagtttgagggttcatgagcggcaaacaaacaaaaaaccctccctccctccctcccaaaatttgggtccctcccgccaaagaaaatggtccaatcttaaataggtgtgtagaggtaaccctaaattcaaaatatgcccgtgcaacccatttcctctgaaaccctaaactgaggttctttgctcagtgctagccctaatttgttcaggcagatggagcagtagcaagagggtggtgacagaggtttttcccggagacgcagactgagtagtagccgcaaagcccggaacacgccgtgaaggtagcgcgacaactgcgactgcctctattttcatttctgtttctttcgactcgcaggggatcgccgatctcactatcgagcgagcgcggaagatcgtggaagacatgggttccgcttctcttctgaatccttctcaaccaggttataatgacatccattcccccctcccccttctcttctggattattttaggatgttagtattgcattgttgtttttttggatccacaaatgttgtttgtggggggattcaaactcgtgacctctcccctcttcctttctcccattcaccactagaccaaccttatatctcctgttagtaatgcattgtgatgaagggcaaatagattttaaatctccatgtgattttgtttttaacacgagaagaaaaggtagacccaaatgatggaaaatattttggaaatctatttgatgctaggtaagtataatcattatgtatctgctcttgtgtgatcatgtatgaaagttctatgtcctttttgtccttctatattttacaggcatagtgaatgattatgacgcttataagttacttaatagttatttctgtctcaaggctgttccaattgtcatttgttgtgtcctctatactgcttatcttatttttctcaacaatttttgtatttatgtctctgtctctccctctctctcttttatttttgttgctaaataggcgttaagaagaacagcaagagcaaacagaaatctgttgtttccaaaaccgaagagaaagttatggttaaagataaacaaaagaagcggagtttgttggagagcagtgagcagcctgctgctacacgcaaaatgccaaaacgtgctgcagcgtgtaaaaatttgaaggagaaatcctttttgatatctgagaagtcctgcctcattgaaatggagaaagatcagattgtagaagaagaaagtctagctgtccgcatgacagctggacaggatgatggtcgtccaaataggcgcatcacggagttcattcttcatgatgcaactggtaaagcccagccacttgaggtgctggaggttaatgaattatttatcactggacttatattgccgcttgaagtcagcacaggcaagaaaaaagagaaaggtgttaagtgtgaaggctttggtcgagtggaatcatgggatatatctggctatgaagatggctctccagtgatatggctttctactgatattgctgattatgattgccagaaacctgctgctagttacaaaaaagtttatgatcttttccttgaaaaggcccgtgcatgtatcgaagtatacctgaaacttgcgaagtcctctgggggtgaccctgatatcagtcttgatgagttacttgctggcatggtgcggtctatgagtggtagcaaatgcttttctggaactgcatctataaaggattttgttatttctcatggtgagttcatttataagcaactaattggtttggacatgacatccaaggccaatgacaggacgtttgcagatatccctgctcttattgctcttagagatgagagtaagaaacaagcaaactatgtacatgcacaagtaatgccctcaaatgggagtttaaggattgattcaggagttggagatgaagaaaacaagaatcagatggattcagtagcttctgtaaacgaggaagatgaggatgcaaagctggcacgactgttgcaggaagaagagtattggcaatctatgaagcagaagaaaaactctagaccaacctctgtatcgaacaaatactatataaaaattaatgaagatgagattgccaatgattatcctctacctgcttattataaaacctcccttcaagaaacagatgagtttatagtctttgataatgactatgacatatatgacactcaagatctccctcgaagcatgctgcataattggtctttatacaactcagatgcaagattggtttccttggaacttctgcctatgaaaccttgttcagatattgatgttgcaatctttggatcaggtataatgacttcagatgatgggagtgggtttcatcttgatactgaggctggccaatcttcttctgttggttctggagcccaggttgctgatggaatgccaatttatctgagtgccataaaggaatggatgattgaatttggatcagctatgattttcatatccatccgaactgatttggcctggtatgatgcctcttgtctaaaataaatgctatattttttttatatatatttcaaataaaatagaattagaaaatccatttgattacctgggcatcaaactgtcaaatgtcaataaaagctagttgtaaccaaattgttgcaagaaaattgggttaactgttatggatgaacttgtcatatcatgtgaatcaaacatctgtagataatgtttgtaaattcatcttagaataatttggttctaaatgtcacaaaatgaaaaccaggatcattcatacttcattcctttcaggtatagacttggcaaaccagcaaagcagtatgctccttggtatgacacagtattgaaaactgcaaggcttgctataagcattatcaccttgctgaaggagcagagccgagtatcacgcctttcctttggagatgtcatcaggaaagtatctgagtttaatcagaaagatggttcttacatttcttctgatccattgactgttgagagatatgttgttgtccatggacagataattctgcaactgtttgcagaatttcctgatgataatatcagaaagtcttcatttgtgactggtcttacaaataaaatggaagagcgccaccataccaaatggttagtgaagaagaagaaagttgtgccaaggagtgaaccaaatttaaatcctagagcagcagtgggtcctgttgtatccaagaggaaagctatgcaagctacaacgacaaggctgatcaatagaatatggggagagtattactcaaaccacttgccagaagattcaaaagagggaattgctagtgagttaaaggatgaggatgaagtggaggaacaagaagaaaatgaagatgatgataatgaggaggaaacaatacttttggagggaactccaaaggcacattcagcttcaaagcaaaccaaaaaaatttctgctgacacagaaataagatgggaaggggaacctgaagggaagactagttctggatatcctgtttataaacaggcaattattcgtggtgaagttatttctgtaggaagatctgtgttggtggaagttgacgaaacagatgaatttccagatatatattatgttgaatatatgtttgaatcaaagattggaagaaaaatgttccatggtaggatgatgcaatgtggttgtcagactgttcttggcaatgctgctaatgagagagaggtgtttttgactaatgagtgcagggatttgggactgcatgatgtcaaacagacagttgttgtaaatatccaaaataggccttgggggcatcagcatcgaaaggataatatcattgcagatagagttgacaggactcaagcagaagaaaggaagaagaaaggactacctactgactattactgtaaaagcttgtactggcctgaaagaggtgctttcttcacccttccacatgatacattgggtctagggtctggtgtctgcccatcttgcaaaatacaggatgctgaaaaggagaaggatgttttcaaagtaaattcctccaagtctggtttcctatttaatggaactgagtattctcttgatgattatgtttatgtaagtccttttgaatttgaggaaaagatagagcaaggaactcataaaagtgggaggaatgtggggttgaaagcttatgttgtgtgccaagtgcttgagattgttgtcaaaaaggaaataaaacaagctgaaataaaatctacacaagtcaaaatcaggaggttcttccgaccagaagatttatcaaatgagaaggcatattgctctgatatacgagaggtataagctacttaaagttaatacttgaacttgaatcaacccatgcacacatggacataggagaggcatgacaaatgattttactgaaagagcaagtaaaacttaaatagcatgattgtgtggattttataatattatttttcctaagtcattggtgcttgatctgactgataagtgagctgctatttgtgcatattgctcttataatttgagtattggttctactttgtttatcttctgcgcaagtttttatactgattagtatttgataattcatattttaggtgtattacagtgatgaaacatatataatctctgtagaatccatagaagggaaatgtcaagtcagaaaaaagaatgatattcccgaatgcagtgctcttggtggaatcttccaaaatgtttttttctgcgagctcttgtatgatcctgccactgggtcactgaagaaggtactgtgtacttgtccctgttagacaagcgtgtaatgtgcttgttaatccagcagaaaaatctgcaaaattattggaattttatggtttattgaattttctgctttacattatggcctatttggactcttgttattgaactcattgtatggttaagttcaattactgtatgctgtgttctgttctgatttcattaattacaacctttctgtagtgctgattaacaatgattgctttgtggtgtgttgctgtgtgttataatctttctaaagcttgatcttgttgcctggtttcacattatacatactttcagtagaaaaatagttcaggagcttaaatttatgttattggaaagtgttacattgtagcaactgaggtttttcactggtactaaacatcaactcaaacagttgccataatgacattgtttactggtattatgaaaaactctcttgttagtagatcaatactcaatttaaaatcattgtaaatgttctatattaatagcctatctgccattatttttgtaataattaaacttaaattaagtattttagtttagcttaagataacagcatcatcattattattcttcatgacatcaattcaacaacaggtggaagtacaaggtatggtttttcaataattaactattttccttttcaattgcttgacagttgccggctcatataaaagtaaaatattcaagtggacaaacatctgatgctgcagctagaaagaggaaaggaaaatgtatagagggagatggtgtttcagagtccacaaaggaaggaaaaacattaaatgataaacgtttagcaaccttggacatttttgcaggctgtggtggcttatcagaggggttgcagcagtcaggtaattttaactatataattatagaaagaaacccaactgtatatgctactgatgcataatataacgtgttttattgctaaaatacttcaggagtttcatcaactaaatgggctattgagtatgaagaaccagccggggatgcatttaaagctaatcatcctgaggcattggtgttcattaacaattgcaatgttattcttaggtaaataatcccatttagataacatattccaggccctaaggttgacaagagtggaacttatttaagtgactgttaaattattcgttatgtagggctgtaatggagaagtgtggggacacagatgattgtatctcaacatctgaggctgcagaattggctgcaaagcttgatgagaaggaaataagtagtttaccaatgcctggacaagttgatttcattaatggtggtcctccatgccaggtctctagctgttggctttttgtttattgtgctgttgaatatattgtagggtaattgtttaacaccgttgttttgctttcagggtttctctgggatgaataggtttaaccagagcagttggagtaaagtccagtgtgagatgatattggcattcttatcctttgctgattatttccggccaaggtatttcttgttggagaatgtgaggaactttgtgtctttcaataaaggacagacattccgtttaactttggcttcacttcttgagatgggttatcaggtaagattatgttactgcatctttcttcctgagtaattgtactcagaatcgatgaatggaattgaacctcaaggaaggaactaatgaatgcattccttcttgtctaaaaggtgaggtttggtatccttgaggctggagcatttggggtttctcagtcaagaaaaagggcattcatatgggctgcttctcctgaggatgtgcttcctgaatggccagaaccagtgcacgtcttttcggcccctgagttgaagatcacattatcagaaaatgtccagtatgctgctgtccgcagtactgcaaatggtgctcctttacgtgcaataactgttcgagatactattggtgatctcccagctgttggcaatggagcctcaaaaggaaacatggaggtgtgtaaaataggaaagatacatgtcttatattcttcataatgcgagttttttctacactcactacttaactgggttttatgttgcatagtatcaaaatgatccagtctcatggtttcaaaagaagattcgaggtgatatggttgtcttgactgatcatatatcaaaggagatgaacgaattgaacttgattcgatgccagaaaattcccaagagaccaggtgctgattggcgtgaccttccagaagaaaaggtgatgttcaatatttgtgaattttagcacgacattttgtgatctaatctaatatgtgaaatctaatgaaatgcagataaaactgtctagtggacaagttgttgatttgataccatggtgcttgccaaacacggctaagcggcacaatcaatggaagggactgtttggcaggttggattggcaaggaaatttcccaacttccgttacagaccctcagccaatggggaaggttggaatgtgcttccaccctgaccaagataggattcttactgttcgtgaatgtgctcggtctcaagtaagtccattactctagttgtctccctaaatgctttgatacgaaatgaaatcctaacaaggtggaattactaatatttttgaactattattaataattagaaaactattgtccttatgatctctgcctaaaaaataggaatatatcatatagtttggtataattttttatacccacgcatattttcatctattgtgaatgcagggcttcccagatagctatgaatttgctggcaatatcatacacaagcaccggcagattggtaatgctgtgcctcctcctctagcatcagcattggggagaaagctcaaggaagcagtggacagtaagagctccacttagaagatgggccttctacattaggtcatgcttattgtattcataacagtcaccaagatattgcaaatcatcattccgggttccaaaaactagaaacccttgtatatagtgatatccattggtcatttgttgaggctaattccttgtttaactttcctcaaccaaggaattgaatggatgatgctcattttctatcaactaggattttcttgattagatggtattttggctgtttatgaaagaaatggttgggaattgattacctcccaatgtgtagttgaaaattgagaccaattttttttaacctgttatgaatatttgttgttgcaactatttggctaagaactaccaaaaaaaactatttacctaggaaacttgcataatatttaatcgagg

SEQ ID NO: 193 - DNA, 9406 bp, Glycine max
  source 1..9406: mol_type = genomic DNA
ttcatatctttctgtaccatttatttgaagattccaaaatgaataaaccatcaattttgtcattgaagtatggccctttctttctcataaattgtcccaaaagtaataaaagtatttagctaatccccgtagtattgaatatttatcaatttggtccttaagtttatgtatttgagaaaaatttagggatcaatttgaacaatttttttaatgtttggaggattacttagcatgatatacaatacttgtggcactactcgagtaattatattttattttttacattagccatcattcaaaagaaagggtaatagtttgaggacaaaattaatgacttactcattacaaaatagactcaaggggcatttagaaaaacttattttaaaattagctctttttagcttgtttcaataagcttgacatctttctgtaccatttaataagagtttattgaaatgcatccctaatagtattacattacaacttaatttgcttatgcaaaatatgttgataatccctacatattgcatagacatccagttgttgagattctaacaagtcatgattttatccagagcatgttttgggactttaccctgatatcaagcctcgcaaacgacaacgagggatctcagtgaaaaatattattttttcagtgttaaagtgctgcatcaattagttgatcaaaagtttaatgtacaatacaatgcagtaattattcacaaaacatttgaagcataaatgctgcataagatgtgactgctgcatagttttgatgcatgatttagcaactgtgtccatattaagattgttaatttatttagatagactcttttttttttaaatgtaaattatattaaacccaaaatgatataacaatgtccccgtataaaagaaacttaatcttgttaataacttctattacagaaaattgataatctttaaaaatcaatttattcctagacagccagatgcagtagactgtaattgctatggtcacacaacaaaattttccttgaacacctcatgtggatctgtcccctaattaaagagtaagtaatgtgttgtagagaaataaagcgtccgtggaaatgaacccaatcacgaatatgagtccaaacttagagaggtttttttgcacatttaactccgcctcatttaaacataagagacaaaagaaacccttgttaaaaaaaattctaataattacaaatttaaaaatactatatttagtattatctaaacaagattcattttatcaaacatatctttgagcaaaaaaatatccacataaaaacattgtataaactcattttttttaaaaaaaaacttaagtttttaagatacttttaattcaaacctaagatcatgaactttaatcgaaacatccactaggaattctaaaatcctgcgaaggtgaaagagaaattccaaaatgcaatgactttttcgatttcatgtaagcttgtaacaaaagcttttgatattttttcttttctaatttttaaattcctaaaatttcagtttgaggggcgggaaaaaaaaaaattctctcttccaaaatttgcgtccctcccgccaaagaaaatggtccaatcttatatagttgtgtggaggtaaccctaaattcaaaatatgcccctgcaacccaaatcttctgaaatcctaaactaagtttctgtgctaagtgctaaccctaattcgttatggcagatggagcggtagcaagagggaggtgacggacgcttttcggagacgcaaattgaggagtagccgcaaagcccagaaaacgccctgaaccctaattcgtggaagacatgggttcagcttctcttctaaatccttctcaaccaggttataataacattaacattattaaatcttttaggatgttagtatttggtaatgcacggattgtgatgaagggcaaatagattttaaatctctatgtaattcttttttttaacacgagaggcaaagatagactaaaaggatggaaaatattttggaaatctatttgatgctcgcatagataagtatcatcttttatgtacctgcttttgtatgatcatgtatgaaagttctatgccctttttgtccttctatattttacaggcatagtggatgattatgatgcttataagttacttagcagttccttctgcctcaagcatgtcccaattgtcatttgttgtgtcccctatacctgcattactgcttaccttatttttcttgacaaaatttttgaatttatgtcttttttttttttggctaaataggcgttaagaagaatgacaagagcaaacagaaatcggtcgtttccaaaactgaagaggaagttatgtttaaagataaacaaaagaaacggagtttgtcggagagcagtgagcagactgctgctatgcgcaaaatgccaaaacgtgctgcggcatgtaaaaatttgaaggagaaatcctttttgatatatgagaagtcctgcctcattgaaacagagaaggatcatattgtagaagaagaaagtctggctgtccgcatgacagctggacaggataatggttgtccaaataggcgcattacagagtttatccttcatgatgaaactggtaaatcccagccacttgaggtgctggaggttgatgatttgtttatcactggacttgtattgccacttgaagccagctctggcaagaaaaaagagaaaggtgttaagtgtgaaggctttggtcgaattgaatcatgggatatatctggttatgaagatggctctccagtgatatggctttctactgaagttgctgattatgattgccagaaacctgctgctagttacaaaaaagtttacgatcttttccttgaaaaggcccgtgcatgtgtagaagtatacaagaaacttgcaaagtcctctggtggtgaccctgatataagtcttgatgagttacttgctggcatggtgcggtctatgagtggtagcaaatgcttttctggagctgcatctataaaggattttgttatttcacagggtgagttcatttataagcaacttgttggtttggatatgacatccaaggcaaatgacaggatgtttgcagatattcctgctcttattgctcttagagatgagagtaagaaacaagtacatgcacaggtaatgccctcaaatgggagtttaaggattgattcaggagttggagatgaagaaaacaagaatcagatggattcagtagcttctgtaaacgaggaagatgaggatgcaaagctggcacggctgttgcaggaagaagagtattggcaatctatgaaccagaagaaaaactccagatcagcctctgcatcgaacaaatactatatcaaaattaatgaagatgagattgccaatgattatcctctacctgtttattataaaacctcccttcaagaaacagatgagtttatagtttttgataatgactatgacatatatgacactcaagatctccctcgaagcatgctgcataattggtctttatacaactcagatgcaagattggtttccttggaacttctgcctatgaaaccttgttcagatatcgatgttgcaatctttggatcaggtataatgacttcagatgatggaagtgggtttcatcttgatactgaggctggcaaatcttcttccgttggttctggagcacaggttgctgatggaatgccaatttatctgagtgccataaaggaatggatgattgaatttggatcatctatgattttcatatccatccgaactgatttggcctggtatgatgcctcttatctaaaataaatgctatttttttatatatatttcaaatttcaaatgcaatagaattagaaatatccatttgattatgtgggtagcaaactctcaattgtcaatataagctatttgtaaccaaattgttgcaagaaaaatgggttaactgcaatggatgaatgtcatatcatgtgaatgaaacatttgcacatattatttgtaaattcatcttagaatagtttggttctaaatgtcagaaaatgaaaactaggttcattcatacttcattcctttcaggtatagacttggcaaaccagcaaagcagtatgctccttggtatgacacagtattgaaaactgcaaggcttgctataagcattatcaccttgctgaaggagcagagccgagtatcacgactttcctttggagatgtcatcaggaaagtatctgagtttgataagaaagacggttcttacatttcttctgatccattgactgttgagagatatgttgttgtccatggacagataattctgcaactgtttgcagaatttcctgatgataagatcagaaagtctgcatttgtgacgggtcttacaaacaaaatggaagagcgccaccataccaaatggttggtgaagaagaagaaagttgtgccaaggagtgaaccaaatttaaatcctagagcagcagtgggtcctgttgtatccaagaggaaagctatgcaagctacaacgacaaggctgatcaatagaatatggggagagtattactcaaaccacttgccagaggatgcaaaagagggaattgctagtgagttaaaggatgaggatgaagtggaggaacaagaagaaaatgaagatgatgacaatgaggagacaatacttttggagggaaccccaaaggcacattcagcttcaaagcaaaccaaaaaattttctgctgaaacagaaataaggtgggaaggggaacctgaagggaagactagttctggatatcctgtttataaacaggcaattattcgtggggaagttatttctgtaggaagatctgtgttggtggaggttgatgaaacagatgaatttccagacatatattatgttgaatatatgtttgaatcaaagatcggaagaaaaatgttccatggtaggatgatgcagcgtggttgtcagactgttcttggcaatgctgctaatgagagagaggtgtttttgactaatgagtgcagggatttgggactgcatgatgtcaatcagacagttgttgtaaatattcaaaataggccttggggacatcagcatcgaaaggataatatcattgcagatagagttgacagggctcaagcagaagaaaggaagaagaaaggactacctactgaatattactgtaaaagcctgtactggcctgaaagaggtgctttctttagccttccacttgatactttggggctagggtctggtgtttgcccatcttgcaaaatacaggatgctgaaaaggagaaggatgttttcaaagtaaattcctccaagtctggtttcctattgaaaggaactgagtattctcttaatgattatatttatgtaagtcccttcgaatttgaggaaatgatagagcaaggaactcataagagtgggaggaatgtggggttgaaagcttatgttgtgtgccaagtgcttgagattgttgtcaaaaaggaaattaaagaagctgaaataaagtctacacaagtcaaaatcaggaggttcttccgaccagaagatgtatcaaatgagaaggcatactgttctgatatacaagaggtataagcaacttaaaagttaatacttgaacttgaatgaacccatgcacacatgcacataggagaggtatcacaaatgattttactgaaagagcaagtaaaactggctacagcttttgtaccagtcttagatagcatgattgtgtggattttataatattatttttcctaagtcatcggtgcttgatctgactgtgataagtgagctgctatttgtgcatattgctcttataatttgaggattggttctactttgtttatcttgtctataagttttatactgatttgcatttcataatttatattttaggtgtattacagtgatgaaacacatataatctctgtagaatccatagaagggaaatgtcaagtcagaaaaaagaatgatattcccgaatgcagtgcccttggcagaatgttccaaaatgtttttttctgcgagctcttgtatgatcctgccactgggtcactgaagaaggtattgtgtatttggccctgttagacaagtgttaaggtgcttgttaatccagcagataaatctgcaaaagtattggaattttatggtttatagaattttctgtttttcattttaaatgagtatggcctatttggactcatgttattgaactcattgtatggataagttcaataactgtatgctgtgttctgttcccattttcatttaattactgtccacaacctttctgtagttctgagtaaaaatgattgctttgtggagtgttgctgtgtgattagaatctatctaaagcttgatcttgttgcctggtttcacacaatatatacttttggtaaaaaaaatattcagcagcttaaatttatgttattcgaaagtgtcacattgtagcaactgaggtttttcacctgtactaaagatcaactcaatcagttgccataatgacattgttcactggtattatgaaaaactctatcttgttattagatcaatactcaattcaatccaatttaaaatcattataaataatatcctatctgccattatttttgaaataattaaactcaaattaagtattttggtttagctcaagataacagaccatcatcaattcaacaacaggtggaagtattaggtatggtttttcagtaattaactattttctttttcaattgtttgacagttgccggctcatgtaaaagtaaaatattcaagtggacaaacatctgatgctgcagctagaaagaggaaaggaaaatgtatagagggagatgatgttttagagtccccaaatgaaggaaaaacattaaatgaaaaacgtttagcaaccttggacatttttgcaggttgtggtggcttatcagaggggttgcagcagtcaggtgatcttaactacataattatagcaagaaacccaactgtatctgctaccgatgcaaaataagacttttatttctaaaatgcttcaggagtttcatcaactaaatgggctattgagtatgaagaacctgctggggatgcatttaaagctaatcatcctgaggcattggtgtttattaacaattgcaatgttattcttaggtaaagaatctcatttagataacatattccagaccctaaggttgaaaggagtggaacctatttaagtgactgttaaattattcttgttatgtagggctgtaatggagaagtgtggggacacagatgattgtatctcaacatccgaagctgcagaattggctgcaaagcttgatgagaaggaaataagtagtttaccaatgcctggacaagttgatttcatcaatggtggtcctccatgtcaggtctctctagctgttggctttgtatttattgtgctgatgaatatattatagggtaattgtttaacacttgttttgctttcagggtttctctgggatgaataggtttaaccagagcagttggagtaaagtccagtgtgagatgatattggcattcttatcctttgccgattatttccggccaaggtatttcttgttggagaatgtgaggaactttgtgtctttcaataaagggcagacattccgtttaactttggcttcacttcttgagatgggctatcaggtaagattatgttactgtgtctttcttcctgagtaattgcacttagaattgatgaatagtatagaacctcaaggaaggaactaatgaatgctgatttgcttgtctaaaaggtgaggtttggtatccttgaggctggagcatatggggtttcccagtcaagaaaaagggcattcatatgggcagcctctcctgaggatgtgcttcctgaatggcctgaaccaatgcatgtcttttcggcccctgagttgaagattacattatcagaaaatgtccagtatgctgctgtccgcagtactgcaaatggtgctccattacgttcaataactgttcaagatactattggtgatctcccagctgttggcaatggagcctcaaaaggaaacatggaggtatataaaataggaaagatacatatcttatattcttccataatgagttttctctacactcactaattaactgggttttatgttgcatagtatcaaaatgatccagtctcatggtttcaaaagaagattcgaggtgatatggttgtcttgactgatcatatatcaaaggagatgaatgaattgaacttgattcgatgccagaaaattcccaagagaccaggcgctgattggcgtgaccttccagaagaaaaggtgaagttaaatatttgagttttagcataacattttttgtgatctatctaatatgtgaaatctaatgaaatgcagataaaattgtctactggacaagttgttgatttgataccatggtgcttgccaaacacggctaagcggcacaatcagtggaagggactgtttggcaggttggattggcaagggaatttcccaacttccattactgaccctcagccaatggggaaggttggaatgtgcttccaccctgaccaagataggattcttactgttcgtgaatgtgctcggtctcaagtatgtccataactctagttgtcaccctaaatgctttgataagaaatgaaatcctaacaagttggaatttctaatatttgtgaactattatggataattttgatcatgttaccttaatagagatgtcctagaaattagtttctatgattaagtagtgagcataataatgtttaataagtaaatagaaaactatagtccttatgatctcggcctaaaaaataggaatatattatataatttgatataattttttatacctgagcatattttacatctttatgaatgtagggcttcccagatagctatcaatttgctggcaatatcatacacaagcaccggcagattggtaatgctgtgcctcctcctctggcatctgcattggggagaaagctcaaggaagcagtggacagtaagagctccacttagaagatggggcttctacattttttgaaatatcatgcttattgtattcatatcagtcaccaagatattgcaaatcattattcagggttccagaaactagaaacccttgtatatagtgatatccattggtcatttgttttgaggctaattccttgtttaactttcctcaaccaaggaattgtatggatgatgttatgatgttcattttctatcaactagtattttcttgattagataatattttggctgtttatgacagaaatggctgggaatttagaattacctcccaatgtatatagttgacaattgagaccaattttgtcattttttttaacttgttatgaatatttgttgttgcaagtatttggctaagaactaaaaaaaaggtaataccttctttccata

SEQ ID NO: 194 - DNA, 15987 bp, Glycine max
  source 1..15987: mol_type = genomic DNA
accacatgtccatacatcaaatccctcttttacatagcaaatacaggccctcgtgttatacgatgttccaataatttcaaaaccataaatttttcaatccctcgattattgtctttcttatatttgaaaatcttgagaaaggttaggcgatacacgttcctcatgtccttcccattatagtccggttcaaaacctcgacaaaatttccataggaggcctcgatagtccatatgtctactttaatcggtctacccacagttgttgtgagtgccaataggacattctcatcattcccaaatttggaaaaatgatctataccattgtgttgtcaatattaacttacgagaggagacaaaatccgttaccgatggttgtatagcaagataatgatcaaagatcatatagacccccttacattttccctatcctctcataaataaaactttaccatatgaaatctatgctcgacatcggccccattcattcctccaacaggttttcatgttgtttttaatcgatcatgcattctacagaagctaagatgcttcctcaacaatttgataatgataacatccttgtaaggccgccaaagttattgaagaataccccagtcaaacatttgactccaaggattgaagaagatttagattaaagattttagaatttattctcgctttcaattgtccgatgtgtttaagtttttttttttttgttaattgcctaaataaaagattgtaatcaatctttaaattgattcaaaaaatcttttcctaattttaattaatttgattcaagacgataaatttttctcaagatttattttatttatcattaagaatttcaaattacaataatatgatatcttagttattattattagattctaataataattactaacatatatcattcgaatgactatgatactttacttttttatttatacctaaacatttgatgctaaaaattactaagtccaaaatcacactaacctagagattttaggttatgtttggtatgaaggggaaaaataatatattaaagacttaaatatatttttgattgttttcatttgtattttttttatttttgtttttgtaatttttgtagttattataaaatatgtttactttattttcaaaatattttaaataatattttaaacaataaaaaataatatataaaatattttatggacgaaaaataaaataatcatatttaaaacatactaaaataattttttagagataaaattaaaaaataaagaattacaaaaataaaaaatatatttaagtctatactaaaaaaaatatactttatcttatttcatgaaactcataatttttacactttattttaattaaaaaaatattttatttttgtcgtctaaaccaatcacatgatagctttttaggagaggagggcaaaggcgtaaaagcgaagcaaagggaagggttatatataacctagagacaagagcccaaaagcacagtgacttaccttttatcaaggcctgggtctacacaagtgccccttctcaactcggcgtttgtctcgtggtcgcgtggaaagtgaccggcggtgttccattttgctattcattcgtctttactttactgcgctttctctctcactcactcactccaattcgttcttgggtttcgattttggtcttcgcagagcattgccgcgtagctcgcacacacacacaccaccagtgtctgcgttcgtgctggttaagtcgatcattcgttcttttcactcaagtgagtaataacaacctctctatttctctctttcgtcatcgcttttcaacgctcaatattttccctgtttcctgatactcgtttaatcgctccatttgcgagtacggtgtgcttcgcggccaagtgtgcatgatctttttcttttgctgcatgttacatgatcatgcttttagagggttccagaatggattttccgacaatgtgcctacacttttcactcaatactattatttttttttgctaataagtctcctattaatcctaataaagtgcgtgtttgattgataacttcattatacgattcgattactatatcaggtttaatgttttaggccgaatggcgtgttcaatgttctcttctccatgatatttgatttcttgacatgtatctagtaggcattgggtgcacaagatatatgttttttcctcccctccaaaatccaaattcgctactgaagaaatttagacacttcttggtttagtatcccaatgagcttatatgccccaagtacaagccgactccaaaaatgaagttaacgtgtttagttttctactaaccaaagcaaattattacttcaccctttccaattttgcttcctctttttatgtattttttgcttacttgacttaatttaaggtattttgttgaaaactgagagtaggaatgctacgaaaaatgttattatcttctggttacttttatagatcatatcttcctttacctgttctttgtctttagaaatttttgttgtatcaatcgtatcagtaccagtactcagccatatttatatgcaacctagactaagctagcaaatatacaagttcaggattagatagtatgggtatggataattttactcacacagccagttgttttttttttttattatctcattttgtttacacactatcaatgctctgcaaatgaacagattacttgaaattttctgccgagtgcaaggttaccaagtttgatggatgatgaccttttccagaggaacaaaacaccatctggtgtcataaaagcgataaagtttgatgtcttaactgaagaagatatagttaagtatattcttgatcttatatctatttcagctttttaattattctgtgtgtattagttcactgttactttagttgtgggatttgatcaaatggtatgcacttactgtgtaacacattaacacagagtggagggtgggtcatcaattttgttgaccttttaaaagataaatctgttctgtagaatggattatctgccataattctcttctgattgccttgtaatttattagccacatattaaatgttaattaggttttcatctacaggagaatatcgctgttttggagataaatgcagccgggcaggtcactgggtcaagtttgggtttcccaaatgcatctgatgagtgtgccacatgtggctctaaagacaaaaggttctgtgaaggtgtgaaaagacattatatgaaaaatgtgtttaggggttttgctacattaaatgtaaatttattggaaaaggtgctgaaaacatcaatatttaatttcaggtcattttggagtaatcaaatttcctactcccatactccatccatattttatgtcagaaattgcgcacatcttgaacaagatttgccctgtttgtaaatctattcgtcacaaatccaaggtcatatatcttttacttgtaccaaatactgggattcttagtgtgatttttttattgtaatgcggatttggttttttagtccactgctactgtatttaaaaataagttaaaccaaatacacatttagatcatatggcaaaactttaggtgtcttaaaatcttttcccaatattccccacctttttaaagttacatagtttctactgtacaatcagacattatttgagaagttccatgtgctgcatcacaatatcatttattttctttgccgttttcattgttgtagttttatgagttggcttctatggattttattattacttgttttctgcctcctatttatagttccattgtcttcttacagggtgttcgattgatctatggaaccaagcggtctaatgattgcaattattgttctgtaagtttgtgtggcttcaccttcattgatttgcttcaaagtaaaattccttttttattgttctgttttgctttgtatgacaacttgtgcatcacatgtaggcgtatccatcaatgaaattcagagtttcttccaacgatctctttagaagaactgcaattattgttgaagtaaaggcttcaaagaaaactttggggacagaaatacctgctgattattggaattttattccttgtgatgctcaacaagaagaaaactatgtaaatagaagggttttatctcctgcacaggtagcactacccacatttacatgcttttgaagtctgtataattttcattcagatacgataaatttgcactatatcaaaattaaaatataatctgtcagaaggttactagtaatagtatgccttatgatcttgttatatcatgttaaatatgattaagatgagaacatgttctgctttcacttttcagcttgattgctttttatgctgtgttattctaacttttgagtcatttctattacatagccatgcttttttgctggtgctataacagtgtaaattttatatctttctgattttcaggttcttaatttgttgaatggtgttgatccagactttattgaaaaatatattccaagaaagaatttgctgtatcttaattgcttcccggtgactccaaattgtcatcgtgtgacagaagttccttatgcaatttctagtggaagccgattgagttttgtcagtatatttcttttctgccttgtagtttttaatataataatatttataaactgtcacatgtagtcacacaatgtctatatacatttttttaatatggtactttatctggttaaatatttataggatgacaggactcgatcttgtaagaaattggttgatttcaggggtacgcccaatgaattaagttctcgtgttttggattgcttgaggatctctaaggcaagatgctcagctgtttttttcctgttatttttgtcactttgtcaaggttcttgcctttcgcttatgtttttcttttgatgaaatgcagctaaatcccgataaaacaccaaatagtatttttgctgatatccagcaaagaaagattggagaaaatgcttgcaattcttctggtttaagatggataaaagatgtggttcttggaaaacgcaatgatagttcattacgtactgtggttgttggtgatccagaccttgagcttagtgaagttggtataccttgtcatattgctgaaagtttgcaggtttctgagtatgtgaataggcagaatagggagaagctgctttattgttgtgagctacgcttgttagagaaggggaaaatagatgtctgcagaaatggtagtaaagttcatctgtataaaaaggaagatctacaaataggtgacaaaatttataggcctcttgctgatggggataaagtgctgataaataggcccccttccatacatcaacattctatgattgctctcacagttagggtccttccaatatcttctgtagtgtgtattaacccactctgttgttccccattacgtggggattttgatggtgattgccttcacgggtatattccacaatcagttactgcaagaattgagcttaatgagctggttgctttagataggcaattgattaacgggcaaagtggtagaaatctgctttcactttcccaggatagtttgactgctgcttatttgctaatggaagatggggtccttttgaatgtttatcaaatgcagcagcttcaaatgctttctatttctgacaaaagattaatacctcctgcagttgttaaagctccttcaagtaatagctcactttggagtgggaagcaaatattcagcatgctcttgccttatgattttgactattcttttccttcagatggtgttgttgttagtgatggggagcttgtatcttcttctgaggcttctggttggttacgcgattctgactacaatgttttccagagtcttgtggaacattatcaagggaagactctaaactttttgtatacagcgcaaaaagttctgtgtgagtggctgtctatgacaggttttagtgtttcactctcagatttgtacctttcttctgattcctatgcacggaaaaacatgatagaggaaatcttttatggcttacaagatgcagagcaggcttgtaatttcaagcagctattgttggattgttattgtgattttctgtcaggaagtatccaagagagtgaaaatgctatcactgttgatgctgatcgtctgaattatgaaagacaaatatctgctgctctcagtcaagcgtcagttgatgcttttaggcaagtttttcgcaatattcaaagtttagctgacaaatatgcatgtaaggacaatgctttccttgcaatgtttaaggctggaagcaagggtaatttgttgaaattagttcaacattccatgtgccttggcatgcaaaattctctggtccgcttgtcatacagattaccccgtcatctttcatgtgctgcttggaatagtcaaaagtggcttgattcaatccagatgtcttctggtacccttgaatctgttcagtcttacattccatatgctgtggttgaaagctcatttttaactgggttgaatccacttgaatgttttgttcattcagtgacaaatcgtgatagctctttcagtgaccatgcagaccttcctggaacactgacacgtagacttatgttcttcatgcgtgatttgcatgatgcatatgatggaactgtgagaaatttatatggtaatcaacttattcagttttcttatgatattgaagaggactcttcatgtgataaaggtttccaagagtatgctataggtggtgaaccagttggggcaatttctgcttgtgcaatttctgaagctgcatacagtgctttgggtcaaccagttagtctactcgaaacatcacctttgctgaatttgaaaaatgttttggagtgtggttcaaggaaaagaaatggtgatcagactgtgtctttatttttgtctgaaaagcttggtaaacagagacatgggtttgaatatgcagctttagaagtcaagaattatttggaaagattgttgttctcaaacattgtttctacagtgatgataatattcaccccacatgacggcagcagccaagaaaaatacagtccttgggtctgccactttcatttagacaaggaaattgtaactagaagaaaattgaaagtgcattctatcattgactctctctaccagagatattactcacagagaaaagactcaaaagtctgttttaccaatttgaaaatttcaagcaagtaagcctcttctgctaatggtgcttcaaacaatatatgttgttacttgaggaaatattaactgttcatgaatgctataaaaagattgatgctaatgtctttgatgggaactgagagttaagggaagttatgacagttgcattacttctcctaactcttagttcccatcagtctctattcagagttcgatttttaatttgctgtgctagaagagtaaaggatatttaaggatacttaattattaaatattaatgtagataggcaatgaactatctctatacatgttgttcctgtatatttattatgtcatgattccagaaggtttttgttgcttcaattattgccaagtggataattggatatgcttcttgtacttgtttctttacttttaacaacagcatttatcacttagctaattttcatgcaattcctgactcttgtaataatttccccacaacccttaaatagaactgaaatcctcttgactttgatacaattaggatttgttacagaactacagagaacttttcgaataacagaaaaaagttgagaatggagattgaaaattagaaatgaagttagacaaatgagttttctataatttttttgaggcttataagaaatgaaaaaaatggttttgtacatttcaaaagaagtttgtgaactttctgatggcgtaaatatatataaccctaacacaatggcaggagctgttattttaattgtaactgattatgatgaaatctctattctttctgcattagttatttctgccacagtttgcaaatgttggagttggattactctcttctcaagaagaggaataatatgttacaactgtatataaggaatactatgtctctgtttcatgtctcaatacctactgaaatgtaaaggatgctagatagtagtgtgatagagagtttaaatcaaatatgttgaaggattgggtaacttggctaaattgatgttttttcagctctttttctttattgccgtgttttcttttcaagttgaagaggagcccttatcctcctaacccttcttcttcaccatttgcattttctttgtaactttttctgcattaattatcattcttgcttggagctttgatgatctctactaacttggacaatgaaatagcaggaagtgttctgctgattccatggctaaggaaggtgaagacacttctatagataaaaaagagggtgatgattgcatcacagtcacaattgttgaaaactctaagaatcctatacaactggattctgttcgggatttggtgataccttttcttctaggaacagcaataaaaggtaggtagtaatctaatatgaatatcaagttgttgtttcaagtggtgatttatatgtgagcctttttgaaattaccctgatgatcagatacatggctggggagtttctcaagctgttgttgaagttcaaattatgtttttgctgcatatatgacagtttaagttttctttgcagtcatgtcaacttttatgattccatgattgttacaaaaaagtttatacttgatttggctattataaatgtgaaaattaaaaatgctatttttaatccttttctttcttgggaaatggtgttaaaaagcagagttgtaagagcaagataggttttaacctgatcagatggctaggtcataacaattggtcataattcgttttttcaaatacaaatttggttttctatcaccagctttattgcatctggctcatgcacgaatatgtattgcttgttatggtaaagtattctcagattcagtcatcatcatgaattcttgtattgttcgttaggatttctggatgtcaagaaggttgatgttctctggaataatcagtcaaaagtaaaaaattcttgtaatggtttttctggtgaactgtacttgagggtaactttgtccagcgagggtagcagaggaagattttggggtgtactcctaaatctttgtcacaagataatgcatataattgactggacacgcagtcatccagataacatcaatcatttctcatcagcatatggaattgatgcagggtggcaatactttttcaatgtgtgtatgattaaaaacttcccctcctttgttttgggttctaaatgaaatatatggccgcataaacttaatttacttgcatgtggttttacgtgtagagtttggcatctgcaacatctgataccggcaagtccatccttcctaagcatttgtgtcttgttgccaatagtctgtcatgtagtggagagtttgtgggattaaatgctaaaggcatggcactacaaagaaaacatgcgtcagtttcatcaccattcgtgcaagcatgctttgcggtcagttgacatttatgattccagtctaatgctttatgatttatcatgtataagattttgatcacccatatataattcatgttgaaattatgtaatcttattgcagaatccaggtagttgctttataaaagctgctaagtctggagtcactgataatctccagggcagtctggatgcgttggcttggggaaactgtctatctatggggacaagtggaatgtttgatatcatatattcagagaaggtattggtttttaatattaattttcttgctttcattcagatttaatgtatcatgaatatgattccactagtattttagcccatgtaatgcacatgataaatgtttattttttatataactgaaatttataataaataaacatttttgaatgtataaattatattataattaaatttcgtaataaataaatattttgaatattatattataattaaatttcataataagtattttttaatatatagttaatattttggatctatgctaaataatttatattgtcaaacaaggttatacagggttatttttaactattgatactacctcctttccatatcttttgatgttttagctttctattttttttttcccaaaacaattgatgttttagaatttcaaagtctaattaatgtttttttctctcaaatatacccttatttaatacccattactagtgttgtaggtatcaaagattaaggtattaaataaggatattttagtctaaatacatcaatttttagtttcattaaatgtttcttaatctgtgtgcaataaccttaaacatcaaaagatataggaaggaggtagtaatttcttttaaaaaaattattgaaatttaatttagaagtagagatgaaaatgatagattgaaataggtaagtggttcagaaaattaagtattataggttccgtttgatttgctaaaatttacgctactaggcaggacaaatatttttgttttacatttgatttgaaaaaagaagtttacgagacaacacaaattaattagatgatgataggacaaaaactcaatttcttgttattcaaaaaaccatgagacaactttttgtcctaggtacaaagtattgaaaagacgcacataccccacctctctcttatttctcgctcattatctactagctgtaacaaccatattgtgtgatgtatttcgaatttacattatctattagctacaacaaacccttatcatgccatgtattttgaattcatattatctactagttacaacaatcttatcatgtcatgtattttgaattcacattatctactagttgcaacaatcttatcatgtcatgtatttcaaaattacattattgtttagttagcttgcttgtatgtattctgtattttcaatcctcataaaatataataataatgtaaaatatattaagataattaatattaaaaatgatattttagtaaattttatattattatgcttggcttgtctattattaatcaaacaatgcacatgataaaaaaattgtcctgcaatccaagtatttgtcctgttgttctctttgtcctgtaccacacaaacacaaccatataaagacaaaaggagagtggtttgagataattgagaaataatttttttgagttgttaaatgaaattaaaataaagtataattgaaaataataaaaagctaagaaataaaattaaatgctcaatatatgctagctcgtaacaagataagacatgtgatttaatgagagtcataacaactcctaacaacacttcctaagaacactttgaaaaatagctcgtaaaaacgctctccttcaggataaggattcagatttataatataggagtagatttttaaagaacccaagaatgtacaagtgcatttcagtcctccaaaagtgtcactttttaaatttttaatagaaaactgatatggttgtgcatgtacaagatatgaaaaatttcactgaagtatcaaaacttttgaccaacttctcacaagaatgcgacatcctccttgtaattattgtaggctttattttttacttttttcctgttcaactctagacctttgtaatacattctataaacactttaaactgatttataagtcgtgagattgttaaaatgtatgatttttgtttcttcagttgtcatttttcattttcaattcatacatgttagtttgctgtttcctagtaaatttactatggttaccatttctctgacaacaaagtaagtgcataaaagccgagattctttcagtttgtgctgagtaaggataggctaagaagagttcgagggttgttaattgttatggagcaaaactatcttgtatcttgcaagttgtacatgtaatactatcagttataatgtaacatttgcttttatcggggactgtaggtagctaagtctgggaatgtgtatgagctgctagaagccagttttgacaagccgaacaataaagctggtactcatttgcacaaatattcatctgacaaatgcggttctgagtttaggcataaaaatggttatgccttgaaagagggaaaacagtggaaaaccattttaagaaattttgtgacggtaaatgatatccagaagctgacttttgcttcgaggtgcatattgaacaagtaagataatccacttttttggccttttctaacctcagtcgtggtttgtgtttttaatggtatttagcactgtatattctatctatgacacttacattaccaatttaccatatatagcatgagctaatattatatagtactgctggaaggttgtatttgttattatgccatggtaatttcttgcagttaggtgcttccacgaaactactttctgctttgtaatcattatacagctggaaggttgtatgcattatttgccttggtagtttcttattagttgcttccacgaaactactttctgctttgtaatcgttatacagctggaaggttgtatgtattatttgccttggtagtttcttatttagttgcttccacaaaagtactttctgcttcgtaatcattaaattatgttttcattaagtaatgagttcatgctgctttgccttctagggaaatgtgcctgttgtttggatggaaatatttcattagacttattagagatataaaagtaaaactagactcaacctagcttgaacttttagaaaattggttcttaactcgttttgtatggagctatttctctctgttttgtatttagtatgaccaactacaaaattcccttttatttaaaactatccttgaggctcaacctagcttgaacttttagaaattggttcttaactcattttgtatgtagctatttcactctgttttgtattaaatatgaccgactacaaaattttctgacatattgctatcaatttatctcagttatttttagaagaaaataactaataaaaaattaagaacatgaataatttaatgagggagtgccgagtaagatgattgggagatgaagagaaaaactttaacaaacaacaacaaagccttaaccactaagggaattcaaatggttataatttgtttgtagtacagtagattcaaacatataattgaacttgatttaatttgctgaggtttattttattttattttctacataacaagcattcattgataaagtatcgtcatcattattattcctgcctttggggagactgccaaggcagttccatttttttgtctatttattctgttcctcaaggctgtctgatttagattattctcaacttgggagcagggtagtcaattttgttttacgtatggatttttcaaggaagtttagggcttgtttactttgagaaagcatttttttcccattcagttttcaattttaataacacaaatgacaccttattttcatttgttttttgttttcaaatatttgtgtagaaaacaatagaaatttattttcactgttttccatacaaagatttgaaaacagaaaacaaaatgaaaacaaactgacaattttgtattgtatttaaaagggaaaataaaaaaaagaaaacattttctaaaacttaaaggatccttgctttgacctgtttcctgttaagttacttttttaggtccctattgttttattgagtattcatacaagtccctgtatttaatttttttaattgggtctcctaaaaatatttagattgttctctattgttgaagttgttgcaaaactctatatttttttggacacagttttgtttagttgtctaagatcacttgctgtcattgagaatctatgatttgcagaataattgtgaattttggatgttgtctatgtaggtattcaattgatgagctgctaagtgagagtgacaggtcaacaatgctaagggttttgaattttcatcctcgtaaaagtgagaagtttggcattggaccacaggacattaaggtatgtgtgcttgcatgaggtggttttgatgtgtggtcaaaatttattttgttcttagtaccaatgtgcattaaggtatgcgtgcttgtgtgaagaaggtttggatatgcagtcaaagtttattttgtttcttcttggttcttgctaatgtacttaaaggtaatgtatattaaattggagtgcactttaaatttcacggttgggaaatttttctatattctctctgaagaaaattatatatattctccacttaaaatgctcctttgagaaaggtactttttttttctatgctacttcattatgaacatttatacgttattgaacttgatgaattcagtggagccatgaaaacaagtataagttggtcaaacatccctcctttgcctcccaaagtctttttgacaattttattcttatccattttctaatatacctatgtggatatatacagcaagaaacttttcaaacttttttacatgaaagttcattaaaaaaaagattatatgaccttcttttgaacactatcacttgatagctttgtatataagcataaaagattatccaatatttttgccctactttcattctaaaacttcagttatgcatatctgtatgattttatactaggaaaacactgcctattgcctaatacccccaaagaataagacaaaataaaagatgcagtcataagaattgagagcattgtttgattgttatgaacttgcttgatcagaatgaaacttttctttacgtcttgtttgtgtaaatgaaaaggctggagctaattatttcacttttctacgtgggaaatttcattccatagttacaacctaaatttataggtgtagtataaatttagtttgtattataatgtttagaatagcagccattcgcctcccactatagcattttgccgctatttggaattgataattatgattccatagtagcatttaagggataaattcccatcaatgataatgatatagcagttatgagaagaaagagatacttgtgtcaattttgcttcttttgccgtggtcaaatcacttgctagtaaaaatgtatcgtgtaatgaagttttcttcttgctcccggtcctggttgcccatgccttttttccttttctattcgcaggttggatggcatccaaaatacaaggatagccggtgcttccatatagtaagaattgatgggacggttgaagatttttcataccgcaaatgcattcttggtgctcttgatatcgttgatccaaaaaagtcaaagatccaggagaaaaaatggtcaggacatggtaacacgtaatatctatgcatgtccaagcataataagtgactatcatttgatctggtgacagtcacagactataaaaatagagtcggaagggtaatagtagtgccacaactctacaatcacaaaaagcaacgttgtttttctacctttgatttagaaggatgtccggaatcagtggtagagagcactgttctcttttgcgagtttagagttatgttattggcattactccagctaattggtggaaatagtttgcagccttcttttgttgtattttactatcttcaaggctagactgggtgatagcttactcaaatgttgctcgatggatttagaggcagagcagcgaatccagcgtaaagtcataacattttgaaagaagaaaggagaagatgcatagaagggaggatacaagatggaacaatgatagtatatattttttcaatatgaacaaattaaattttattttatatgttaaaagatggcgtgggttcttaccctgagcttctttttgcttcttccactaatactttatttgccaacgattacgtaaggcaaagaaagatctagtggaagcagcaacgagaagcttgtaaagacttatacccccagaccatttgtattgatgcggcagttaaatataagatatgtttaggttatgccgggttcaaatgtcatgcgtatctctgc

SEQ ID NO: 195 - DNA, 15987 bp, Glycine max; identical to SEQ ID NO: 194
  source 1..15987: mol_type = genomic DNA

SEQ ID NO: 196 - DNA, 15579 bp, Glycine max
  source 1..15579: mol_type = genomic DNA
tcttatctttaaaatcttgagaaataagattaggcaatacacgttcctcttgttcccattatagtctggttcaaattaattttaacacttacctcgacaaaatttccataggaggcctcgatagtccatatatatactttaattggtctgcccacctttgttttgagtgccaataggacattctcttcatacaacttcattctcaaattaggaaaaacgaatctatatataccattgtgttgtcaatactaacttaggaggagacgaaatttagcacccatggttggattgcaagataatgatcaaagatcacatagccccccttgcgataaccttttctttatcctcacataaatcaaactttaccatataaaatccatgcccgacatccactacattcattcctccaataggttttcacgttgtttttaatcgatcatgcattgttcaaagctaagatgcttcctcaacaatttgataatgataacatctttgtaaggccgccaaagttattgaagaataccctaatgtcaaacattttttactccaagttgtctctattctcaaaaacctatttaagatctataaaaagctaggaaggcaaccaaagaaaaaaacataaatatgatgggtgatataatctataaaaactaaaaagctaggaaggcaaccaaagaaaaaaacataaatatgatgggtgatataatgtgataagaagaaaaaaaaaatgagtattattgagatgtttaaaaaagtgagatgtaaaaaaatcattattctttgccttaaaataagtgtagggattgaagaagatttagagtaatgattttagaatttactctcggcttcaattgtccaatctttttaagtttttatttttgttgattggctaaataaaagatagtaatcaatctttaaatttatgcaaaaagaatgcttctcctaattttaataaattatctttgagaggatagattttttctcaagacttattttatttatcattaaaaaattaacgaattacaatgatatgatattatgatatcttaaatgaccatgacagtttacttttttttataccttaacgtttgctgctagaaattactaagtccaaaagcacactgactaacctagaatgattaagatacttttttttacacctaataataataatagatttaaatatatttttcatataacatatttctttttagcttattacctaaagaatattcatttttattttattatatgatattttcaaaaaatttcttttgttatttgagttagtcttgatttattagtgatggtgtgataaaattatcacttaacatacttaaactaactaaaagtttaaaaatattaagtagtaaaataaataaaaaattatatccgaacaacatagttaaaccattggagaggagggcaaaggcgtaaaagcaaagggaagggttatatataacctagagacaagagcccaaaagcacagtgactaaccttttatcgcgtcctcggtctacacaaagtgccccttctcaactcggcgtttgtctcgtggtcgcgtggaaagtgatcagcggtgttccatttcgctattcattcgtctttactttactgcgctctctctctctccaattctctcttcggtttcgattttggtcttcgcagagcattgccgcgtagctcacacgcaccaccaccattgtctgcgtgctggtttagtcgatcattcgttcctttcactcaagtgagtaataacatctctctctctctctctcgtcgtcgcttttcaacgctgaatattttccctgtttcctgatactcgtttaatcgctccattcgcgagtacggtgtgcttcgcggccaagtgtgcatgatcttttttttgctgcatgttacatgatcgtgcttttagagggttcccgaatggatttttggacaatgtgcctacacttttcactcgatactattaatttctctggttttgtttttttgctaataaatctcctacacttaataatcattgttagtcctaatcagttgtgcgtttggttgatgacttcatcatacgattcgattactatatcaggtttaatgttttaggctgaatggcgtgttcaatcttctttccatagtattgatatattttattcttcttttttttttcaggttaccttgaaattctgagtgcgcgaatttcttcgcacacgtgtggtgctattggcggcacaaaccggggagcgcagcttatcactgtgcccaaccctttttggtattggtttatatactttcgctacggtcttttttgcactgtatttgtttccttcgaacaattatcgcctcccaaagttactgcttaaaattcaatcaatttgtttttttttttcctgtctttaactctgcttatggatatcttaatacactccagagatttcctctattaaggaaatttggtgtgtccgacggcgcagatttcttaacattgtgttgttaaatggcggccatgccatggccacaatggcggaaaggcttgcctactgccataggcaacttatgaagggaggcctgcaatggcagcaacataggccgcaatggcacgtttatattgtggaatttctgcctcccgccatcaaccaatgataacactctatttcttaacatgaatatttgttttttgaaacctttctatcaataagtttgttcatctttgatttcttgatatgtatctggtaggcattgggtgcacaagatatgtgttttttcctcacctccaaattcactactgaagaaatttagatacttctcggtttagcatcccaatgagcttatattccccaagtacaagccaaccccaaaaatgaagttaacatgtttagttttctactaaccaaagcaaattattacttcaccctttccaatttttttcctctttttatgtattttttgcttacttgacttaatttaaggtattttgttgaaaactgagagtaggaatgctatgaaaaatgtttttatcttttttcttttatagaacatatcttcctgtacctgtgtcttttgtctttagatttttttttattgtattaatagtatcaataccagtactcagccatattttcatgcaacctagaataagctagcaaatatacaagttcatgtttagatagtatggctatgcataattttactcacacagccagttgtttgtttttttaatctcattttgtttacactctaccaatgctctgtaaatgaacagattacttgaaattttctgccgagtgcaaggttaccaagtttcatggatgatgaccttttacagaggaacaaaacaccatctgttgtcataaaagcgataaagttcgatgtcttaactgaagaagatatagttaagtatattcttgatcttatatctatttcagctttttaattattctgtgtgtattagttctctgttactttagttgtgggattggatcaaatggaatgcacttactgtgtaacacattaacacagagtggagggtggttcatcaattttgtttaccttttgaaagataaatctattttgtagaatggattgtctctcataattctcttctgattgccttgtaatttattagccacatattaaatgtctattatttttacatctacaggagaatatctctgttttggagataaatgcagccgggcaggtcactgggtcaaatttgggattgccaaatgcatctgatgagtgtgccacatgtggcactaaagacaaaaagttctgtgaaggtgtgaattgacatattatatgaataatgtgtttaggggttttgttacattaattgtaaatttattggaaaaggtgctgaaaacatcaatatttaatttcaggtcattttggagtaatcaaatttcctactcccatactccatccatattttatgttagaaattgcgcacatcttgaacaagatttgccctgtttgtaaatctattcgtcacaaatccaaggtcatatatctgttacttctaccaaatactggaatacttagtgtaatttttgttataataatgcgcatttggttttttagtccattgctactgtattttaaaataagttaaaccaaatacatatttaaatcatgtggcaaatttttaggtgttttaaaatctttcccaaatattccccaccttttttaagttacatagattctacagtacaatcagacattatttgagaggttccatgtgctgtagtacaatatcatttattttctttgccagtttcattgttgtagttttatgagttggcttctatggattttattattacttgttatctgcttcttatttatagtcccattgtcttcttacagggtgctcgattaatctatggaaccaagcggtctaatgattgcaattattgttctgtaagtttgtgtggcttcaccttcattgatttgcttcaaagtaaatttcctttttttattactgttttgctttgtatgacaacttgtgcatcatatgtaggtgtatccatcaatgcaatttagagtttcctccaacgatctctttagaagaactgcaattattgttgaagtaaaggcttcaaagaaaactttgggaacagaaatacctgctgatttttggaattttattccttgtgatgctcaacaagaagaaaattatgtaaatagaagggttttatcacctgtgcaggtagcactacccacatttacatgcttttgcagtctgtataattttccttcagatacaataaagttgcactgtatcaaaattaaaatatagtctgctagaaggttactagtaatagactaatagtatgcctcatgatcttgttatatcatgttatatatgattaagacgaaaacatgttctgtttttcacttttcagttgactgctttttatgctgtggtattctaacttttgagtcatttctattatgtggccatgcttttttgctggtgctataatggtgtaaattttatatctttttgattttcaggttaattatttgttgaatgatgttgatccagactttattgaaaaatatattccaagaaagaatttgctgtgtcttaattgcttcccggtgactccaaattgtcatcgtgtgacagaagtcccttatgcaatttctagtggaagccggttgagttttgttagtatatttcttttctgccttgtagttttaaatacaataatatttataaactgtcacatgatgtcaatatacatttttttaatatggtactttatctggttaaatatttataggatgacaggactcgatcttgtaagaaattggttgatttcaggggtacagctaatgaattaagttctcgtgttttggattgcctgaggatctctaaggcaagattctcagctgttgttttcctgttagttttgtcactttgtcaaggttcttgccttttgcttatgttttttcttttgatgtaatgcagctaaatcctgataaaaccccaaatagtatttttgctgatatccagcaaagaaagattggagaaaatgctttcaattcttctggtttaagatggataaaagatgtggttcttggaaaacgcaatgacagttcattccgtactgtggttgttggtgatccagaccttgagcttagtgaaattggtataccttgtcatattgctgaaagtttgcaggtttctgagtatgtgaataggcagaatagggagaagctgctttattgttgtgagctacacttgttagagaaggggaaaataaatgtctgcagaaagggtagtatagttcatctgtataaaaaggaagatctacaaataggtgacaaattttataggcctcttgctgatggggataaagtgctgataaataggcccccttctatacatcaacattctatgatttctctcacagttagggtccttccaatatcttctgtagtgtgtattaacccactctgttgttccccactacgtggggattttgatggtgattgccttcacgggtatattccacaatcggttactgcaagaattgagcttaatgagctggttgctttagataggcaattgattaatgggcaaagtggtagaaatcttctttcactttcccaagatagtttgactgctgcatatttgctaatggaagatggggtccttttgaatgtttatcaaatgcagcagcttcaaatgctttctatttctaacaaaagattaatacctcctgcagttgttaaagctccctctagtaatagctcactttggaatgggaagcaattattcagcatgcttttgccgtatgattttgactattcttttccttcagatggtgttgttgttagtgatggagagcttgtatcttcttctgaggcttctggttggttacgcgattctgactacaatgtttttcagagtcttgtggaacattatcaagggaagactctaaactttttgtatgcagcacaaaaagttctgtgtgagtggctgtctatgacaggttttagtgtttcactctctgatttgtacctttcttctgattcgtatgcacgggaaaacatgatagaggaaatcttttatggcttacaagatgcagagcgggcttgtaatttcaagcagctattgttggattattattgtgattttctgtcaggaagtcttcaagagagtgaaaatgctatcactgttaatgcagatcgtctgaattatgaaagacaaatatctgcttctctcagtcaagcgtcagttgatgcttttaggcaagtttttcgcaatattcaaagtttagctgataaatatgcatgcaagggaaattctttccttgcaatgtttaaggctggaagcaagggtaatttgctgaaattagttcaacattccatgtgccttggcatgcaaaattctctggtccgcttgtcatacagactaccccgtcatctttcatgtgctgactggaatagtcaaaagtgggttgattcaatccagatgtcttctggtacccttgaatctgttcagtcatacattccatatgctgtagttgaaagttcttttttaactgggttgaatccacttgaatgttttgttcattcagtgacaaatcgtgatagctctttcagtgaccatgcggaccttcctggtacactgacacgtagacttatgttcttcatgcgtgatttgtatgatgcatatgatggaacggtgagaaatttatatggtaatcaacttattcagttttcttatgatattgaagaggactcttcatgcaataaaggtttccagcagtatgctttaggtggtgaatcagttggggctatttctgcctgtgcaatttctgaagctgcatacagtgctttgggtcaaccagttagtctactcgaaacatcacctttgctgaatttgaaaaatgttctggagtgtggttcaaggaaaagaaatggtgatcagactgtgtctttatttttgtctgaaaagcttggtaaacagagacatgggtttgaatatgcagctttagaagtcaagaattatttggaaagattgttgttctcaaacattgtttctaaagtgatgataatattcaccccacatgacagcaggagccaagaaaaatacagtccttgggtctgccactttcatttagacaaggaaattgtaacaagaagaaaattgaaagtgcattctatcattgactctctctatcagagatattactctcagagaaaagactcaaaagtctgttttaccaatttgaaaatttcaagcaggtaagtttcttctgcaaatggtgcttcaaacaatatatgttgttacttgaggaaatattaattgtccatgaatgctttaaaaagattgatgctaatgtctctgttgggaactgggagtttagggaagttatgactgttacataactttccttaactcttagttcccatcagtctctattcagagttctatttttaatttgctgtgctaaaagagtaaaggatatttaattattaaatattaatgcagataggcaataaactacctctatgcatgctgtttctgtatatttattatgtcatgattccagaaggtttttgttgcttcaattattgccaagtggataattggatatgctttttgtacttgtttctttacttttgacaacagcatttatcacttagctaattttcatgcagtccctgattcttgcaataatttacccacaatccttaaacaattaggatttgttacagagacaagtacaaaaagagtaaaggataacagaaaaaagttgagaatagagattgaaaattagaaagaagttagacaaatgagataatctaaaactatgattcagtacaatgcgagtttgtactccaaatttcaataacaagaccattacagcagagtttgcatgtcatagactatttttttattactggcagttttgatcaagaaagaacagcctgatggtgattgattagactattggggaaaaaccagttatgactataatttttttgaggcttgtaagtaatgaaaaataatggttttctacatttcaaaaaaagtttgtgaactttctgaaagcgtaaatatatatagccttaacacaatggccggagctgttatttttatagtagctgattatgatgaaatctctattccttccacattagttgtttctgccagtttgcaaatgttgcagttggattactctcttctcaagaagaggaatagtatgttacaactgtatataaggaatactatgtctccgtttcacgttgcaatacctactgaaatgtaaaggatgctagatagtagtgtgatagagagtttaaatcttttacaaatatgttaaaggattgggtaactttgctaaactgatttttttttttcacctctttttctttattgccgtgttttcttttcaagttgaagaggagcccttatcctactaacccttcttcttcaccacttgcattttctttgtaactttttctgcatcagttatcattcttgcttggagctttgatgatccctactaacttggacaatgaaatagcaggaagtgttctgctgattccatggttaaggaaggtgaagacacttctatagataaagaagagggtgatgattgcatcatggtcacaattgttgaaaactctaagaatcctatacaactggattctgttcgggacttggtgataccttttcttctaggaacagcaatacaaggttggtagtaatctaatatgaatatccagttgttgtttcaagtggtgattaatatgtgagccttttagaaattaccttgatgatcagatacatggccggggcatttcttaagctgttgttgaagttcagattatgtttttgctgcatatatgaaagtttaagttttctttgctgtcatgtcaacttgtatgattccatcattgttacaaaaaagtttacacttgatttggctattataaatgtgaaaattaaaagtgttatttttaatcattttctttcttgggaaacggtgttaaaaagcagagttgtaagagcaagatatgttttagcctgatcagatggccaagtaataatttgttttttcaaatacaaatattgcttgttatggtcaaatattctcatattcagtcatcatcatgaattcttgtattgttctttaggatttctggatgtcaagaaggttgatattctctggaataatcagtcaaaagtaacaaattctcgtaatggtttttctggtgaactgtacttgagggtaactttgtccagcgagggtagcagaggaagattttggggtgtcctcctaaagctttgtcacaagataatgcatataattgactggacacgaagtcatacagataacatcaatcatttctcatcagcatatggaattgatgcagggtggcaatactttttcaatgtgtgtatgattaaaaactttccctcctttgttttaggttctaaatgaaatatatggccacataaacttaatttacttgcatatggttttatgtgtagagtttggcatgtgcaacatctgataccggcaagtccatccttcctaagcatttgtgtcttgttgccaatagtctgtcatgtagtggagagtttgtaggattaaatgctaaaggcatggcactacaaagaaaacatgcgtccgtttcatcaccatttgtgcaagcatgctttgcggtcagttcacattatgattccagtcaaattttttatgatttatcatgtataagattttgatcacccatatataattcatgttgaaattatgtaatcttattgcagaatccaggtagttgctttataaaagctgctaagtctggagccacggataatctccagggcagcctggatgggttggcttggggaaactgtctatctatggggacaagtggaatgtttgatgtcatatattcagagaaggtattggttttcttatatattaatattagttttcttacttcgattcagattttatgtatcatgaatatgattccactagtattttagcctatgtaatgcacatgataaatatttattttttatataaatgaaatttataataaataatatttttgaatgtataaattatattataattaaatttcataataagtattttttaatatatagttatattttggatttatgataattagtttatattgtaatgcaaggttatacatggttatttttaacaattgatactacctccttcccatatcttttgatgtttttagctttcaatttttttcccaaaacaaattgatgttttagaatttcaaagtctaattaatgttttttttcctcaaatatacccttatttaatacccattactagtggtgtaggtatcaaagattaaggtattaaataaggatattttagtctaaatacaccaatttttagtttcattaaatgtttcttaatttatgtgcaataacattaaacatcaaaagatatggaaaggaggtagtaattacttttgaaaaattattgaaatttttagtagagatgaaaatgatagattgaaagaggtatatggttaagaaaattaagtattatttaaagacaaaaggagattggtttgagatagttgagaaagaatttttttgagttaaatgaaattaaatttgaaattaaaattaagaagtatatttgaaaataataaacagttaaaaaataaaattaaatgctcaatatatgatattaggataagacacgtggtttaatgagagtcataacagctcctaacaacgcttcctaagaacactcgttgaaaaatagctcgtaaaaaccctctccttcaagataaggattcagatttataatatcggagtagatttttaaagaacccaagaatgtacaagtgcattgcagtcccccaaaagtgtcacttttttaatagagaactgatatggttgtgcatgtgtaagatatgaaaaatttcactgaggtatcaaaacttttgaccaacttctcacaagaatgcagcatcctccttgtaattattataggctttcttttttgacttttttcctgttcaactgtagacctttgtaatacattctataaacactttaagctgatttttaagtcatgagattgttaaaatgtatgacttttgtttcttcagttatcattttccattttcaattcatacatgctagtttgctgtttcccagtaaatttaccatggttgccatttctctgataacaaaataagtgcataaaagctgagattctcagtttgtgcctagtaaggatagactaagaagagttctatggttgttaatcgttattgagaaaaactagtatggtacatgtaatactgtcatttgcaaattgtctaacatttgcttttatcagggacatcaggtagctaagtctgtagatgtgtatgagctgctagaagccagttttgacaagccgaacaataaaattggtactcatttgcacaaatattcatctgacaaatgcggttctgagtttaggcataaaaatggttatgccttgaaagagggaaaacagtggaaaaccattttaagaaattttgtgacagtaaatgatattcagaagctgacttttgcatcgaggtgcatattgaacaagtaagataatccacttttagccttttctaacctctgtcgtggtttgtgtttttaatggtatttagcaatgtatattctatgtatgacacctacattaccatatatagcatgagctaatattatatagtacagttggaaggttgtatttattattatgccatggtagtttcttgcagttaggtgcttccacgaaactactttctgctttgtaatcattatacagttggaaggttgtatgttatttgccttggtagtttcttgcatttagttgcttccacaaaagtaccttctgctttgtaatcattattatcttttcttctgtctttttattttatttttatagaaaagtttttcattgagtaatgagttcatgctgctttgccttctagggcaatgcgcctgttgtttggatggaaatatttcattagacttattagagatataaaagtaaaactatccttgagactcagcctagcttgaacttttagaaaattggttcttaactcattttatatgtagctatttctctctgttttgtattaagtatgaccaactacaaaattccctgttgaataaaacaatccttgaggctcaacctagcttgaacttttagaaaattggttcttaactcattttgtatgtagccatttcactctgttgtgtattaagtatagaccaactacaaaattttctgacatattgctatcaatttatctcagttattttcagaagtaaataacataaacaaattagtaacatgaataatttaatgagggagtgccgagtaatagatgattgggagatgaagagaaaaactttaacaaacaacaacaaagccttaacccacttaagataattcaaatggttataatttgtttgtagtacagtagattcaaacatataattgaacgtgatctaatttgttgaggtttattttattttattttctacataacaagtattcattgatagattatcatcatcattattgttcctgcctttggggaaactgccaaggcagttccatgtttgtttatttattctgttcctcaaggctgtcttgtttaggttcttctcaactttggggcagggtaggcattttttttttacataatggatttttcaaggaagtttagagcttgtttactttgagaaagtgttttttttttttcattcagttttcaattttaattacacaaatgacacctttttttcatttgttttttgttttcaaatatttgtgtagaaaacaatgaaaaccatagaaagttattttcactgttttccatacaaacatttgaaaacagaaaacaaaatgaaaacaaagtgacaattttgtatatttaaaagggaaaataaaaacaaaaaacattttctcaaacttaaaagagccttgctttgacctgtttcccgttaagttacttttttaggtccctattgttttattgagttttcatacaagtccttgtatttaatttttttattgggtctcctaaaaatatttagatttgttctctattatgtatgttgttgcaaaactcagggtatatttttttggatatggttttgttttgttgtctaggatcacttgctttcattgaggatctattatttgcagaataattgtgaattttggctgttgtcaatataggtattcaattgatgagctgctaagtgagagtgacaggtcaacaatgctaagggttttgaattttcatcctcataaaagtgagaagtttggcattggaccacaggacattaaggtatgtgtgcttgcatgaggtggttttgatgtgtgatcaaaatttattttgtttcttcgtacaaatgtgcattaaggtatgtgtgcttgtgtgaagaaggtttggatctgcagtcaaaatttattttgtttcttcttggttctttctaatgtgcttaaaggtaatgtatattaaattggagtgcactttaaatttcacagttgggaaatttttctatattctctgaagaaaattatctatatcctccacttaaaatgctcctttgagaaaggtacttgtttttttctgtctatgttcattatgaacatttataccttattgagcttgatgaattcagtggagccatgaagacaagtataaattggtcaaacatccctccttcacctcccaatgaaaaatacaataaaagatgcagtcataagaattgagagcattgtttgattgttatgaacttagcttgctttatcagaatgaaatctttctttacgtcttgtttttgtaaatgaaaaggatggagctaattatttcacttttctatatgggaaatttcattccatggttacaaactaaatttataggtgcagtataaatttagtttgtattataatgtttaaaatagcagccatttggctcccactatagcattatgccgctatttggaattgataattatgattccatagtagcatttaagggataaattcctatcaatgataacgatatagcagctgagaagaaagagatgcttgtgtcaattttgcttcttttgccatggtcaaatcttttgctagtaaaaatgtatcgtgtaatgaagttttcttcttgctcccggtcccggttgcccatgcctttttcccttttctattcgcaggttggatggcatccaaaatacaaggatagccggtgcttccatataataagaactgatgggacggttgaagatttttcataccgcaaatgcattcttggtgctcttgatatcgttgatccaaaaaaatcaaagatccaggagaaaaaatggtcaggacatggtgacacgtaatatctatgcatatccaagcataataagtgactgtcatttgatctggtgacagtcacagactctataaaatatgaagtgatgttttcgccgaagaaatcgttgtaaaaatacagtgggaagggtaatagtagtgccacaactctacaatcacaaaaagcaacgttgtttttctgcctttgttgtattatactatctcaaggctagactgggtgatagcttattcaaatgtcgctcgatggatttagctcgtctgatagaggtagtgcagcaaatcaagagtaaagtcataacttttgtgcagcagcacattttgaaagaaaggagataattcatagatgggagtatacaagatggaacaatggtagtattttttttttcttttcaatctgaacaatttaaattttattttgtataataaagatggagtgggttcttacccttagcttctttttgcttcttccactaatactttatttgccaacgattacgtaaggcaaagaaagatctagtggaagcagcaacgagaagcttgtaaaaacttgtacccccagaccatttgtattgatgaatatgtggcagttaaatataagatatgcctgattcaaatgtcatgcttatctctgcatatctctaacgcgcatattgaatgcgag

SEQ ID NO: 197 - DNA, 15579 bp, Glycine max; identical to SEQ ID NO: 196
  source 1..15579: mol_type = genomic DNA

SEQ ID NO: 198 - DNA, 18274 bp, Glycine max
  source 1..18274: mol_type = genomic DNA
ataattaataaaggttaaatatatctttatattattcatatttttaatcctattccttaaatataaaaaatataatgcatatatataatcatatatatttttaaattaattagtataaaattatataaaattaattttgtatgttattattataattgtgattaagattaattagtgtaaaatcatgtaaaattaattatatttgttatttttttaatatttaaagtaataactaatataaaattgtgtgtgaaattaattgtgtgtttattgttattattatttagtaaaaaaaaccagctttaattttatgcgtaaaaattgtattttttaaaaattattatttattaaaagttagacatttaaataattataaaggaaaaaaaaattgcagcctccaatttctggattcgtcactgctttaatctgatttagttgtaataccatatctgaaacacccattttctttgaacagtgttagtgttgcatcaacattgcatttacaaccaccataaataggtttctcccactgagtaagatgttggctgcatgcatcaacattgcacctagaaaaacaaacttgctgctagttagaaactgattctttaaccagttgaatagatgacatgggtggtttggtaacattatcccacattttttcattctgcctacgccaaatacacacaaaagttgtagaaatatcagagacaactgagaattagataaattttttagtatattgaacatcacattataaaatttccttctgttgtttgaacgaagggacaagtaatatgccatagtcccagcttcatgccaaacttgaacaacaatctcaaccaataaaaacatgttaatcatttctcgagaagtttgtttaaagaaagaaaacatggttcttaacatactataaaaatagaacttaacttttgtattttgtagtgattttaccaaatttgagcaaaatcatctcctataatttcttaaaaagagttcaatatacatttcattaaatttatattttactaattttataatatatatttaaaatatctacttatttctttctttccaaacaaacacttactcatatacatcaatattggtcgaatattttttcaaaaagaaaattggtctttatatacaatcccacccctaaacccattaattatgtgaatacaaaatctactaactaaccaccctatttaggtgattttttttaactaagttaatttcatttatgaagaaagtgattgactaggttgagctggcccaaacacaaattttgtgtgtgcctctttttcacttttacctatccaaggcctaattcccaatcaaaaccccaactccaccagtaacaaaagctgagtcaacgagggtaaactcgtcatttcatccccaaaacccaggctccaacaacactctttgcatggagcgcaaaaggcaaattagaaaaataaaaaataaaaccaaattccccagtttttgttaaaagagaaaaaaaaaatttaatttttcatttcatttcacactcactcgcttactcacttcattccatttctctccgaaaaccctctttctctcacgctcgttgttgtttcgatcggtttcgtgtaatgatgtacttagattttgcgtttgtgttattctgcatttccgttttcatgcaaacgcattttcagtactgattctgtggcttgctcctttttttttttttttttttaacgtaggttctttgcattttctagggttttgcggtgagctaagtgagacgctcgaattgaacagcttttgtttcgctcctgaggtaagaatcaggtcgaagaagaagagtcatgttttttttttttccttttcattctcgcttttttgttttttgagtttgtttttgctgtgatcgtagttgggttttagtttgacttgctctgtttcttagaatgtactcgtttttagggaaaatgttcatgccattgttcgttttatttctctctgtctctctccttttattattttatttttttattggttttggttttgttgaacatgtcaccaaccactttttcttaaaaaaagttttgaattcagtttttttttttttttgtggtgaaacaggatttgaaaatgtagctttggatgaagtagtgagagcattttattttttacccgttttaagagcttgcatgattttggttggggcattgttagagtttgtgtgtaaagccatttaatgccatagtttgaaaaggtagctttggatgaagtagtgagcgtttttttttttttttgcccgcttaaggagttggtttgggtgattataagcttgcataactttggatggggtattggtagagtttatgcgtgtaaagccatttaatgccataactaaggagtaaattttttagagtataataatgattacaattactaatgtagttgtggttgcaacttgtgagtaattaaccatttcagcgtgatttctctgtttttcaaatgccttgatcgggaattggttgaggattgactttgacataattggttgtttgtgtggggagtgcttttaaggcaatagtactttctagcaagaatggaagcatcacctctttgattgggtgcttgataagttttttttttttgatcagccaaaataagtatatatatattagcaaagtaccagaggtgcttgataagttgatttttgaaagttctaattgtgctaaacatttgtgatatctagtaatcccttcagacattcatggtggtcagttggtattggacatatcagatgtattcattctacggacttgttttatttgcttgattttgtgaaagtgtctgtaaagggaaaaggtgctataatgtttccctaaagttacactgcgttacctttgtagtatttttctgtttcattgattgtttaattacttttcctctgtaattctgttgaagttttgttaggtttacaagtaatgactgtaactttgagttatcattcagcaggcactataattgatcacgaaagtaatggaggataatcccccttcaagtgttttagatgggaccgttgttgggatcaaatttggtatggctacacgtcaggaaattgtaagcacaaaatacattcatttttttagttaaattgtatgactaaaggctgatccaccaagcagttgaagtctttgcaatattcagttagcatctgttttattaattaactcaaatgagataaccttgtatcaagtttggacgatgctgttatgatcagtcattagtggcagtgccaaggatgaaggatggcctgcttggatcttaggaaatacatgctagaattttttttgtagcgttttctgatgaccttatttggactattatttttgtttgtgacttttctcaaaaagttgaaatttatgcatgttgtttcagacgtatggtctgtttttattttatttttattgattgaatatttgaaattaacttatacacacacacatatgtatatatcatgactgtttactggtcatagttttattttatttttctcaattctgatcttgttgcgtgtgcatgtctggttttgattaaatttagtggaccatcacttttttctaatcaaaagttctctttgttagaattaattacattttttgaatataaattgatgttatggcctattcaatatttgaatagttttgatcaatttggtaattttctgctttcatcttgatagtgtacagcatccattagtgagtcttcaattagtcatgctagtcagctgtcaaatccattccttgggctgccccttgaatttggcagatgtgaatcttgtggtacctctgaagttggaaaatgcgaaggtttgttatttgctccttttctgtactttcttttaaatggtaaaaagagatatatttcaaatgaagtaatttgatattacttttcaggtcattttggatatgtggaactaccggttcctatataccatccgagccatatcagtgaattgaaacggatgctgagcgtggtctgcttaaattgcttaaaaatgaggaaaaccaaggtattgacaaatggaatattgtcatgtcatacacagaagagattatcaatttagaaaaacagttcaaactaatatagagtattggcagacaagtgatatgcagaatgtgtgaaacaaaaaagaagtttgacttctttaaagaaggccgcacaagggtgattggggaaacaaaaatgttataattgagtttatatgtacaaggagtgcttgtagatgcacctttaaaataaatatgggtaaagatgcctgctattgtgtagaatagagatctcttaattaattaagatccactaggaaacatttaaattaattaaattataacaattttgttgttcatgaccttttttttaagaaaaagaattcttgacctcatattttgaagataagggctcctgaatgagagttgttaattgtcttaatatttttttagtaatcctggcatcatacattttagttagatttaattcaaggataaaagcttcatctaatgccattatatgtgcttgatcttactggctcacaacctttcagtttccagcttcaagcagtggcttagcacaaagattaatatctccatgttgccaggttagtatgattaaattgcataatatcctttctcaatatgcatacagacttacattcttgaaatagttcctgcctcctagtattgtttataatttattctaccatttatacatgctatgttaagaatataagacattctaatttatatgcatgtgtatgtatgcattttattctaggtagaatcttatgatctatgttatggtctcacattttgcttgtataaccccccgtcctgatcctactgtttaagatcttatcttcactatctttattttttaccacaatacaccttttggctcaagattgtccatctactttatttccgcccctccccctcttccccggtttatttcatggtttacttagctgtgcattatcctctgtttaggtttgtatgattttgtcttggttcataattaatgcttcagtttctttatcagagttggctaaattttgtttgctattgatgctaatttgttatatatgggaatctgctatttttttttttgtaaaattccatttccaaggttcatggtatttatttcttccttttaggatgttaatgctgctctagtttctattcgggaagttaaaacaagtgacggggcttgttatttggcgctgaaagtatccaaatccaagattcatgatggtttttggagtttcttagaaaaatatggctatcgctatgagggtgatgaaactcgagccttgcttccttgtgaggtttagtttctactaacccatcttcttactttacttctcaactggctgttgcttttacttgtttgcatacaggttgcccgatttattaaattttttcaattctccttttttatgtacttccttcattttattaggcctctttatgtttctctctctctctttctctcttaaatatatatatatccctattattcttttgtccttgacattacctttctttgattttaaaggatattccatatggaatgatctgtatcagttatatatatacaacgaatgatctctctcgtggtttaattacccattccatgttgtttatatttttatcttgacaattctatttatttgcttcgttacaccacaagaattggcatttgcattttctaaatgattgaaatcttgactcctgaaatgtttttgattggctgttacgatggtccgtaattgagagtttcaggcaaattgttgtgtgctatttatttttaattcactatctttctattgaaacctgttgtttgccttttgattaatattttgctcaacaaatctatcaggcaatggaaattattaagagaattccgatagagacaaaaaaaaagcttgctggaaaaggattttttcctcaagatggatatgttttgaagtatcttccggtgccaccaaattgcttgtctgtgccagaagtttcagacggtgccagtgtcatgtcgtcggtgagaaaatgaacatattattgtatcagaaaacgtcttacttatcatttttgctctctattatgctaattctattctgttatagtttattttgttatcataatatgctacaacagtgtaactgcccaagtttaaaccagacttgataatggctctgctgtaaaattctgaaccatgagtacatgtataaatatatgaaaactccattcagaattcattatgtaaaataaattgcacagactattgaaactctcttctctttgattttctcatccgagtattcatattttggttttatgagcttgattttgttttggccatagtgcacattggtaagtggtgtatttatgttgctttgcaggatccttccatgacaattctcagaaaattgctcaggaaggttgaaatcataaaaagctctagatctggtgaaccaaatttcgagtctcatcacgtggaagcaaatgatttgcagtctgtggttgatcaatattttcaaattaggggcacttctaagccagcacgtgatatagagacacattttggggtcaataaagagcttactgcatcctcaacaaaagcatggcttgagaaaatgaggacattatttataagaaagggttcaggtttttcgtcccggaatgtaattactggagattgttataagaggataaatgaagtaggaattccggttgaagttgcccagcggataacatttgaggagagagttaacatccacaacatcagatatttacagaagttggttgatgaacatttgtgcctgacctacaaggaaggtgtgtcaacttattcactcagggagggctctaaggggcacatatatctcaagcctggtcagatagtgcatcggaggattatggatggggatattgtcttcatcaacagaccacctacaacacacaaacattccttacaagccctttatgtttacatccatgaagaccacactgtgaagattaatcctttaatttgtggaccgcttggggctgattttgatggtgactgtgtccatctgttttatccgcagtcacttgctgctaaagctgaagttgtggagctatttgctgtggagaatcagctgctcagctctcacagtggtaatttgaacctacagttatccacagactcattgttggcactgaagatgttggtcaagagatgttttttgggtagagcggcagctaatcaattggcgatgtttcttttgcttcctttgcctcggcctgctttgctcaaggccagttctgatgatgcttgttggacttccatccaaattttacagggtgcattacctatgggttttgattgcactgggggacgatatttgattaggcagagtgaaatcttagaatttgatttcagcagggatgctctgcctgcaaccataaatgaaatagcagcttcaattttctttggcaagggtcccatggaggcacttaaattcttcgatgtattgcaaccctttttgatggaaagcttatttgcggaagggtttagtgttagcctggaagagttttcaatatccagggcaatcaaaaggataataagaagaagcattggaaaggcttcttctctgctgtatcagctgaggtccttatacaatgagctggtggcgcagcaactggagaagcacattcaagatgttgaacttcctatcattaattttgctctaaagtcgactaaattaggagatttaattgattcgaagagtaaatctactattgataaggttgttcagcaggttgggttcttagggcagcaactttttgataggggaagattctactcaaagggattggtagatgatgtggcatcacattttcatgcaaagtgttgttatgatggggatggttatccctctgctgagtatggactgctcaaagggtgtttttttaatggtttggatccatatgaagagatggtgcattcaatttcaactagggaaataatggtgcgttcttcaagaggattatctgaaccaggaactctctttaagaatttgatggccatccttcgggatgttgttatctgttatgatggaactgtcagaaacatttgtagtaattccatcatccagtttgaatatgggatacaagctggagacaaaactgagcacttattccctgctggtgagcctgtaggtgtcttggcagcaactgctatgtcgaatcctgcttacaaggctgttcttgatgctagtcctaatagcaactcttcatgggagttgatgaaggtagacatttctttgtagtgaatgaatgttatttgtttttaatatctcagtaaatgatttttttcctgaattttttatttatgcattatatcttcaggaaatattactctgcaaggttaattttaggaatgaacctgttgatcggcgtgtcattttgtacttgaatgactgtgattgtggagggagttgttgccgagaaaatgcagcatattcagttaaaaatcaattgagaaaagtcagtctcaagaatgcagctgtggagttcattattgagtaagtttcttcttttaatgttatacttattaactttattctacacatcttttagttattaagaaaaataaaattcaagtatgttgtctattgttcatctactagtgattttgtttggggttggttaaccatagtcttttgcattatttgagtaagtcgtgatattttatattattgaagaatgagtttattttaattttttggggtcctgtttcttatccacagataccaacaacagcgaactcaaaaggaaaattctgaaactgatgctggacttgttggtcatatttatctggatgaggttattggatttccttttcattcaatttgagaacatttacatgtcgctgcctactttcattggcaactatgctaaaaaaaattccttcattatatgcaacttgttagaatataatatttatgaaaatatccattaaaatcttgatcatatctttagagtatctaagaactatttagaatatctaataatatcaagattgtatattagaatattttagtgtatcatagagattatcttttagaactttcttcccatttttctttctttccatatttactaatatctcatgttttgttttccttggttaggattatatgattagtacatgaggtttactgctttatttttatgaacacattatcattattttgttgtgaatcacatcatgtcagatctatatcaattccattctactttgtctctgttctctctatcctctctctctaccaaaaccctgtaatgttaacaaaatttaataaactaacatgattgaacatttttgcatgcctctggacttttccccctgggagaagatttgttgattttgaattattcttattatttgtaattgtaattactatttatgttttaataacttagaatatccttttgaacagatgatgttagaggagctgaagatcagcatggccaatgtttttgaaaaatgcctagaaagactcaagtcttttagtcggaaaaagaaagttaatcaatatttgaagaacattgaattatcatttaggttaatctttagttctttccttttgcatttgataatcggtcatccatttttaattattcatccatccctgaagtaagttttgtttgcagtatgtttggtagttggctagaagtgttttttttttcattttttttttaaaaaaaaaccacaccgttccttttaaaaatagtgttgcataaatggtaatctggaaatattttgatgttaaaagcaaagtaaaaggcagacaagaaaatgaaaacatacaggaagctttcactagctaggtggggaggggtggtctataatcatgtaatagctacaggggtaatagcttgggtctgtgtattcacaggaaccagctacatacttatttcaatagctgtatctctagtacctctggtactatttcactttaatatatatctatttttgctgagcaaaaaaaaaaaaaagaaaatgaaaacataacaaagctgcccattgtctatacaagtttgaaatgacaactcttaagaggccagacagtcctttctgatcataagaggaactgtgaagtgcttaatctttgttgtttctaggatacaagatctatattttattgatcatgaggtaagtgattttacactcgagtctgggactgggagttagacttggtgttaaaactggggagtttgggtgtagtcttatgattgtcatcatgtttaatgtgtatttatatcatcaggtacccccaactatcagttttatgtaattgtgtctgaaacagatcacacgtgtatttataataacaatatgctgatatgaaagaatctcgattaaatgctcatacgatcaaatccctaatgtctactagtgacatgtggtatactgatatttacaccaagaaactcagttaccatatctgttgagtttctgaatcttatattgctgagatgtaacccttgtatgttgtgtcccacattctcagtattgtccttggaaaaactatggtttttctttctgtttcggagactattaaaaatgaaattttctctggtttctttatgacaatttcttatcttcttttcttcactattcctacgtattaaatttgttgatccaaataaggaaagaaaaaagaagtcaaagcttttgtacattgcctttatatgtattatgtcactgttataacatgctattttttctgattattgcagtttatttgttagtctatatcactttctgatctatgttccatcttggcagtgagtcttgctcatcttcacatcctgctgcaccatgtttaacattttggctaaagaatcatgatagtgatttagataatgctgtaaaggtcctgtctgaaaatatctgccctgttctgttcgaaacaataatcaaaggtattttctttgctatcatttctttaatggaagtactctatttcttttttcattaaatctatatttacggttttgtaggtgaggtggaaaagagattaatgtggggtttaattgatgtgccacaattcactaacttaatggtcatatagtcttatttattctaataattaggtcaagtattagtacaatactacaatctagtacaattcaaattcactacttcaacaagactccaaggtctaatactctaatattctctctcgtaaagattactaaggttatggctgttacaagtagcaaaccagaaacaaaatatcagacaccataatttaaaacaaactggcccattttaaataaataacttatgtaactagtactctccttaataataaaatcatgatggtgtgctcggaagatagctcccataagtctttgaccattctcttcaagcactggaacatttaccactggccaacataggcactatcagaaatcccattgtctttcaaagaaagaacaaagtagttgatagaggacctgtcctgcattcaaatgctaatgcttcacaatctagattgtaattgacttttacttatttttttcagatgtgatttgctctgcaattatttgtggcctgtcatgttttgttgcatttataatcatgattcatgaatactcatgtcacgtattttcttgttagtaatgcttctgatttaccctcataaataaataggagacccgcgcattagctctgcaagtataatctgggttagtccagatacaaacacatgggtccgaaacccttataaatcatctaatggtgaattggcacttgacatcgttcttgaggaggaagctgtcaagcagagtggcgatgcttggagaattgtacttgattcctgccttcctgttcttcacttgattgataccaggcgttccatcccttacgctattaagcagattcaggaattactggggatatcatgtacttttgatcaagcgattcaggtgagtttctaaagaatatattgaacataatgttagctgtttgctctttatgcttatgatctttagcatatttcctctctttagtgtctatgctgtgtatttcctcgttcattaatttttaaaagtgaatttattttattttaatgtacattccaactgtcataatcagcagtaatttatagttggatgcttttagcatcatcacttagtgtttttcatttattgaaagagcatttgatctgattctgttggcattttttgctttcatgcatgtaacagtatagtttcaactttaaacttcatgcttgaaatttgatagagagaaagaacaagttttttattctgaatattatgtctatatattgggtacaagcagaaccaatatataggccgagctttagctgcacgctttatgactgcctagtgataactgtaaacaatctaataactgacagaaggctaacggaaagctaggtacaattcagtgtaatattgctccttcaatcccaagggtggtatttgactaagatgatctaacagaaagctaggtatagttcagtctaacattcccagtgtaatccctagggtgagatttgactgcgaggaattacgttgtcataatctactactccaagtttgttgcaaaggttagcaaagcgagtggttccaagggcatttgtcagaatgtaatcatattggttctgtgatggagcatgacaaacaactaaatcttttttagcaactttttcacaaacaaagatatccaatttcatgggatttgttctggtatgaagcatagggttgggagctagggaacctgtacttaggttatcccaacatcttttaagtgtaaatgtgaagatttagatctaaagatcatttatagttttgtattgtaactgagtttttgatatattttcttagtgagtaattcaattattttaaaatgtccttttcagaagtcctagtcttagggtgcatttagaagttcctttaagttgattacccaagcatacccttagtaattctaacaagaactaacaacttacattggcttataaaaaacaaaacttaagtagtaagaatagaataataaccttgttgcctagtagcaataggaaataactgaataaattaaaaacaaatatgctactcttttgaaacatttgggttttgagctaactgaatttgttattaatgatcaatttattacaatgaaatgaatcatctatatacagatgacagtatgacactatgacagaactgagggcagcaaagagactgcacctgaaatgaaacaaaccgaagggctcaaggcccaaacagaaacatacagaacaaaactggaaaatgtatttctatcataatattataactaactctaatataaggaaaataatcaactgaaaataaacctttgtgtttatggtgctattcaacttttgctgttctcgtgtgttttggagtgtgatgttcataacattgaggaggtttgttttacagtttacacttgtctctaagtttgatttggaatatatttttaattatgtcatctctgagctgtgcttttatgtcttcaggaatatttttatttttaacatgtatcttttatgattggaaaggctcgctgcatgcttagtattgctccctatttcataatctttggtttacaagttttgttatcctcccattatgacttctctatcttatatttcctctttagtctttagtgaattttcttctttttaagagaaaatgtgagatatgaattattgtgtctagtttgatgaaatcttgatcattatgacatgatccaattgttatcatcaattattgaatatatttttcttctgtatgcttctattttctcttcatggaattttctcctaagagaaaatgtgcaaatgatatatcattaattattgtttcttgtttgatgaaagatttgatcatgatccaatctttagtagccacccattatgactccaccttttattcatatctcatccttttgtggctgcctgcagcgtgttgcagcatctgtgaaaatggtggcgaaaggtgtacttagggagcatctaattctgttagctagtagtatgacatgtggtgggaacttggttggctttaatacaggtggatataaagctctctctcgtcaattaaatatacaagtaccgttcacagatgcaacactctttgtaagttgctgcttgctacttgttgtaatcatgagatgtatcaggttattattattcttactttgtaaacgtgactatgcagacacctaaaaagtgttttgagagagctgctgagaaatgccatactgattctctgtcaagcatagttgcctcctgttcctggggtaaacatgtggcagttggtacaggatcaaaatttgacattgtttgggattcaagtgaggtatttgataatactgatttaatattggacttgattagaattggagttttgtaaacaatatttgaatattgacattttcttttgcagataaaatcaaatgaaattgaagggatggatgtttacagttttcttcacatggtgaaaagtgtaaccaatggggaagaagaaactgatgcttgtttgggtgaagatattgatgatttgctggaagaagaatatatggacttgggcatgtccccacaacacaactctggttttgaagctgtatttgaagagaatcctgaagtactgaatggttcaacatccaatggttgggatgtaagttcaaatcagactcaatcaaaaaccaatgagtggtcaggttgggcaagtagtaacaaagatggtagatctgaaactgcccaagagaattcttgggggaaaactgtcaaccaagaagactcttccaagtctaacgcttggaatacaagcaccacagcagatcagacaaaaactaaatctaatgaatggtctgactggggtagtaacaagtctgaaataccagctggtggatctaaagcagttcaagaagactcttccaagtctaacgcttggaatacaagcaccacatcaaatcagacaaaaactaaatctaaggaatggtctgcctggggaagtaacaagtctgaaataccagcttgtggatctaaagcagttcaagaagactcttccaagtctaacacttggaatacaagcaccacagcagatcagacaaaaactaaatctaatgaatggtctgcctggggaagtaacaagtctgaaataccagctggtggatctaaagcagttcaagaggactcttccaagtctaacgcttggaatagaagcaccacagcagatcagacaaaaactaaatctaatgaatggtctgcctggggaagtaacaagtctgaaataccagctggtggatctaaagcagttcaagaggactcttccaagtctaatgcttggaatacaagcaccacagcagatcagacaaaaactaaatctaatgaatggtctgcctggggaagtaacaagtctgaaataccagctggtggatctaaagcagttcaagaagattcttccaaagcttggaatacaagcaccacagcagatcagacaaaaactaaatctaatgaatggtctgcccgggtaagtaacaagtctgaaataccagctggtggatctaaagcagttcaagaagattcttggggctccagtaagtggaaggctgatgttgcccaagaagacaattccaggcttggtgcttgggatgcaaatgcagcagatcagacaaaatctaatgaatggtcgggctggggaaagaagaaagatgttacccaagaagacaatgtgcaacattcttggggctctggtaagaggaaagacaaagttacccaagaagacaattctggctctggtgattggggtgccaacagaacagatctggcaattaccaaatctagtgaatggtccagctggggaaagaacaagactgaaataccagctggtggatctgcaaatgtgcagaatgactcatggggcttgggtaaattgaatgatacccaaaaagataattctggttgtggtgcttggggtgaaaattctgggtctgcatgggtgagaaataaagctgaaacaatagatggtggatcagaaaagccccaagaggatgcttggaactctggcaattggaaagctgaatcaaaagttggcaataccacttggggaaaacccaagtcttcagaaagtcatgcatgggattcccataatcagtcaaatcaaaattcaagttcacaggggtgggaatcacatattgcttcagctaattcagaaaatgagaaaggttttcagtggggaaaaggtagagactcgtttaagaaaaatcgatttgaaggttcgcaaggtcggggttcaaatgctggtgactggaaaaataggaatcgcccgcctagagcacctggacagagattggacatttactcatctgaggagcaggatgttctgaaggatattgaacccattatgcagtctatcagacgaatcatgcaacaacaggggtaagttactcgtggcagtaaatactatctaatataatgacttggctagaagaaatcatgatgtctattttcctttcctgttataatacaatatctatgctcaagttaagcctggacattttattgtcacctttgttttacctacactaaattgcaagtagcataatttgaaagcacaaggtgtcattccttccattttaggaacatttgtttctgctcaacagtttttttctccttccaccacaatttttctataagttatttttttggttttaagaagataccattagcaatatagctattattactttgatttttgctcctgataaaagcttgtgttattaatcaaatccactgttccctttggctgtactttctgtcctagccttgggtgctttctgtatgttttccctctgcttctatgaattttgtatcataacctggagcatttttattaaattcctgttgaaggtacagtgatggggatccactggctgctgaagatcaactttttgtacttgagaatgtctttgagcaccacccagataaagaaaccaaaatgggtgctggaattgattatgtcatggtatcgtccaactctgtttacatcttttgcatttatttatgattgatatgatcatagttgccctagataaacacgtttctttcttaaacttccaatgtttgtgtactgaatgatggtttattttggtttctctatttccttgcacatctgtcagtttttgtatatgcaatacatcatctatttatccattcttggataatgggttgcattgaaacttgaaataattgtctgtctttatgttatgctggatttaatgttgggagtacttgcacaggttaacaaacacagtagcttccaggaaagtagatgcttttatgtggtttgtaaagatggtcaaagcaaagacttttcctaccggaagtgtttggccaactatataagcaagaagtatcctgaccttgctgaatcattccttggcaaatattttcggaaacctcgtgctaggggggaccagactgcaacactagggggagaccagactgcaacaccagcgcaggatgaagcagccacttcgggtgagtagattagggttgtgtccataatattgtacagaaacggtgtagttgaggccactgaatagttcgtcatagctgaccaattttcctgtaggaaagtgttcctctttttggtgacagttagatggtaattttttttcacatgcgaatgatgatagcaaacacccttttgccgatgttaatattgttctaatgattacagcacttatgatgtgcctagcaaactttgctcatcattttatttaaaccatcaattgcacctgggtttcagacattgattggaccactgatacaaaaatggcatccttctgattagagtttcatgaatcagttgtggcttatatttttgtttaataggtttctaggcatttccgagttatatttaaaccggtagaatttctttgatttagttttttcttgtctcatctttgtaatacagactgcgatggtttagtatctcgatttttaaaggtcctggtcaaaggcaggaatgactttaactgcccattttgttaaccacactgttctttataattcctggtaaatttttttttcaaaatatcatttagcgtaacgaaaccttttgggtgtaatttctatgatgacaagtattgctcaaatttatgtgaaagaacgagttggcttcgg

SEQ ID NO: 199 - DNA, 7206 bp, Glycine max
  source 1..7206: mol_type = genomic DNA
aaattaacttcgacccgttctctaactcacggagtccaattaatcataaagaaaattagcatgagacgtgtagtgagactatacttatggactctccgtgttatgttacgtttttcaagatatataacaggcttactcgaacaatgattgaggcgacaaaattaacaagctttcgataaagaacctagaaatgtggaagaagagaaaagaaatttaaaaattaaaaataatttgttttaaatatttcatcaatattttttttattttttcttatttttttatacattataaattctattatattttttgttctttctctgtgtaggtggaggatagcatgagtctatcaaacatttttctaatttttatagaaagaataaaatagaaaagaaataaagtaataagtatatttacctatagacgtattaaaccaaagttaacaaaactaaataccttaaaatgaattttaataagagcaattatattttgacaactcatcaataagttattggtttaagtggtccttaattggtcctttaaaataagattttgagtttgaattttgtggatgaaaaaaaaaaacaagataaggagaaaaaaagaacttcactagaggtgaccaattaaattttttaacggggattaattattagtaaaacaggtggatactccacaataatgctatggtgatcaaaaatattttgatggctcaaaattttaagcattccaccaataattcttttttttatcttttcttttctatcacattatatcatcaatcaaattaattacttatttttttcttcattttttcatcaaggtaacagacaactcaagattgtccaaaaaatatttatctttggataccaatccatgcaccctcctctggtaaatccttgataattggtttagttaaatgggtaaatacccattttgatttatgaaaatgaaaagtgtgagattggttcttaaaagatgaaagatttaaatttgatatttaaatatgaaaaaaatgtgacaaattaatcatgtcattaacttttattcattgtgactcttgcctatatagcaccttcaaactcaaatgttatgagagtgaatgttatgtttgttgcataatcatcaagactaatttatcaacggtattatctatcaactaatttgttagtcttcaaatggatgattttttcatttggatactaaatttaattttttaatcaatcatcatctctcacttttaaataccaaaataaaatatatcaacaagttattgatccaaataatcttagactcaattcacttgactaaagcttcacgttcaagccttatggacagtaagtgagagggaagactcattaaggatgattaatgaggttcaccaagtggagattaatttccaacatcattatcatggtataaaaaaatatcaaaataaatatttatccaatttataagtcacaatataataataaaaaaatgggtacgggtccaattgtccttgggcgaggacacatgcgtctttccgttacgagaaagtatttcacttcacttgggagttgggacaagtgaggaagtcaagagttggttctttaccccatatacccctccctatcacgccagaaacatttcatttctcttccagcaaatcgaaacggctcgcgttgttcacagtcacactctcactctcacactctctcactcacactcacactcacaccattgtatagaagattagagagagagaaccctaaactaaaaccctaaaattccattgcagcaagcaaaggcattgatcgatctgcatgggtcacgtaggttccagcaaggacggcaccgaggctgggccttccgccgccgcgatgggcatcgacgacgacgaagacatcgacctcggcgacgtcgatctcgacccgaccaacgccgaaatcctcgaagagctcggtgaagacattgtgaaatactggtgcaagaaagcgtcgatgctcttcttcaacgagtacggtctgatcagccaccagatcaactcctttaaccacttcatccacacaggcctccaaaaaaccttcgaatccttcggagacctagtcgtaacgcccgggttcgacccttccaagaagggagaaaacgaacacttccgttacgcctccgttaagttcggcaatgtgaagctcgataaacctatgttctggggcggtgaagggaacgcgcaggagtttaagatgcttcccagacacgcgagaatccagaggatgacctacgcttccaaagtcaaaatccaagttaaagttcaggtatcgggcaaaatggagtgagtaatgctgtgtaatgttggtttttgtttctttgttggagtaattgaatttgtgatgtgtgtggattttgtaggtgtatgttccgaagaaggtacggagtgataagttcaagactgggaaagcggaattccttgacagggaggttatgaaggaagacgagagggaaatcatcattgggagattgccagtcatggtcaagtctgatttatgctggatgaaagaggcggagaaggaggatgatgaatttgaccatggaggttattttatcgttaagggtgcagagaaggttcgtcttatctgttttttgtatttcaatttgtattcttgtgtttaatttgtataggtttgtaaagggtttttacagtgttaactgttaacccatcagaaataaccatgtatgatggattttacaataactacttttaaggtcatgtttagcatagtttttctgattgattgacattgtaaaaactgacggtgcatggaaattattctcttaatctttcttgtgtcttcatgatatatttatttaatgtatatgtttatagtatgttaatgatacgagtttgttttgtgtggaaaattgttgcagacttttattgcacaggagcaactgtatttaaagaggctatgggttatgaatagtccaggttggatgattgcctacaagtcacagatgaagagaaacaggatggttattaaactggtaggaaattccaggggtgaagaagtggagaatggggacatgtctcttgctgtatattttttgtctgttgaggttcctgtgtgggtactgtttttcgctctcggtgtctcatctgacaaagagattgtagatctcattggttgtggcaatgatgatgtcagaattcagaatattctctttgcatctgttcgggatgctgatgagaaatgtggagcatttcgaagaggtaggcatgcagttcaatatttagaaaaatgtgtaaaaagtgttcaatttccaccttcggagtctatgcaggagtgccttgaaatgtatgtcttccctggaattagtggtttgaatagaaaggcgcgcttccttgcatatatggtgaaaggtctcttgctggcttatactggccgccgaaaatgcgacaacagggatgattttcgaaataagaggcttgaattggccagtgagcttcttgaccgtgagttgaaagtgcacattgcacatgcccggaagcgaatggcaaaagctttgcagagagacctttatggagatagggatgtacgcccaattgagcattatctcgacgcgtccataattacaaatggcttgcaaagggcattttcaacaggagcgtggtctcatccatacaagaggatggaaaggatctcaggtgtggttgcaaatgttgggcgcactaatcccttacaaaccatggctgagttaagaagagcgaggcagcaggtccagtacacaggaaaagttggggatgctagatatccgtgagtcactataagatttgtctattttagttatttttttattattattgttgttttctttctgctgttgtgcagtgagaagtgtgttagacaactaaaatagttgttagttctatacagctattttttccttttctttttgcttttatttgttacaacaaaagtttgtggttacaggcatccttctcactggggcaaggtttgtttcctctctaccccagatggtgaaaattgtggactagtaaaaaatttggctgtcacaggattagtaagtactgatgtatcggcagtatctgaatatatactgcctaaattgctggattgtggaatggaagaacttgttgatgatacttccactcatcttgggaacaaggacaaagttctcctaaatggcgattgggttggagtgtgtcctgattccagttcatttgtggcagagctacgaagcagaagacgtagaaatgaactgcctcatcaggtttacttttaatatcccattttaaagtggttttgttggctctactagtcatattttaatattgtaaaacattcttttaatttgacccatgtagtggatctcaccttgtgggaaaaggcttttgttattgttgtatgtttttaatttgagccataaactgtcaaatctagttagtagcatttggaaacttttgtctatattagctaataattttatagcttagtttatgtctttttgaggactgtgattgccaatgactgacattttgtaaatgcttaacctgcttcacatgattggattaactgtttggacttccttttttctgtgaatgatgttattgtttcctgacaccctgcctctgaatcaatttgtcgtttttgtgtccctttgcagggtagatgatatattaacaaatgatatagttactgtttaagcatttggaaacttaagtctaaattagctaataattttatggcttaatttatgtctttgtgaggactggtgatcctgtttcttttgaacctggtgataactattttccattgtaggtggaaatcaagagagaccaatctcaacatgaagtgcgcatatactcggatgcaggaaggattctacgtcctcttttggtggttggtaatctactcaagattaaaggatttaaatcagactgtaactctttccagtctctattggataaaggtgtgattgagctgattggaccggaagaagaggaagactgttgtacagcctggggtgttgagtatttatttggaaaagaaggaaaacgatctgtaaagtacactcattgtgaacttgatatgtcattcttattgggtttaagctgttcacttgtaccatttgctaatcatgaccatgcgaggagggtactctaccagtctcagaagcactcctcacaggcaattggcttttctacaacaaacccgaacattagagttgatactttgtctcaccagttacactatccccaaaagcccctttttcgaacaatggcttcagattgtcttggaaaaccagacaattcacttggtcaaaataaaataagtaaaatacctccaaaggcagaattctataatgggcagaatgcaattgtggctgttaatgtacatctgggatacaatcaagaggattcccttgtgatgaaccgtgcttcactgcagcgtggtatgttcaggtctgagcacataaggagttacaaatctgaaatcgataataaggaatcttcagataagaagcgaaaacctgaagacattgtaaattttgcaaagctacaaagtaaaattggccgagttgatagccttgatgatgatggctttccatatgttggtgctaatttgcagagcggtgatattattattgggaagggtgctgaatctggtgcagacaatagtgtaaagttaaagcacactgaaaggggttatgtgcaaaaggttgtgctgtcttcaaatgacgaagggaaaaattttgctgtggtttcattaagacaggtaactggtgaatccctaaattttgcttgtgcatgaacttttaggaattactgtaacgtacataacttactgtcacaaattagtacattttaatgcccatctacattcacaactgaaagctacctttaatttgatcactggataaatctgttatttaataatgttgcaggttcgaagtcccgttcttggagacaagttctccagtatgcatggacaaaagggagttttgggatttctggagtctcaggaaaattttcctttcacaagacaaggcattgttcctgatattgtcataaatccacatgcatttccctcacgacaaactcctgggcaactcctagaggctgctttaggaaaggggattgcttgtggtggcatactgagacaagctacgcctttctccacaccttctgttgatgccattactgaacagcttcacaggtacagtttgatcacaccattcagtttactgtgtcttgcattatgtgagccattctttcaaagaggaacttgcatttcagcttctacccttgcttactgtattactaatgttttttatttgcctgtgtcttcaaagttgtagacggtttcttgtcttttctctagtctcgctttaaaattaagaattactttgcctaacttcacttttaaagttatcgtgtaacttgttcttgttttactgaaccctcacccacgttccttttgagaatatggcagagctgggttttcaagatggggaaatgagagggtatacaatggaaggactggtgagatggttcgatcactcatttttatgggaccaacattttaccaacgtctgcaccatatgtctgaagacaaagtgaaattccggaacactggtccagttcacccgttgacccgacagcctgtagctgacagaaaacgatttggaggtatcaagttcggtgagatggagcgtgattgcctaatagctcatggtgcatcagccaacctgtatgaacgcctgtttacactcagtgactcctctcagattcatatctgcagcaaatgcaaaaatgttgcaaatgtgatcttgcggcctgtctctggtggccggaaaatacgaggaccttattgccgccactgtgaatctgcggatgacattgtggtggctcatgtcccgtatggagcaaagttattatgccaggagctctttagcatgggcataaatcttaaatttgaaacccaactttgctagacaaacactaatggtctcttttgttcatttctcccttaaatgaatttcagtgtagatattactttcgttcgccgatgtttctttgaatgcctggcaattagaagtactggatctcttttatcttgttactgatgcatgtttctctattatttacgggctagttagtgtatccttgtgaaaagttgaagacaagaaatttaaaaatgattattaaca

SEQ ID NO: 200 - DNA, 6835 bp, Glycine max
  source 1..6835: mol_type = genomic DNA
aagctcagtgtttggatcaatagcctgccaaaacaaaaataaaacataaaagagtatataataattatacaaggatatgtgggtgttaaagggatcaacaactcaataataaactgatgttgtcacgtggattacaattaaattaatatcttacttgaatttctagattttgaacaacacattatattgagagtgtgaaaataaggttcattgaaaagcctaattgttcctttgagctactttggcttcctatttatttccattttttaggaggatttcctctcttgtcccatatgtacattttgtcagacttacaccactcacacacatttaagttagggatttgagattctattcttattttgactcacaattcccaacttaactccaactccatagtcttgttagggtcccaaatgacaatgacaagacctattcaatggggtggctccaacttgatgacttatctaacttatgttgtgaacttaaacaattcatctatcataaaaatggttaacagcggggtaagatttacttccataatgccattgatggtggaaccacatattggcccaaatactccactataattgtctcatctttcctatattttatggttagtcactcactacacaccctttcacatctatgtatttagaaaagtatctctcttgctaatgaaattctatgtacatattagttatagaacaaagattagatgcaattatgtaagtgctttaggtatattgatctttaattagaattggagttttacttccataatttacataataaaattttacattaaagagcaccataagtcactgaagtaaaattctatgttgataagtgagcaatatcagaagtatttaaggatatgcatagttgcatataagttttgtccttagttatacattggagcttcaccatacctcttaatcgtcttttgcctcttaactttattggccacttcggaattgaaatatgacacatgtatgtggctgctaatttagctgacctactttgtgtataacatgttattaggatatccatttaagtttgttaattggagtctgagtcataaccactcttatttgcggatgtatgagactaatgacttatagagttttgtggaccaattggagagtcccagcagccagagaaaagttaaagtttttcatgtttaaaatgggtacgagtccaattgtcctggcccgaggacacatgcgtctttccgttttcctttcagcgaacgagaaacggagaaagtattgacttcacttgggacaagtgagaagtcaagagttggtgctttaccacatatacccctccctatcaccccagattgccacaagcgtttcataactttcatttccaggaaatcgaaactgctcgcgttgttcacagtcactcacactcactcacattggtgcagagagagagagacctaaactaaaaccctaaattccattgctgcagcaaaggcattgatcgttcggcatgggtcacgtaggttccagcaaggacggcaccaaggtggggctgtccgctgctgcgatggacatcgacgacgacgacgacgacgacgacgacgacctcggcgacgtcgacctagaccctacgaactccgaaatccttgaagaactcggcgaagacatggtgaaatactggtgcaagaaagcgtcgatgctgttcttcgacgagtacggtctgatcagccaccagatcaactcctttaaccacttcgtcgccatcggcctccaaaacaccttcgactccttcggagacctagtcgtaactcccggttttgacccctccaagaagggagaaaacgaacacttccgttacgcctccgttaagttcggcaaggtgaagctcgacaagcccatgttctggggcggtgaagggaatgcgcaggagttcaagatgcttccgagacacgcgagaatccagaggatgacctacgcttccaaagtcaaaatccaagttaaagttcaggttgggcaaaatggagtgatgccgtgtaatgtaggtttgttgctttgttggagcaatttaatttgtgatgttgtgtgtggattttgtaggtgtatgttccgaagaaggttcggagtgataagttcaagactgggaaagaggagttccttgatagagagattatgaaggaagacgagagggaaatcatcattgggagattgccagtcatggtcaagtctgatttgtgctggatgaaagacgcggaaaaagatgatgatgaatttgaccatggaggttattttatcgttaagggtgcagagaaggttcgtctcttcagcttgttgtatttcaatttgtagtattcttgggttttgatttttgtaggtcttcagaaaatagtatatatactgatactgttaagtctgtaaaggtttttcagtgttaatccgtcagaaataaccatgtatgataaatttgttgagttttacaataactacttttaaggttatatttaacatagtttctgatttattgtgtgctaatgatatgaatttgttttgtgcgaaaaattgttgcagacttttattgcacaggagcaactgtatttaaagaggctatgggttatgaacagtccagggtggatgattgcctacaagtcacagatgaagagaaacaggatggttattaaactggtaggcaattccaggagtgaagaagtggagaatggggacatgtgtcttactgtatattttttgtctgttgaggttcctgtgtgggtactgttttttgctctcggtgtctcatctgacaaagagattgtagatctcattggttgtggcaatgatgatgtcagaattcagaatatcctctttgcatctgttcgtgatgctgatgagaaatgtggagcatttcgaagagttaggaatgctgttcaatatttagaaaaatgtgtaaaaagtgttcaatttccaccttcggaatctatgcaggagtgccttgaaatgtatgtctttcctggaattagtggtttaaatagaaaggcgcgcttccttgcatatatggtgaaaggtctcttgctggcttatactggccgcagaaaatgcgacaacagggatgattttcgaaataagaggcttgaattggccagtgagcttcttgaccgtgagttgaaagtgcatgttgcacatgctcggaagcgaatggcaaaggctttgcagagagacctttatggagatagggacgtacgcccaattgaacattatcttgacgcgtccataattacaaatggcttgcaaagggcattttcaacaggagcgtggtcacatccgtataagaggatggaaaggatctcaggtgtggttgcaaatgttgggcgcactaatcccttgcaaaccatggctgagttaagaagagcaaggcagcaggtccagtacacaggaaaagttggggatgctagatatccgtgagtcactataagctttgtctattttagttcttttctttattattgttgttttctttctgcagttgtgcagtgcaaagtgtgttagacaactaaaatattctttacagctattttttcctttactttttgctttcatttattataacagaagtttgtggttgcaggcatccttctcactggggcaaggtttgtttcctcactaccccagatggtgaaaattgtggactagtaaaaaatttgtctgtcacaggattagtaagtactgatgtaactgacgtaactgaatctatactgctaaaattggtggattgtggaatgcaagaacttgttgatgatacttccactcatcttggcagcatggacaaagtcctcctaaatggtgattgggttggagtgtgtcccgattccagttcgtttgtggcagagctacgaagtagaagacgcagaaatgagctgcctcatcaggtttacttttaatatcccattttaagtggttttgtaggctctactagtcatttttttaatattttaaaacattcttttagtttgacccatgtagtggatctcaccttgtgagaaatggcttttgttattgttgtatgtttttaatttgagcattaaactgtaaaatctagttagtagcatttggaaacttaagtcaatattagctaataattttattgcttagtttatgtctttgtgagggctgtgattgccaatgactgacattgtatatggtttacctgctccacatgattggattaactgtttggacttcctttttttcatttttttttctgtgaatgatgctattgtttcctggcaccctgcctctgaatcaatttgtcgtttttgtgtccctttgcagggcagatgatatatgaattatgaacaaattttatagttactgtttaagtttggaaacttaagactaattcagctaataaatttatagcttaatttatgtctgtgaggactggtgatagctaatttccattgcaggtggaaatcaagagagaccaatctcagcatgaagtgcgcatatactctgatgcaggaaggattctacgtcctcttttggttgttggtaatctactgaagattaaaggatttaaatcagaccgttactctttccagtctctattggacaaaggtgttattgagctgattggacctgaagaagaggaagactgttgtactgcctggggtgttgagtatttatttggaaaagaaggaaaacgatctgtaaagtacactcactgtgaacttgatatgtcattcttattgggtttaagctgttcacttgtaccatttgctaatcatgaccatgcaaggagggtgctctaccagtctcagaagcactcctcacaggcaattggcttttctacaacaaacccgaacattagagttgatactttgtctcaccagttacactatccccaaaagcccctttttcgaacaatgacttcagattgtcttggaaaaccagaccattcactgggtcaaagtaaaatacctccaaaggcagaattctataatgggcagaatgcaattgtggctgtcaatgtacatctgggatacaatcaagaggattccctggtgatgaaccgtgcttcactgcagcgtggtatgttcaggtctgagcacataaggagttacaaatctgaaattgacaataaggaatcttcagataagaagcgaaaacctgaagacattgtaaattttgcaaagctacaaagtaaaattggccgagttgatagccttgatgatgatggctttccatatgttggcgctaatctccaaagcggtgatattattattgggaagtgtgctgaatccggtgcagacaatagtgtaaagttaaagcacactgaaaggggttatgtgcaaaaggttgtgctgtcttcaaatgacgagggtaaaaattttgctgtggtttcattaagacaggtaactggtgaatcccaaaactactttaatgaagatgcttgtgcatgaacttttaggaattactgcaacgtacataacttactgtatgcatgtagatgggcattaaaacgtactaatttgtgcatcatccgaacatggatgttttgttacacaactgaaagctaccgtaaatttgatcaccggataaatctgttatttaataatgttgcaggttcgtagtccagttcttggagacaagttctccagtatgcatggtcaaaagggagttttgggatttctggagtctcaggaaaattttcctttcacaagacaaggcattgttcctgatattgtcataaatccgcatgcatttccctcacgacaaactcctgggcaactcctagaggctgctttaggaaaggggattgcttgtggtggtatactgaaacaagctacgcctttctccactccttctgttgatgccattactgaacagcttcacaggtacagtttgatcacaccattcagtttacttaaaatgcagtttggattaccgtgttttgtattatgtgaaccattctttagaagaggaacttgcatttcagcttctgcccttgcttgctgtatgactgatgttttttatttgcctatgtcttcaaagttgtagatggtttcttgtcttttctctagtctcgctttaaaattaagaattattttgcctaatttcacttttaagttgtcatgtaacttgttcttgttttactgagccctcacccacgttccttttgagaatatgacagagctgggttttcaagatggggaaatgagagggtatacaatggaaggactggtgagatggttcgatcactcatttttatgggaccaacattttaccaacgtctgcaccatatgtctgaagacaaagtgaaattccggaacactggtccagttcacccgttgacccgacagcctgtagctgacagaaaacgatttggaggtatcaagttcggtgagatggagcgtgattgcctaatagctcatggtgcatcagccaacctgtatgaacgcctgtttacactcagtgactcctctcagattcacatctgcagcaaatgcaaaaaagttgcaaatgtgatcttgcggccagtgtctggtggacggaaaatacgaggaccttattgccgtcactgtgaatctgcggatgacattgtggtggcccatgtcccgtatggggcaaagttattatgccaggagctctttagcatgggcataaatcttaaatttgaaacccaactttgttagacaacactattagtgtctcttttgtacatttcctttaacttaatgaattcagtgtagatatcactctcgttcgtggatgtttctttgaatgccagcgagttaggagtactgcatgatatcctgagcttaacttgaatgtcattgcatctcttttatcttgtt

SEQ ID NO: 201 - DNA, 6990 bp, Glycine max
  source 1..6990: mol_type = genomic DNA
tcagaaatggagaggtgggaggggacggtggttgtagtttgagtgagaggagatgctactctatgggttcgtatcggtatgtggttcgtgatttgaatttgcaagtcgtgttatctcattctcaatctcaagatgatgatgatgatgttttggaaaatgggaatgtggaggggaagaggataggggactcaaccaaaggtgagagcttctctgtttccaagatatggctttggtccaagaagaccagatttcatggttctaatgcacctttcccttgattaattcaattcttgctgtaagaattgcttaacaatcaagtgtgtgtttggttaagcggtgcgattgtttctcattgttcaattattcaccgtgaatttgagagctaaaattcactgtgattggtatccaaacatactgagaaggtggaaacatgtgaggaagctagattttccatcaagaattgcatggcaataatagtgtgctttttttaaaaaaattcatatgccattaatatatacaggtttatgttagatgtctagatgatatactagggctcctttttgtctctcaccacttagcactcgaattacattgatctaggttgaaaagaatggttccagcgttttaaactggatcattgatatgagaaagaagtattgttacaaattccatgagtaaaattgtccaatattacattttgccaataaaaaaagtcctataatgatgttctaaaatttgcatgctggaggtgtagtgttactcttcaacaagttgtggccaaatgctaaaacattaaggctgtgtttgtataaccgttgagttgcgttgaatggagaagtaacagttttttacgctctgacgtttactttctagaaaagtaagaaatttcattggaatcacacaatggaatttttaacgagtttccgaacatacagtaactgttaaatttagaactagtcttaaagtaaacttgaatcaagatcacatgctacaattatattattttcaacatatagagatattaacactaataatgttccagtacgcaaaatgaacaaataagaagagagagaatcttcttgacgaaactctatctaagacttaaattctcattcaccaaaacaaaaaatgtgttcgtagttgcacgtttcattatcaagaactgaagtgaatttaatattattgagttttcttttggttgaataatattattgagtttgtaatactaaaattgaaccgaattaaggattccaactaatccaaatattttctacttaaaaaaattaatcccaatatttttttatgcttatcccaatattttattttagtagtgtgtttggtttaaagaagaaaaaatatgagataaaaatggaagagaaataatttaaagaggataaaataaaatgatatattatgttatttaatttaagagaaataagtgagaaatagtattttgtgtgtgaaagaaaataaatttttacttaaaagtcaattttttttttttttgtaaatccaaagaaaatcaattttttccctaaaaaatcaattttactgcaattgagagaaaaaattgtaagtttacagtttactccttccaaaattcaacaaaattgaacacgagagtcttttctaccaacggagacacagtcactccagtagagagtagcatcatggggacgacaacgacacccctttcccacacggttcgcgtgtccaacatcccccaatccgcgaccgcgaaggacctcctcgacttcctcgaatcgacgttgggttcctccacggtgttcgccctcgaaatcttctccgacaaccccaactggaagtcccgcggcttcgggcgcgtccagttcgagaccctcgacgccaggtcccgcgccctctcgctctcccaactcaaccagctcctcttcaaccgccacttcctccgcctctccgaaaccgactccgacatcatcttccgcccccaacaccgcctccaaaacggcgtcctctacgccggcttcatgctatccgaccaccgcatgagcgtcctcgaatcgtgggagggcattgcggggtgggtcctgccccaaaggaagagacttgacttctgggtgtggcataatggtgactgttacagactcgagtttttgtttgaggatattttggagtctcatggctattgtttgggagaagatgccagactcaatgcccttctcttgaaggtactatctattattgttatggacaaatacttattctctatcagtattggagttttacctaaataatctgcttaatagtagaagttttacctaggtaatcactaattaaagaacaatataaaagaaattctgtgtataaatcatcttgtttaatgtcaagaagtaagaacgtggggaagggaggggcaagaggcttttttttttatatatatatatgtcggtaaatgttggtttgttagttttgttagaaatctgagtggagattgcaacccacaaactttctcctctcccttcttccttcaccttttctctaccactcagtcaaccttatatctctagggacaaagaggcttttaagtttgactaagctctaaattaaggatttgttccgtagtgtaaaaaaaatcgaagcttgtgggggatatctagggtcccgttagtctatcaacagccttaaatacggtggttaaaaaaaaaacaagtacgaatgtgaattaggactttagtttatatgattgatgggttttttttttgtcagatgaaatttgggccaaggatttataagaaaaagacagggacagatgtggcagccaattttaggggtgatagataccgttttctgaaggaggattttgaatttctttgggtgcggactactgacttctcgcctctcaagtcaattgggcactctacttcgttttgttgggaaattgtggaggaacatttagcttcggatgtttttacaagtttcccactctacaaggaaaatttgagagatctggctctggaagacagagaagaactctgttctttgacagaagcagttccgcttgtaaaacatgctacgcaatccaagttaccttatgaggctgttttccagctgaattctcttgttcatacccagaaaataagtcttgcttcggtggatgatgaattgattgacttgttagcagacttagatgaagaaactagagctgtggtttttcagaaattgcacaagatgagcttcacttgttatgagcctctcaaatttgtcaagactcaattgcatgtgctgagtaacaagaaaaaaggtctgctgcaatcgccgcagaataggctgacagatagtaatattatgagctgtcatagagccttgattaccccgacaaagatttattgccttggtcccgagcttgaaacctcaaatcatgtggtaaagcactttgcttcacttgcatcagacttcatgaggattacctttgttgaagagaattggaataagcttccaactaatgcagtatcaactggtgtgcaaaagggaatcttttcaaagcctttgaaaactgaaatatataagcggatattgactattcttcgagatgggatcgtaattggctcaaagagatttgagttcctggccttctctgctagtcagctgcgatcaaattctgtttggttatttgcttctaatgacaatctgaaagcagcagatatcagagaatggatgggatgcttcaacaatattcgcagtgtttctaaatgtgcagcgaggatgggtcagttgttcagttcttccatgcaaacttttgaagtggcctctgaagatgtggagatgattccagatattgaagttacttctgatggtgtaagctactgtttctcagatggtattggaaaaatttcccaatgttttgctaggcaagttgctcaaaagctaaacttggatcatactccatcagcatttcaaattcggtatggaggatttaaaggtgtcattgccattgatcgccattcctttaggaagttatcattgcgtagcagcatgcttaagtttgaatccaataataggatgctttgtgtcactaaatggagtgagtcaatgccttgctttctcaatcgagagattatatccctgttgactacgttaggagtaaaagatgaggtacttttggcaatgcaacaggaccaattggatttgttaggaaggatgttgactgatagtaaagcagctttggatgttttggaaagtttaaacggagctgattcaaagagcattctagtgaagatgttgcatgaatttaatgagccaaacagtgagccttacctatcgatgatgcttaaggcttattatgcataccaattatctgacttgaaaagtagatgccgaatatttgttcccaagggtcgggtcttggtaggttgcttggatgaaactggtcttttgaattatggccaagtatttgtccgcataaccgtggcaaaaactagggaaaattttggagatgaaaacctaaggaaagtggatggggatgatagcacacgtataatagtgggaaaggtggtggtcacaaaaaatccttgtcttcacccaggagacatcagagtccttgatgctatctacagtaaagaattagaggaaaacggtttgagggattgccttgtatttccacaaaaaggacataggtatgtatataatgaactacatttacaatcccatttcattgcaagttgcaaccatttttcttttcaacgtagaattattacatcttttacatttatctttggtcctgtgtggtatcattgactaccatgagtcatttaatcacatgctaacaaaagaaggagatgcaaactgcaggatgagagatgttgttgttaggtaggctatcgcagtatcatttgtcatgtagattccagaacttgcagcatctacttgtgtgatgtttttcatttacttttcttactgtttcaactatttggtgtccttaatcatcatcagtttattattgtctaacggggcctatgggttctagttcaataggtctattaggttactttaagcttccttaaatgtttggaaaaaaaattacactgagattcgtttatttatacacatatctgaagatttagatgcacatagtttctagtagtaccttttgcaattagcttggttgttattaattttattatgaagcctgcagtcctagtgtagttgggttatctttgacctgactaaggaggcccggatactcatcatctaactccaatatcatggaaagataaaaaagtttatatgattatgcatattatattttatgtaatttaagaatatccttaatgtttagcctcttttttattctaaaaagttcaagtccaagccctacccagattttaaaccagctctgaatttgtccttactggcctgtgggcttaactttgaagttctatattttctaagactggttaagctcaggcccacctgggttctgcatcaagaagccgcattattatcattgatgtatattgttgctaatacttgttggttgaccaacttggcctgcaggcctcatccaaatgaatgctctggaggtgatcttgatggagatttgtttttcttaagttgggacaaagatctaatcccatgtcaaactgaggctccaatggactatacaggaaggaggcctcgtataatggaccataaggtgaccctagaggtaattttaaacaaagttacgattttttttttaaggaaacattgataaatgaaaaacttcttcctcatttgttctttcttgagtgtgcaggaaatccaacaattctttgttgattacatgatcaatgatactttgggtgctatctctactgcacatctcgttcatgctgaccgtgaacaagataaggccaagagtagaaaatgtctggaattggcagagcttcattccatggctgttgactttgcaaagactggagcacctgctgcaatgcctagagttctgaaaccaagagagtttccagatttcatggagagagttgacaagcctatgtacatctccaagggggtactgggaaaactttatcatgccataattgagtcacaaatgcaaataagatatagctttgtgtggtcagagaagcatgctgaagaagcatatgatcgtagccttgaagtgaatggttttgaggccttccttgagacagcatcaactcacaaagaaatgtatgcagagaagatgagcagtttaatggacttttatggtgcagagaccgaggatgaaatgctacttggtaacgtgcaaaaccgtgcttcatatttgcagcgtgataacaggagatatggtgatatgaaggatcggattctgctctcagtgaagaatcttcagcgtgaagctaaagaatggtttgaaactagttgccaaccgcgtgaatataagcctatggcatctgcatggtatcatgtgacctatcaccgcagccattattgccaggaaagcccatgttttctaagctttccatggatagttggtgacattttgctgcaaataaggtctgtgaactcctttgttaacagatgaattctttctctaatgatgtgcatttatttttgaaaaataaaataaaatctgaagccgtttgtggtggataaatgtcaatgcagacgttgattgaaggtaccaccatgtctaccagattttccttttgcaaaatattattgttattattattggcattataaatatttactagctgtacatgcgatgttgatactagtgggttgagttactccaaaaccaactcaccaaaattccgggtttgtgggacctggcttacaccctgtcaattactagtattagttcgagtttagtaaagtcaaatgaaaacaagtattgaaagagtgtctcactttcgtatctcaagtcatcatataaatttcaaatcctacacattataccacctatgaggagacaaagtttcttgggaagtaaattcagattattctgagattgtacaaatagaacatatt

SEQ ID NO: 202 - DNA, 6748 bp, Glycine max
  source 1..6748: mol_type = other DNA
aaaaaatttaaacaatgtatttatataaaattaataaagtatcatatatttcaataaaaactataaataagtaaactaaatgatattcacattctaactaaacctaaaataccatatatataatacaaataatatcatacaaacctaataaatctaaaccaactaataataacataacaactaaaattaacgtacaaataattttatcacaaataataacatacaaatttaaaaaatcttaacaaaatcatattaataaatcaactacaactaacgtacaaataataatataccaattcaaatttgtaacatatacatataacacaaataatattaatatttcaacgtactatttaaaatttaaaagtaccacctaacatcaacaaacgtagcatatgtatatataaaacaattaataccatactaatttacaaaatttaaagaaaataatattatcaaattaactaaaactaacctaacatatatatatatatatatatatatatatatatatatatatatataacaactaataacatacaatttaaaaaacctaacttaaataatattaatatatcaactaaagttaccaagttaagaaatacgtaccaaaaacacagaaaccaggagagaaatcacgtaatagggagaacaaagcatttgtcctacaagataaacaaacttaacgtaaataatttttcatatatcaactaaaatnnnnnnnnnnnnnnnnnnnnnnnnnnnnnnnnnnnnnnnnnnnnnnnnnnnnnnnnnnnnnnnnnnnnnnnnnnnnnnnnnnnnnnnnnnnnnnnnnnnntaaacacggaaccaggtagagaaatcacgtaatagggagagcagagcattgtcatacaaaagataaacaaacttacccgtaaataattttcatatctcaagtagaagtaaagttaacatatatatatatataacacagcaaatatttaaagttgccattaaaaaatacttccaataaaaaaagctggaacaaaataagaagaacgcaatgtagtggaggaatttatgaagaagaagaaaacaatgcaaggaacacaactatggagtcaggaaacttcttttataatgcaggaattttgaattaaaacaactagccagtgcaattggcgagtcctttctgcccacaaaccgctagccaggctggcgattccctcactgaaagcaaaccgccaatacggatggcgattccctcctgcatggcctgaccctgaagaacctgcttgcactctcctacacctagcccggctgagcctacttgttggaacttgttagtttgactggcaatttcctatatatggcgatatcgccattgccactggcgactccttcgcaaacaataaactcgccatttccacttacgatttgcgtggtgcatgcatgcaaatagcataaaaaacaatctctcacgaaaaaactttgaaaatgacccatctaaaaaaatagtttataaaagcaccccaaatgcgaaaatttgccaggttttgtttgtgtttggaagaaaactgaacacatcacgagacccttttccaccaacagtcgctgtgcctgtgttacttacgctctcagtcactctagtagggagcatcatcatggggacgacaacgacgacaaccctttccaacacggttcgcgtgtccaacatcccccaatccgcgaccgcgaaggacctcctcgacttcctcgaatcgacggtgggtccctcgacggtgttcgccctcgaaatcttctccgacaaccccaactggaagtcccgcggcttcggccgcgtccagttcgagaccctcgacgccaggtcccgcgccctctcgctctcccaactcaaccacctcctcttccaccgccacttcctccgcctctccgaaaccgacgccgacatcatcttccgcccccaacaccgccttcataacggcgtcctctacgccggcttcgtgctctccgaccaccgcatgagcgtcctcgaatcctgggagggcgtcgcgggctgggtcctgcccctaaggaagaggctggacttctgggtgtggcataatggcgactgttacagactcgagtttttgtttgaggatattttggagtctcatggctattgtttgggagaagatgccaaactcaatgccctcctcttgaaggtattacctatcattattattacggactagcattattctctatcagaattgaagttttacctagataatctgcttaatagtagaagttttacctaggtcatcacttattgaagaaagaaaatacttaagagtctgtatttaaattttgtcttgtttaatatcaacaggtacgaatgtggggatgggagggacaagaaactttaagtgtgactaacaaagctctaaatcaaggatttgtcctatagtcggtcaaaaagactgaagcttgtgagggatatcttaggatcctgttagggtgtcaaaagccttacatacggtggttttttttttttttttttttttaaaataaaacaagtatgaatgtcaattaggactttgatttatatgattaatgggtttttatttatttgattttttttttttttatgtcagatgaaatttgggccaaggatttataagaaaaagacgggggcagatgtggcagccaagtttaggggagatagataccgtttttgtaaggaggattttgaatttctttgggtgcggactaccgacttctcacctctcaagtcaattgggcactctacttcgttttgttgggaaattgtggaagaacatttagctttggatgtttttaaaagtttcccactctacaaggaaaatttgagagatctggctctggaagacggagaagaattctgttcttcgacagaagcagttccgcttgtaaagcgtgcttcacaatccaagttaccttatgaggctcttttccagctgaattctcttgttcatacccagaaaattagtcttgcttcggtggatgatgaattgattgacttgttagcaggcttagatgaagaaactagagctgtgatttttctgaaattgcacaagatgagcttcacctgttatgagcctctcaaatttgtcaagactcaattgcatgtgctgagtaacaagaaaaaaggtctgccacaatcgtcgcagaaaaggttgacagatagtaacattatgagctgtcatagagccttgattacccccacaaagatttattgccttggtcctgagcttgaaacctcaaatcatgtggtaaagcactttgcttcgcatgcatcggacttcatgaggattacctttgtcgaagagaattggaataagcttccaactaatgcagtatcaactggtgtgcaaaagggactcttttcaaagcctttgaaaactgaaatatataagcggatattgactattctccgagatgggattgtaattggctcaaagagatttgagttcctggccttctctgctagtcagctgcgatcaaattctgtttggttgtttgcttctaatgacaatctgaaagcagcagatatcagagaatggatgggatgcttcaacaatattcgcagtgtttctaaatgtgcagcgaggatgggtcagttgttcagttcttccatgcaaacttttgaagtggtctctcaagatgtggagataattccggatgttgaagttatttctgatggtgtaagctattgtttctcagatggtattggaaaaatttcccaatcttttgctaggcaagttgctcaaaagctaaaattggatcatactccatcagcatttcaaattcggtatggaggatttaaaggtgtcattgctgttgatcgccgttcctttaggaagttatcattgcgtagcagcatgcttaagtttgaatccaaaaacagcatgctttgtgtcactaaatggagtgagtcaatgccttgctttctcaatcgagagattatatccctgttgtctacattaggagtaaaagatgaggtgcttttggcaatgcaacatgaccaattggatttgttaggaaggatgctgactgatagtaaagcagctttggaagttttggaaagtttaaatggagctgattcaaagagcattctagtgaagatgttgcatgaatttaatgagccaaacagtgagccttacctatcaatgatgctcaaggcttattatgcataccaattatctgacttgaaaagtagatgccgaatatttgttcccaagggtcgggtcttggtaggttgcttggatgaaactggtcttttgaattatggccaagtatttgtccgcataaccgtgacaaaaactagggaaaaatttggagatgaaaacctaaggaaagtggatggggatgataacacatgtataatagtgggaaaggtggtggtcaccaaaaatccttgccttcacccaggagacatcagagtccttgatgctatctacagtgaagaattagaggagaagggtttgagggattgccttgtatttccacaaaaaggacataggtatgtgtataatgaactgcatttacaatcccatttgattgcaattgcaaccatttttttattcaacatagaattattacatcttttacatttatctttggtcctgtgtggtgtcattgactaccatgagtcatttttaatcacgtgccaacaaaagaaggagatgcaaactgtaggatgagagatacaaggggaaaggaggatgttgttgttggctagactatcacagtatcatttgtcatgtagattccagaacttgcagcatctactcgcattgcgttttcatttacttttgcaaaaacaaaaatgttatttttactgtctcaacaatttggtgtccttagtcatcatcagttttttattgtctaacgatgccaactggttctagttcaatgggtctattaggttactttaagcttccttaaatgtttgaaaaaaaaaatttacagtgagatttgtttatttatacacatctctgaagattcagatgcagagtttctagtagtaccttttattatttagctcgtgattaattttattatgaagcctgtagtcctagtgtagttggcttatctttgacctgtctaaggatgccagatacttatcacctaaccccaatgtcatgaaaagagaaaaaagtttatatgattatgcatattatattgtatgtaatttaagaatatctttaattttttagcctcttttttattctaaaagtccaaaagcccaacccagattttaaaccagctctgaatttgtccttactggcctatgggcttaacttcgaagtcctatattttttaagactggttgagctcaggcccacctgtgttctgcatcaagaagccgctatattatcattgatgtttattgctgctaatacttgttggttggcctgcaggcctcatccaaatgaatgctctggaggtgatctcgatggagatttgtttttcataagttgggacaaagatctaatcccatgtcaaactgaggctccaatggactacacaggaaggaggccccgtataatggaccataaagtgaccctagaggtaattttctacgaagttacaatttttttttaaagaaacattgataaatgaaaaactgcttcctcatttgttctttcctgggtgagcaggaaatccaacaattctttgttgattacatgatcaatgatactttgggtgctatctctactgctcatctagttcacgctgaccgtgaacaagataaggccaagagtagaaaatgtctggaattggcagagcttcattccatggctgtcgactttgcaaagactggagcacctgctgcaatgcctagagttctgaaaccaagagagtttccagatttcatggagagggttgacaagcctatgtacatctccaagggggtactgggaaaactttatcgcgccataattgagtcacaaatgcaaataagatatagctttgtgtggtcagagaagcatgctgaagaagcatatgaccgtagccttgaagtgaatggttttgaggccttccttgagacagcatcaactcacaaagaaatgtatgcagagaagatgagcagtttaatggacttctatggtgcagagaccgaggatgaaatgctacttggtaacttgcaaaaccgtgcttcatatttgcagcgtgataacaggagatatggtgatatgaaggatcggattctgctctcagtgaagaaccttcagcgtgaagctaaagaatggtttgaaactagttgcgaaccgcatgaatataagcctatggcatctgcatggtatcatgtgacctatcaccccagctattattgccgggaaagcccatgctttctaagctttccatggatagttggtgagattttgctgcaaataaggtctgtgagcaaaggagttcacaaatgaaggcttcctctaatgctgtgtgcatttttattttgaaaaaagaagaaaaaatctgaagccgtttgtggtggataacatgtatatgcagatgttgattgaaggtaccaccttgtctgcgagagtttccttttgcaaaatattattgttatcaatatttggcattataaaaatttactagccgtatatgtgatgttgatgccagtggcttcatctataaccaggttcagcgaatcaagtgggttgggttactccaaaaccgtttcaccaaaattccgggtttgtaggatctggttacaccctgttcgagtttattaaagtcaatttaaaacgagtat

SEQ ID NO: 203 - DNA, 5917 bp, Glycine max
  source 1..5917: mol_type = genomic DNA
ggtagagaaatcacgtaatagggagagcagagcattgtcatacaaaagataaacaaacttacccgtaaataattttcatatctcaagtagaagtaaagttaacatatatatatatataacacagcaaatatttaaagttgccattaaaaaatacttccaataaaaaaagctggaacaaaataagaagaacgcaatgtagtggaggaatttatgaagaagaagaaaacaatgcaaggaacacaactatggagtcaggaaacttcttttataatgcaggaattttgaattaaaacaactagccagtgcaattggcgagtcctttctgcccacaaaccgctagccaggctggcgattccctcactgaaagcaaaccgccaatacggatggcgattccctcctgcatggcctgaccctgaagaacctgcttgcactctcctacacctagcccggctgagcctacttgttggaacttgttagtttgactggcaatttcctatatatggcgatatcgccattgccactggcgactccttcgcaaacaataaactcgccatttccacttacgatttgcgtggtgcatgcatgcaaatagcataaaaaacaatctctcacgaaaaaactttgaaaatgacccatctaaaaaaatagtttataaaagcaccccaaatgcgaaaatttgccaggttttgtttgtgtttggaagaaaactgaacacatcacgagacccttttccaccaacagtcgctgtgcctgtgttacttacgctctcagtcactctagtagggagcatcatcatggggacgacaacgacgacaaccctttccaacacggttcgcgtgtccaacatcccccaatccgcgaccgcgaaggacctcctcgacttcctcgaatcgacggtgggtccctcgacggtgttcgccctcgaaatcttctccgacaaccccaactggaagtcccgcggcttcggccgcgtccagttcgagaccctcgacgccaggtcccgcgccctctcgctctcccaactcaaccacctcctcttccaccgccacttcctccgcctctccgaaaccgacgccgacatcatcttccgcccccaacaccgccttcataacggcgtcctctacgccggcttcgtgctctccgaccaccgcatgagcgtcctcgaatcctgggagggcgtcgcgggctgggtcctgcccctaaggaagaggctggacttctgggtgtggcataatggcgactgttacagactcgagtttttgtttgaggatattttggagtctcatggctattgtttgggagaagatgccaaactcaatgccctcctcttgaaggtattacctatcattattattacggactagcattattctctatcagaattgaagttttacctagataatctgcttaatagtagaagttttacctaggtcatcacttattgaagaaagaaaatacttaagagtctgtatttaaattttgtcttgtttaatatcaacaggtacgaatgtggggatgggagggacaagaaactttaagtgtgactaacaaagctctaaatcaaggatttgtcctatagtcggtcaaaaagactgaagcttgtgagggatatcttaggatcctgttagggtgtcaaaagccttacatacggtggttttttttttttttttttttttaaaataaaacaagtatgaatgtcaattaggactttgatttatatgattaatgggtttttatttatttgattttttttttttttatgtcagatgaaatttgggccaaggatttataagaaaaagacgggggcagatgtggcagccaagtttaggggagatagataccgtttttgtaaggaggattttgaatttctttgggtgcggactaccgacttctcacctctcaagtcaattgggcactctacttcgttttgttgggaaattgtggaagaacatttagctttggatgtttttaaaagtttcccactctacaaggaaaatttgagagatctggctctggaagacggagaagaattctgttcttcgacagaagcagttccgcttgtaaagcgtgcttcacaatccaagttaccttatgaggctcttttccagctgaattctcttgttcatacccagaaaattagtcttgcttcggtggatgatgaattgattgacttgttagcaggcttagatgaagaaactagagctgtgatttttctgaaattgcacaagatgagcttcacctgttatgagcctctcaaatttgtcaagactcaattgcatgtgctgagtaacaagaaaaaaggtctgccacaatcgtcgcagaaaaggttgacagatagtaacattatgagctgtcatagagccttgattacccccacaaagatttattgccttggtcctgagcttgaaacctcaaatcatgtggtaaagcactttgcttcgcatgcatcggacttcatgaggattacctttgtcgaagagaattggaataagcttccaactaatgcagtatcaactggtgtgcaaaagggactcttttcaaagcctttgaaaactgaaatatataagcggatattgactattctccgagatgggattgtaattggctcaaagagatttgagttcctggccttctctgctagtcagctgcgatcaaattctgtttggttgtttgcttctaatgacaatctgaaagcagcagatatcagagaatggatgggatgcttcaacaatattcgcagtgtttctaaatgtgcagcgaggatgggtcagttgttcagttcttccatgcaaacttttgaagtggtctctcaagatgtggagataattccggatgttgaagttatttctgatggtgtaagctattgtttctcagatggtattggaaaaatttcccaatcttttgctaggcaagttgctcaaaagctaaaattggatcatactccatcagcatttcaaattcggtatggaggatttaaaggtgtcattgctgttgatcgccgttcctttaggaagttatcattgcgtagcagcatgcttaagtttgaatccaaaaacagcatgctttgtgtcactaaatggagtgagtcaatgccttgctttctcaatcgagagattatatccctgttgtctacattaggagtaaaagatgaggtgcttttggcaatgcaacatgaccaattggatttgttaggaaggatgctgactgatagtaaagcagctttggaagttttggaaagtttaaatggagctgattcaaagagcattctagtgaagatgttgcatgaatttaatgagccaaacagtgagccttacctatcaatgatgctcaaggcttattatgcataccaattatctgacttgaaaagtagatgccgaatatttgttcccaagggtcgggtcttggtaggttgcttggatgaaactggtcttttgaattatggccaagtatttgtccgcataaccgtgacaaaaactagggaaaaatttggagatgaaaacctaaggaaagtggatggggatgataacacatgtataatagtgggaaaggtggtggtcaccaaaaatccttgccttcacccaggagacatcagagtccttgatgctatctacagtgaagaattagaggagaagggtttgagggattgccttgtatttccacaaaaaggacataggtatgtgtataatgaactgcatttacaatcccatttgattgcaattgcaaccatttttttattcaacatagaattattacatcttttacatttatctttggtcctgtgtggtgtcattgactaccatgagtcatttttaatcacgtgccaacaaaagaaggagatgcaaactgtaggatgagagatacaaggggaaaggaggatgttgttgttggctagactatcacagtatcatttgtcatgtagattccagaacttgcagcatctactcgcattgcgttttcatttacttttgcaaaaacaaaaatgttatttttactgtctcaacaatttggtgtccttagtcatcatcagttttttattgtctaacgatgccaactggttctagttcaatgggtctattaggttactttaagcttccttaaatgtttgaaaaaaaaaatttacagtgagatttgtttatttatacacatctctgaagattcagatgcagagtttctagtagtaccttttattatttagctcgtgattaattttattatgaagcctgtagtcctagtgtagttggcttatctttgacctgtctaaggatgccagatacttatcacctaaccccaatgtcatgaaaagagaaaaaagtttatatgattatgcatattatattgtatgtaatttaagaatatctttaattttttagcctcttttttattctaaaagtccaaaagcccaacccagattttaaaccagctctgaatttgtccttactggcctatgggcttaacttcgaagtcctatattttttaagactggttgagctcaggcccacctgtgttctgcatcaagaagccgctatattatcattgatgtttattgctgctaatacttgttggttggcctgcaggcctcatccaaatgaatgctctggaggtgatctcgatggagatttgtttttcataagttgggacaaagatctaatcccatgtcaaactgaggctccaatggactacacaggaaggaggccccgtataatggaccataaagtgaccctagaggtaattttctacgaagttacaatttttttttaaagaaacattgataaatgaaaaactgcttcctcatttgttctttcctgggtgagcaggaaatccaacaattctttgttgattacatgatcaatgatactttgggtgctatctctactgctcatctagttcacgctgaccgtgaacaagataaggccaagagtagaaaatgtctggaattggcagagcttcattccatggctgtcgactttgcaaagactggagcacctgctgcaatgcctagagttctgaaaccaagagagtttccagatttcatggagagggttgacaagcctatgtacatctccaagggggtactgggaaaactttatcgcgccataattgagtcacaaatgcaaataagatatagctttgtgtggtcagagaagcatgctgaagaagcatatgaccgtagccttgaagtgaatggttttgaggccttccttgagacagcatcaactcacaaagaaatgtatgcagagaagatgagcagtttaatggacttctatggtgcagagaccgaggatgaaatgctacttggtaacttgcaaaaccgtgcttcatatttgcagcgtgataacaggagatatggtgatatgaaggatcggattctgctctcagtgaagaaccttcagcgtgaagctaaagaatggtttgaaactagttgcgaaccgcatgaatataagcctatggcatctgcatggtatcatgtgacctatcaccccagctattattgccgggaaagcccatgctttctaagctttccatggatagttggtgagattttgctgcaaataaggtctgtgagcaaaggagttcacaaatgaaggcttcctctaatgctgtgtgcatttttattttgaaaaaagaagaaaaaatctgaagccgtttgtggtggataacatgtatatgcagatgttgattgaaggtaccaccttgtctgcgagagtttccttttgcaaaatattattgttatcaatatttggcattataaaaatttactagccgtatatgtgatgttgatgccagtggcttcatctataaccaggttcagcgaatcaagtgggttgggttactccaaaaccgtttcaccaaaattccgggtttgtaggatctggttacaccctgttcgagtttattaaagtcaatttaaaacgagtat

SEQ ID NO: 204 - DNA, 7773 bp, Glycine max
  source 1..7773: mol_type = genomic DNA
aaaggcattctaaatataattgaaaaatttctggcacaaatttgcagccttctagtgactgaggattttcatttatagagctctctgtgtttacatttcaaagatgacagacaagaaattgaagtgttgacttgaagtgaatgaaaaacacacacaattgggcgcatgaatttgagccaaattattgcaaaattctgaagcacagtaaaatgaaccttgatttgcacccataaattggatcgtgtttaactttgatttggaaaagcacagcttggagcaggtggtatgggtacaatggaataagtgttgtttatcaagtcttaagcagtgggtggtaataggcggtgtgcggatttatcttatagttccacatcgaaggatactacaacagagaactaaattagcttctataacagaaaaaagctttggctctacaaagtattcttttttagtaaatttacagttaattatgttcatttatggttttaagttttttacagcttggctgattaaagctcttgaacaaaattaaaccctttattttaaaacgaacaaagcaaattatggtgtgaaataaacaattgcccttagactaactgaagaccttgtctaatctacacagttttcacccattatctccttatacatctctctattaactgctaaggagataatggggatgctaaggtaataaaattaactaatagtaccctttagtaactgctgaggtaataaaatttcaaaaccaaaacaaagtaaaagttaatggattaatattttattattaattctcaagttgtgcaatttttgtttaatgattaaatttaaagatttatattattattagcatcaattacttacatattttcatgagtgaaacacaaatgcattatggtttcaataatttacatttatttgtttctgtaataaaattaaccatattttaatatgttttcatacttaatataaatatctggacttcctctagtctttactataagtaattttttttacagtaataaaaaattagttattatcaattaattttataatcctatttaaaaaataactttccttcccaaattattttttattacaattatttatcaaaaataaaattaagtccaaatagaatttggattaaacaaaagatattttagaattttaagaaaacaattcaaatcaaactaaatcacgaattgtcttaaacttacatgataatgaagtttaatttagttggttaagaaaagatgcggaaattattataattttttgacactatcattgattttcatgaaaaaaaaatgaaattaagtcaattaaaatacattatgtgtggaactctattttattttaagagaaaaaatggttataataaaaagttttatagactcatgaaatcataattcatcgtgcatcataaataaatttatgttttaaataattattataaaataatttaaataataatttataaaaatattatctttgtttttttttttttagccctaacaatggtagcgaatagcgacactctcagtctcactgagtcacattatctttgtgtgtgtatcgtaaaatgtaaacttcgtggagaaggtatcgcaaactgaatcaatcagactagacttgacccgtcaacttgcaactctctcttcaatcgcaattccttcacttcccactctcatacaaagacccaggtacatcactttctattacccttttctaatgtatcaatcctttctcatcaaagggtattgcgagcgagactacgtgggagcatgattgctttcatgatttgatcacaacgctatcctgcgtttggtttcgttactgggtaagcttttcgcatttaatgccttctgcttcttctttgccccaagatttttttttcgacattggatttcgtacttggttgtgttttgaatcgtgggtattctaaaatgcttcgaagccattgttgtcaaatttctttcttaactcatatgctcttaggactttatgattctagttgtaaaaacgaatcaactcgctgttaactctttttttggataaactcaggtatactcgatgaattcgtgtaaattcgcatgaactctttagtcaagaaagtgagtcaatgagtttgaaatcaaatgattaatttctgttttgttatgagtttttttagtttccgttttgaaattatttcccgtaattaccttgatgttggactgttttttaaaaccttgcattcaaaattaattgtgtagacactcacccaaacacatacttaaagcctctgatttgtatttgttttgcagcgatcttaatctgaataatatttctgatttattatcatattcttcttgatttgtgtgtcaaattgtttcattcttccgctgcaccatgaactgatatgtgggaaatttgtctcatattttagtgaagccttggtggcctgttcttggtgcaatttgtttctgtatcattagttttcttagtgcatatattttgggagtaaggaaagagtggaaaaggggcagggtaggatatgttgtgtctgtctctgaagaagaaggttcttattgataggattctttgaaaaaaaaatcagtttgtgaaaatgctctcataatttcctaaatatacaaaaccatgctcagagttcaaatccatttctctatgtgcatctgtctctccctgtatcttgttctttctatactcattgaatttgctatttttgatgactgatttattgagttatgtttaaatatatttttgtaaccaaagttaatctagagctgatgatactttgagctagtcttctcttcatgctcataaaccccccactttgaatctccattagatgagtattttttttcctcaattctcaaatattgatttatgttggcaattccaaaaaggttaatctaacttgcaaatttgtgtggtttagaatttacatactactgagaacatggacttagaaggaagtgaaaaggattcagtggttactcagattagcattggcggatttggcagtgaggtcaaagcaagtgatctcgtgaattacttggaggataaaattggacttgtgtacaggtgtaggttgaagacttcttggacccctccagagtcatatccagaatttaatatcattgatactgcaaatattagaagaacggataactataagaaggtggagccccatgcctttgtgcattttgcatctccggaatctgtgactgcagccctgaatgcttcaggttgttgtgatctatttttgaagaatcaacccttaaaggtcagctgtgggcctgaaaatccatacttcctgaaccaaaggaggagaactacaactccttttaagatgtctgatgtacttgttgaaattgggactttggttagcccaggggagttttttgtttcttggagaggacctgataaaggtgtaaaatttcttgtggatccctttgatggcatgtgcaggttttgtttcagtagggatactgcattctcattcaaagggatagaaaaaaaagcagtgataaagtgtgattttcaggtgggattcctggttagagacattaatgagatcaagagatataatgatacatcatatctcgttgttttattgcacctagcttcttcaccttgggtttggtacagaactgccgatgatgacattgaagaatcagtaccatttgatttgctagatgatgatgatccttggattagaaccactgattttactcccagtggggcaattggtcgatgcaatttttatagaatttcaatcccacctcgccatggtgcaaaattgatgaaggccatgctttatctgaaaggtcaaagagtgcaaatgcaagaacttgcacttaaacagacacttaggacactgaatgaacctgattttggtgtgcccatgtcagatgctttcttctatatacattttcagaaggacattgcttttgacataatgtttttggtcaatgctattgtacataaaggcatattcaatcagcacaggttgtcggataggttttttgaattgctgaaaaatcaacctaaggagctcaatgtggctgccctgaagcatttatgttcttacaagcgcccagtatttgatgcaactaagaggctaaaaatagtccaagaatggttgctcagaaatcctaaactttatcagatctctaaacagttggatgatattgttgaggttagaagattggttattactccatcaaaagcctattgtataccgcctgaagttgaattgtccaacagggttctcagaaaattcagagaagtttcagattgtttcttgagagtcacctttatggatgaaggcatgcaaacaattaatgtgaatgctcttaactattatgttgctcctatagtgaaggaaatcacatcgaattctttctctcaaaggacaaaaatatataaaagggtcaagactatcttggaacagggattttacttttgtggccgaaaatattcatttttagccttttcatccaatcaacttagagatagatctgcttggttttttgctgaagacaaaataagatgtgatgatatacgaaattggatgggcaagtttaatcagaggaatgttgcaaaatgtgctgctaggatgggacaatgcttctcgtctacttatgcaacagttgaagttgctgcaaatgaagttaactccatgctacctgatgttgagaggaacaattacattttctctgatggtattggtgttatcactcatgatcttgcaagggaagttgcagaaaagttgaagttggacaatgtaccctctgcttaccagatcagatatgctggttttaaaggggttgtggcctcttggccggccaaaggggatggagtcagactttctttgaggcctagtatgaacaagtttcaatctactcataatatcttggagatctgtgcttggaccaggtttcagcctggttttcttaaccggcagattataacattgctttcagcactgggtgtgcctgatgaagtattttggcaaatgcaggaggcaatgcttttgaagttaaatcaaatgcttgtggatgcagatattgctttcgatgttcttaccaaatcatgtgctgagcatgggaatgctgcagcaataatgttaagttgtggcttcagtcccctaacagaacctcatcttagaggaatgctaacttctacacgtgctgcgcagctttggggacttagagaaaagtccaggatttttgtatcgtctgggagatggttgatgggtgtcttagatgagtcgggcgtgcttgaacaagggcagtgctttgttcaagtgtctactccttctcttgaaaattgtttctcaaagcatggttcaagattttcagagacaaagaacctgcatgtagttaaaggttttgtgattatagcaaaaaatccttgccttcatccaggagatgtaagagttttggaggcagttgatgcccccgatttacatcatttaaatgattgtcttgttttccctcaaaagggtgacagaccccatacaaatgaagcttctggaagtgaccttgacggggatttatattttgtcacatgggatgaaaatctcattccaccaagtaagaggagctggatacctatggagtatgcccctcaagaaagcaaacttaagacacgtcaagtgatgacccgagtatgtcccttttgaatttcattctatgaagttccatagttagctagctgtatgctttgtgctatacatgggaacattaaaatatgattgttgtttttcacatgaattattcatagcctcctgcatttgattggtaattcaaatgacatattcactacagggacttgcctatagtaaatagcttttcatatttgggaaatatttcatctgatctcaaacataaaatttcaagtatgctgtaattcggcagtcacattcaatcataaagatttaaggtatatgttgcaattgtgttctctttcacattgtcctctaagttgtcttgttgtacatttggagtgatttttcttgttgaatatgcattgcgaaaatgagtcaactatttaaagttgttcccatgtatgctttgtgctatacatgggaatatttacataggattgtttttttcacatgaattctcatagtctcaatgtgtcatgcatttgattgtaattcaaatgacatattcactacagggacttgcctatagtaataacatttcatacttgggcaatatttcatctgatctcaaacataaaagtttgtgagtatgctggaactaattctacacagtcacattcaatcatagatttgaggtatatgttgctagtgtgttctcttgcacatgtttacatgctctgcacattgtcctctaacttgtcttgttgtacatatggtgtgttttttcttaaaatgagtcagcaatttaaagttgttttgtcttccgcattgcaggacatcatagaattttttgtcagaaacatggtaaatgaacatttgggtgcaatctgcaatgcacatgtggtacatgccgattccagtgactacggtgccttggatgagaaatgcatacacttggccgagctagcagccactgctgttgattttccaaagaccgggaagcttgtcactatgcctcctcatctgaaaccaaaattgtaccctgatttcatggggaaagagcggcaccagtcttacaggtcgaagaaaatcctgggtagactttaccggcgtatcaaagatgcttatgatgaagatattgatgctccctatttgaactttgtgactggcgatataccgtatgataaagatcttgaagttccaggatctgctgattttattgctgatgcgtgggagcaaaaatgctcatatgatggccaattgagtgggctacttggacaatacaaagtgaaaagagaagaggaagttgttactggacagatttggtctatgccaaaatacaacagtaggaagcaaggggagcttaaagagaggctgaagcactcttacagtgccctgaaaaaagaatttaggcacacttttgagaaattgaattcagatgttggagaattaagcgaggaagaaaaaaatttgttctatgagcagaaagcttcggcctggtatcaggtgacatatcatcctgagtgggtgaaaaaatcccttgatctgcaagataaatcctcagagaaccaagaggctgatagtttgggaagtacggtgatgttgagttttccttggattgcagttgattacctagctcgcacaaagataaggcaacgacatcagagatgtggaaattttgactcaactaagccagttgattctctggcaaagtatctatctgaaaggttataataattctattgagcttgctcttggctactaggccactctgccatcctataatattacgtataatgtgtcttcactttagctgcttcgattgtaactaggtttgttcccaagccaggaaatgcctctggttttgaggcttaagactgtatctagtctagttacatttgatactgtttgaccgttttgttatagtagtcttgtgcatgcggttatatgtatgtgattgtgattaaattatgtttcttgagctttctaaacatagtttgaacaatggtgaagctatcattgaaatctttgtgtgcagcattcataagtattttaaacaatagtgaagttattattgagatctttggcttataggcacagttaaagctcttgggaattaaatgtcttggcgaagtacatatgtgtcaactaataagaag

SEQ ID NO: 205 - DNA, 7773 bp, Glycine max; identical to SEQ ID NO: 204
  source 1..7773: mol_type = genomic DNA

SEQ ID NO: 206 - DNA, 7540 bp, Glycine max
  source 1..7540: mol_type = genomic DNA
tgtctatcaagtcttaagcagtgggtggtaataggcggtgtggggatttatgttatagtcccacatcgaacgatattacaaaggagctaaattagcttctataagaggaaaaagctttggctcttaaaagtcatgatccttcaggcagttaatgggatatgaggagtggtaaaaatctcgcacgaaatatgcgagtggggtgtccgccccagcctggttacgacaactgggcactctcccttgaaccaatctgatccctaacctgaagtacgattatttttagtaactaaaatctataaacaacaaactataaaaacttttgttgtttataaaaatgggtaaaaacaatttaaaaattatataacaaagcaaatcagtccacccctttcttgtttccagaatgcattttaaaatggaaattgaaaactgacaaccatttgctccttgatgggttgtttgagaaaaaatagagctgaaattatttttatacttatttttaagtttttttttgtgaattttgtttttagtttaaaaaagaatacatatttgctatgatcactatattgttatcaacttctgttattagcacctatcactgtgctatatacattatcatcattattattgcgttacaatcacccaaaatatttttaaactaattttaatataatatgaatctaattatattttaaaaattaatttgaaattttattgaaactaaaattaaaaactaattgttatttttaaaaatttcaaaactcaaagaaaaaatcatccaaaagaagacctatggttcaatattttgttttagagtagtttagtttataggaaagaaaaataacgaattttaccacatgaattatttaaaattataaaattatgaataagacattaaataagaacttcatgtggataaattttaatttctattaaacgaaaaatattttagagataacatcattaatataataaaattagttaaagtttacttatatttaaaattaaaatatataaaaagaaatgttattttattttagatttgtgtggataaattttaatttcaattagacgaaaagtattttagagataatattattaatataataaaattagttaaagtttacttatatttaaaattaaaatatataaaaaaatgttaccttatttagaccaaaatagtataattttactttttaaacatgtcatcataaatttaaatttttgattcgtatgtatgaaaagtatctattaaagagannnnnnnnnnnnnnnnnnnnnnnnnnnnnnnnnnnnnnnnnnnnnnnnnnnnnnnnnnnnnnnnnnnnnnnnnnnnnnnnnnnnnnnnnnnnnnnnnnnnccaaacctacatgcgattttttttttttgaacccaaagataatgactaatttatcgaaataggaagattatttaaggaacgaaaatctgccaacagatatttttcgtacacacatgaaacaaatgatttaaaactgtttaatttttgttttccagccctaacaaatgaaaatggcgaaactgattacagagcgacttgatagcaaatagcgacaagacaaaggacacgcacactcattcactcagtcacactatctttgtgtattgtaaaatgtaaacttcgtggagaaggcatcgcaaaccgaatcaatcagacttgacttgactcgtcatgctgcaactctctctcactttatcttccactcttcaatcgcaattcctccacactctcatacacagctacatcactttctattactcttttctaattcttatatgcttataatgtaatgtgaaccttaagttttcaaccatttcttatcaaagggtattgcgagcgagactctgcggttgctgatactttcatgatttgatcacaacgctatcctgcgtttttagtttggttactgggtaagcttttcgcatttagtgggttctgcttcttcttcttttgccccaagatttttatttttcgacattggatttagtacttggttgtgttttggatcgtgggtattctaaaatgcttggaagccattgttgtcaaatttttgagttaactcgtacgctctctggactttatgattctaggtagtaaaaacgaattaactagctgtttaactccttttttttttgggatgaactcaggtaaactcgataaactcgtgtaaattcgcatgaactcttgagtcaagaaagtgagtcaaccagtttgaaatcaaatgataaatttctgttttgttaggagtttttatttatttttggtttccgttttgaaattagttctcgtagtttccttgttcttatgaattctacttaaattccagccgcagtgactccaaaaaccttgatgttggactgttttttaaaaccttgcattcaaaaagtgtagacgctcacccaaacacatacttaaagcctctgatttgtatttgttttgcagcaatcttaatctgaataatatttctctgatttattatcatattcttcttgatttgtgtgtcaaattgtttcattcttcggctgctccataaattgatatgtgggaaatttgtctcatgttttagtgaagccttggggtctgttcttggtgcattttgtttctgtatcgttagttttcttagtgcacatatttttggagcaacgaaaaaatgaaggggcagggtaggatatgttctgtctgtctctgaagaagaaggttcttattgatagaattctttgaaaaaaaacaattagtttgtggaaattctctcataatttactaaatataaaaaccatgctcagagttcaaatctgtctctctatgtgcagctgtctctccctgtatctcgttctttctatactcattgaatttgctgtttttgatgactgatttattgagttatctttaattatatttttgtaaccaaagttaatctagagctgatgataccttgggctagctttctctttatgctcataaaccccccactctgaatcttcattagatgggtatttttttggctaatattgaaggcttccctttcccacactgtactttattttttttctctattctcaaatattgatttatgttgtcaatttcaaaaggttaatgttgcaaatttgtgtggtttagaatttacagactactaagaacatggacttagaaggaagtgaaaagggttcagtggttactcagattagcattggtggatttggcagtgaggtcaaagcaagtgatctcctgaattacttggaggataaaattggacttgtgtacaggtgtaggttgaagacttcttggacccctccagagtcatatccagaatttaaaatcattgatactgcaaagattagaagaacggaagactacaagaaggtggagccccatgcctttgtgcattttgcatctccggaatctgtgactgcagccctgaatgcttcaggttgttgtgatctatttttgaagaatcaaccgttaaaggtcagctgtgggcccaaaaatccatacttcctgaaccaaaggaggagaactacaactccttttaagatgtctgatgtacttgttgaaattgggactttggttagtccaggggagtttttcgtttcttggagaggacctgataaaggtgtaaaatttcttgtggatccctttgatggcatgtgcaggttttgtttcagtagagatactgcattctcattcaaagggatagacaaaaaagcagttataaagtgtgattttcaggtgggattcctggttagagacattaatgagatcaggagatataatgatacatcatatctcgttgttttattacacctagcttcttcgccttgggtttggtacagaactgccgatgatgacattgaagaatcagtaccatttgatttgctggatgatgatgatccttggatcagaaccactgattttactcctagtggggcaattggtcgatgcaatttttatagaatttcaatcccacctcgccatggtgcgaaattgatgaaggccatgctttatctaaaaggtcaaagagtgcaaatacaagaacttccactcaaacagacacttaggacacagaatgaacctgattttggcatgccaatgtcagatgctttcttctatgtacattttcagaaggacattgcttttgacataatgtttttggtcaatgctattgtacataaaggcatattcaatcagcacaggttgtcggataggttttttgaattgctgagaaatcaacctaaggagcttaatgtggctgccctgaagcatttatgttcgtacaagcgcccagtatttgatgcaactaagaggctaaaaatagtccaagaatggttgctcagaaatccaaaactgtatcagatctctaaacagttggatgatattgttgaggttagaagattggttgttactccatcaaaagcctattgtataccacctgaagttgaattgtccaacagggttctcagaaaattcagagaagtttcagattgtttcttgagagtcacctttatggatgaaggcatgcagacaattaatgtgaatgctcttaactattatgttgctcctatagtgaaggaaatcacatcaaactctttctctcaaaagacaaaaatatataaaagggtgaaaactatcttggaagagggattttacttttgtggccgaaaatattcatttttagccttttcatccaatcaacttagagatagatctgcttggttttttgctgaggacaaaataagatgtgatgatatacgaaattggatgggcaagtttaatcagaggaatgttgcaaaatgtgctgctaggatgggacaatgcttctcatctacttatgcaacagttgaagttgctgcaaatgaagttaactccatgctacccgatgttgagaggaacaattacattttctctgatggtattggtgttatcactcatgatcttgcaagggaagttgcagaaaagttgaaattggacaatgtaccctctgcttaccagatcagatatgctggttttaaaggggtcgtggcctcttggccggctaaaggggatggggtcagactttctttgaggcctagtatgaacaagtttcaatctactcataatatcttggagatctgtgcgtggaccaggtttcagcctggttttcttaatcggcagattataacattgctttcggcactgggtgtgcctgatgaaatattttggcaaatgcaggaggcaatgcttttgaagttaaatcaaatgcttgtggatgcagatatcgcttttgatgttctgaccaaatcatgtgctgagcatgggaatgctgcagcaataatgttaagttgtggcttcagtcccctaacagaacctcatcttagaggtatgttaacttctacacgtgctgcgcagctttggggacttagagaaaagtccaggatttttgtatcatctgggcgatggttgatgggtgtcttagatgagttgggtgtgcttgaacaagggcagtgctttgttcaagtgtctacaccttctcttgaaaattgtttctcaaagcatgggtcaagattttcagagacaaagaacctgcatgtagttaaaggttttgtggttatagccaaaaatccttgccttcatccaggagatgtaagagttttggaggcagttgatgcccccgatttacatcatttaaacgattgtcttgttttccctcaaaagggtgacagaccccatacaaatgaagcttctggaagtgaccttgatggggatctatattttgtcacatgggatgaaaatctcattccaccaagtaagaggagctggatacctatggagtatgcccctcaagaaagcaaacttctgacacgtcaagtgatgacccgagtatgtgctttttgaatttcattctatgaagttccatagttagctagctgtgtgctttgtgctatacatgggaacattaaaatatgattgttgtttttcacatgaattattcatagcctcatgcatttgattagtaattcaaatgacatattcactacagggacttgtgtatagtaataacatttcatatttgggaaatatttcatctgatctctaacataaaattttgagtgtgctggaactaattctacagtcacattcaatcatagggacttgcacattgtcctctaatttgtcttgttgtacatatggtgtgatttttcttgttgactatatattgcgaaaatgagtcagcaatttaaagttgttttgtcttccacactgcaggacatcatagaattttttgtcagaaacatggtaaatgaacatttgggtgcaatctgcaatgcacatgtggtacatgctgattccagtgactatggtgccttggatgaaaaatgcatacacttggccgagctagcagccactgctgtcgattttccaaagaccgggaagcttgtcactatgcctcctcatctgaagccaaaattgtaccctgatttcatggggaaagagcggcaccagtcttacaggtcaaataaaatcctgggtagactttaccggcatatcaaagatgcttatgatgaagatattgaagctccgtatttgaactttgtgactggcgatataccatatgataaagatcttgaggttccaggatctgctgattttattgctgatgcgtgggagcaaaaatgctcatatgatggccagttgagtgggctaattggtcaatacaaagtgaaaagagaagaggaagttgttactggacagatttggtccatgccaaaatacaacagtaggaagcaaggggagcttaaggagaggctgaagcactcttacagtgccctgaaaaaagaatttagatacactttcgagaagttgaattcggatgttggagaattaagcgaggaagaaaaaaatttgttgtatgagcagaaagcttcggcctggtatcaagtgacatatcatcctgaatgggtgaaaaaatcccttgatctgcaagataaatcctcagagaaccaagaggctgatagtttgggaagtacggtgatgttgagttttccttggattgcagttgattacctagctcgcacaaagataaggcaacgacatcagaggagtggaaattttgactcaactaagccagttgattatctggcaaagtatctatctgaaaggttataattccattgagagcttgctcttggctacaaggccactctgccattctataatattacagtgaacctgtgttgtatacgccttataatgtgtcttcactttagctgctttgattgtaactaggtttgttcccaagccagggaattcctttgcctttggggcttaagactgtatctagtctagttacatttgatacattgaccgtatgttatagtagtagtcttgttgtgctgcggttatttgtatatgattgtgattgtgattagattatgtttttttgagctttctaagcatactttgaacaaaggtgaaactattgttgagatctttgtgtgcagcattcataagttatttcaaacaatagtgaagttattattgagatcttcg

SEQ ID NO: 207 - DNA, 7540 bp, Glycine max; identical to SEQ ID NO: 206
  source 1..7540: mol_type = genomic DNA

SEQ ID NO: 208 - DNA, 9761 bp, Glycine max
  source 1..9761: mol_type = genomic DNA
agtatcataaatatatagttgtgcaaacttgggtgagttattgggcatatgtaggaggcttccaataagatgatgtctttgaccatgtatgcggaatgtaggaagacctctgccactactatatcttgtgtcaacttttgtaccaggtaatgtgaatgaaaacattagattatatgaacgaacgttggccgggaagttcttagattttgtactgttgttgtcaaaaagtagttgtctcattggttgtagaggatcttttagtagagaaagctgtattttgccatcgccacaacataatgcaaatcttgggtttttggactgcttgtctttatcaatcctttcatcataccacatcatagcttttacagtggatgcatttccaaactggatctctaatatcattgtaagttgcacctaaagatgaattaggaagtttagatgctccacacgtccaatagaaatggaaacacaggaaaaagtaagttggaattttaaggtcaatattggtatttttataatcatacgatgtatgatcattgcaatcatggtcactatcagcatcatcatttgttgttgttgggctatcaaatgaatattctacaatgcaagaatttgtgaaagttaaaatgtaagttatcagtttgacattacataattatagtcgacaaccatgtattcattttctatgtaataacaataaccacacattacctgcatcaatgtctgtttgatttatattgatttccttatcactatcatatgaaatctgagctattagtattgatttgtgtattgtatatttcctaggatgcatatgttgaaatgtactacctgaagtaattggagcagcaactatgagtgtatttgatgtagaagttgatagcggattcaaatttgatgaaattaatttttttttcctaaacttgtacaatagatttgtttggattgtagaagcctcaatgctatgtacattggcaatgtgtctcggacgaattcatgaggttttatgcaacatcttttaacataataaaaatgttttagtaattataatatatatacatatatatttagaaaaaataatttaaccaaacacatatttcaattgagaatataaaaaatatttctaaccattttaatagttaatcaaacatattttttaataacacccgacaaaaatatactccgaagactacaaaaattgtccgtgaaacaaatatcaccattgagttttgccgaaaatgcaattcttaaattgaaagcaaatatataaacattaatgatagactaattaaagggagatactaacaaatgcaagcaacgctttttcttgtttcctctccgcactctccttcgtctcgaagtttacccgtacgtgccatatgcccatattcacatttcttttatatatatatatatatatatatatatatatatatatatatatatatatatatttatttatttattttatttttttttctgttctctgtactgaataaatcacatttcattaaaatttcaagtccaccttggtcttccagctctaacgttactttgtcccgcatacttcacgcctctgctgttaccacactcactcactactactactcgctctccccacgctacactggttgcgcgtgagtctcaatcgccgcattctcttcgcgcgatctttctacgatcactggtgattccttcctttctttctctccgattttctcactttttttctttttgaaccgtacgatgtcgttttgtcttctataatgtcttgtttgttgcctgcattggttcttgcttcttggttgggaaagctcgttttgcatgtttcccttccatgtaaagatgatgaatatattaaaactaaacaaacaataattaataattaagaaagaaagaataaaatcggtttgtatctaacgaaggttttcggcttgttttcacgtttaactgcattttctatttctggttgaatatgatggagcatagtgagaattaagccaagactctcagcagtagttaagctattctaagttttagatttttttttggggtttcaaaccgtcagtaatattttacggcgaatcttccctgaacgctatgaattttcatatttaatcttggctgtgtgttggtgttttttttttttttttttttaagattggatttatggttttttttttttgccgtatcttcttcaagcttccaaaagaatttgaaatcgatggatttttatggagggattctgttgctgttgtttatctctaatttgtaatattacaataacacaataacaaaacctcgtggcttctactatctctgtggcttattatatatttattctaaaattctctcatttaatagtatcttttataggagtaattgtttgtttgaaaatagcaattaaatagggatatatgtagaaagaaaatagttaatgagacttggaatttgtaaaacatcagtgttttttggatcagagggagtataatctagctgcgtttcaatttcaatgtgctcacttaatattctaagcaaaataaaagtgtggcctgagtgcatttgcaaatgtgtcttttctggggtccttttgtgagagaaccatgctgttaaatgttaatttcaatacatgtaaaagctttactgtgttatgattttgtggaatcaccttttccctccctttttgtaatgatgtgaaatgttgtgttatgattatggcaatcttcatttatctggagctttggctgttgtgtgttatgtaccgtaattgtaagtgcttccccttgcatttgattcttgtaaaaccattatcctatcagtgttggtgttttgtggtattacattgagatccctcctctcatgtgtattgcgtctggatttaattcatgtaaaagcataatctgctcatgtgcatgtccattgtggtgatcttttttttagtattacattgtgattcctctttgtagtaatacagtgagattactcccttcaagtgcattgcccctgcatttgattcatagtagtcaatactgcaccattgcaccagtataatgatgacatgttccagcacagccccctgcaatgtctgtgtggcctgtagtggagcagtttagtgttgctcttattgtggcgtgaatcatgtctgcttttgtgtagaatcatggccaccctgtatcttatttttgcatgtacaaaaccccatttgtttggccctctaacagtgtcgtttggggttgcttctgtgtggtttgcagtggagcattacagtgtcatggactcatggttattgcgtcacgaattatggcaaccctacttgttattctttccctgtgcaaaaccctgtttgtttggccactcgaaaatgtcatttgatgctgtttctgcatggcctgtattggagcagttcagtgttgctgttattgcagtgcaacttgtggccacttttgcatagacctgtggccatcctagctgttattctttccatgtagaaaactctgtttgtttggtctctcaaaatgtcatttgatgctatttctgtggcctgtagtgcagctgctcagtgttgtggttattgcggcgcaaattgtggcatttccagctgttattctttccatgtacaaaaaactgtttggttggctcctctaacggcgccgtttggtgtcataaggctactataccatgcgaaaccggccacaatctgcctccaaaaaaaacctgtttgttttgttaggaagtcccacattgcttgcctcaattcttggggtgcagcttatatatttgttgggcaacttcccttagaaccaattggttttaagctaaatctaacatgtttggcccctctaacgatgtcatttagtgtcataaggtggggcagtcttgggatttttcatccttaaaagacagaccctacttctcttcgctatttgattcaaatcatctgacccggagctctcagctgcgcttctggccaatctgtggcactccagttgagtttcctgccaaccctcaatctgaatttttggcacactgttctgtggtctctattctgttcacatcctttggtctacattctattttgtgtgcgtgtgtatcaattttgtcaagatcctgagtaaaaccatgatcttgcatgatttcacgatcttgctccttgcatctgagttggatcttgaagcggttggatcggagtaagatcgtagtcaaatcggattgaattcataatattggttggtttttcttatcttctgagctggatttttggcacactgttctgtggtctctattccaatcacatcctttggtctatgttctattctgtgtgcatgtgtatcaattttgtcaagatcctgagtaaaatcgtgatcttgcacgatttcacgatcttgctcccagcttccgagttggatcgtgaagcggtgggatcggagtaagatcatagtcagatcggattgaattcgtagtattggttggtttcacttatcttctgagctagattttgagacaggttgcatgcctcaagtttattttaaccaactctattggtgccctaaattgatactttctgtttctcccccattttcagacctagacaagcactacccagcttttctgtctctcccttttcgattctcactatctctcggcttatcccttttgtctcctcagtcttgactcgaccctctctctactatgattgtttaatgctgtgcgcctgtggtgtgtgttatacttgaccctctctctctctggtctgctgtgatcatgactgagtgtctgttttgcactcctgttctcaccgaacatgacacctttgactctaaactttattttgtttacagccatgacctttctcagtattatttctatttctctttttcttttccctaaaactcatgagttgggtgattttggcctttattcgagatatcttctctactgtgtcttctattatattctatggttttatggtatatttacttcttttatgttttccataaattattacaaaatacagaagataatgaaatattttttccataaattattacaataggtataaaataaatttaattttttaaatggattttagtgatattattatatgttttagctaattatactatcatttataaatttgtggcattaaaatatatttttatatttttggtaggttcttctcatccttgttacaatcctgtgtttataattttgcaactctctggctgatcttaagtaggatatcgatcttgacaacattggtgtctatgtattgttttctctttctttcactgtcgtgcttagataggtaaccttatgttgctttagtttattttttcttttacattacatgactcttattattaacttctatatttggcttaaaagtatgacttgattattaattatgaatatgtctctaactatggctatttttttatttgagcatatatatgtgtgtgtgtgtagcataaaattaaattctataaatttcatagtagtggtcaactggtcatcctggtatccgctatcctgctatagcagttttgtagttggccattctgtgctgctatcctccatcctttcatgcacattgtgttggtctttttgtagttttacattgggatcctccatgtgcattgcccccgcatttgattcatgtactagcattatcctttttgcacgcattgcattggtctttttgttttattacattgagattcctcccttcatgtgcactgcaccctgcataagcattgtcctttcacacatattgcattggttcttttgtagtattacattgagattcctcccttcagttatattctatttattgtgtgcctcctttccatgttgagttcataatgaagtgttgattatgttctttatttgagattctaagaatgtaatattttactgaatgaattttttacaatgctttgatttgcttgtgtttttagctgtaggtggattaagatttctctttcttaagtttataagtttattgtagttgacaaatgaactgattttctcttttcaagttccttcagttttatgattctctatgcacctttacctcttgcatctattatgcgtaatgcaaaaaaatattgatccagaacagagcatatacaaatgagttcgaaaagagggggtgggagacctgtaaccgtggctaacaatgatatgtccaaagggaaaagcatatctgaagctcatccaaaagttgagcagttgactcagggtatcgctgacactaagctaaactcaggacaagatgatggtgagtgggaggtatatgcaaggaaatccaagaacaaggctggaagcagtgctgcaaaaccatgggcccccccagcccataattctaatcctagggcatgggggaatgcagaaatggctcaaaagccaggcatccggggtcatggtggacttggaagatcttcgggaaatccctggcagacacaaaatgctaactttaggagaccagctggcagaggaaatggaaggcctcagttagcaacaagtggatatgaaagcaactatgttccaaatcctgcaattcggcctccacttgagcatggctggaactggcaatccagacctggtgcattgcagtccaatgcaagggatgaaatttcaccagaggaccttcaaaagaatgatgatgttgatgacgatgatggggaggaggactctgatgcttttgaagataccgatgatgatctgatgagtgatgactatgattcagatgctagtcaaaagagtcatgagacacgtaagaaaatcaaatggtttaagaagttttttgagattttggatggcttgactgttgaacagataaatgaaccagaaagacagtggcattgtccagcttgccaaggtggtcctggagctattgattggtacagaggactgcagcccttggtgacacatgccaaaacaaagggatctaaaagggtgaagattcacagggagcttgctatacttttggatgaggaattacgcagaaggggtacttcagtaattccagctggggaagtatttggaaaatggaaaggtttgaaagaagaagaaaaagaccatgacatagtttggcccccaatggttgtcattcagaatacaaagcttgaacaggatgaaaatgataaggtatatattattggtgtcaaatgatgaataactagtagtgtcatatttgatattttgtttgcttgtatttatggagcataacattcacaatttgcgaataacatcactggtttttgtgttaactttggattttgttctttgtattcagtggataggtatgggtaaccaagaacttcttgattattttagcacatatgatgctgtgagagcacgacactcttatggcccacagggtcatcgtgggatgagtgttttgatatttgaagcctcagctagtggctatctagaggcagagcgtctccacaagcattttgcagagcaaggaactgataaagattcttggttcagtcgccctattttatatctccctggggggaatcgccagctctatggatacatggctacaaaagaagatatggactttttcaacagacattcccaaggtttcatttcctctttcttggttacttttcttcatatttgcattatgcagatggtttgatgtctacctacaggttaatttatggagacaaagtataagctgacatttttttttggcctcctgatgaaattatgtaggtaaatctagactcaaatatgacataagatcatatcaggagatggttgtacaccaaattcggcaaatgaatgaagacaaccaacagctgctctattttaagaacaaggctgtgaaaggtgcaaaacacacaaaagctcttgaagaatctattggtataatgtctgagaagctgcggaagacaatggaggaaaatcgcattgtgaggaggagaactaaaatgcaacatgaagagaccaaagaagaggtaatactaacatcagacagacttcatggctattaattttattgaaaagtggttactttgttgtggaatgtactttagtatattatttctaatgccactgagttgtggttaggatatgcttctgcttgattgctttgttgaaaagttttagctataatttatatttttgtagtacaagagtggataatctaaagttattgtcacatcttttatcttcttgtatgagatgttttgcatataaaaatgtgattcatgtacataccattgaacttcagtttgatgtgtcaaattagactagcactgaatatgagatacagttgcatattgttactcttttatatcttttcccttttcattaaaagtaaaagaaatcaatgagcgatgatagattgatagggttgcactggcctagactgcattaggctatttatctagatgggttgttttttaatgccttgaaagaaaggcacaaaatattgttaagatttggatctagattgattatttttgttttgttgtggaggtctgatgcataccattaacccagttttccagaacaacttccatttatttataaattgaatgaacaaaattgttattttgttaattttcccttctggaggtcatgatattatttttttcatagttttgttttctcactaatgtatcctgtcaatcatgaaagatgtatatgcaagaacaattcttcaaggaccagatcaaaatcattcatgattcaagggatgcaaaggaagaagatttcgagaggatgcaacaggaggaacgtgagaaggtgaagcagtcaagtactactggtcatgtgaatgctgaggaatatagactcaagtatgtaattgtcattccttccattggactattggtatattcacatctgaagccaatttaatctaaataaattttgcgaaattattatgtaggttattttaagttgaattgttgaaggacattttcttcttaaaaaactaatttcacgtgactctagaaagctaggttaattttttaaagagtaagaattatgtacatgtgcagaaaaattattgcctgttttgtgtgtgtacaataatggctgaggtttgaacttataactttgtgcaaactattcaaacccctggccgaccgtagtaggttaaaaaattattatctagttatttggatagtggtaattatatttttcaattgcttttgagtgaatttgacttctctggatgtagggtggaagagtatctgaaatttgttgaggtccaagataaagaaatggagaactttgttgctgaaaaggagaagctgttacatgctcatggcacgggttatgctgcaatgaagcggaggcattgggaggaagaagttcagtatgagcagaagtttgatgaggaattggctaacctcatggaaaagtactccccgtcgtagaagtccaatggtatctaatggtagggtcttttgcacagactcatacaaacagataaacacagccaaataggtagagaaaataaatagagacatcagctttctagagattgagacttttactaaattcagtatgtcattttcttttctttagtacttgttggcatttggtacattcttggatatagaaacctggttaaaattttaaatggtggtgcatgcggttcgaattgaatgacaaattttacaaattggacgttgccatgccctgatgaatgatttatgcattatgagtttgaatatcttgagccaggggattttactgtttcaatatgtttgaaagttccgttaagaatcaac

SEQ ID NO: 209 - DNA, 9761 bp, Glycine max; identical to SEQ ID NO: 208
  source 1..9761: mol_type = genomic DNA

SEQ ID NO: 210 - DNA, 7794 bp, Glycine max
  source 1..7794: mol_type = genomic DNA
atgatgaatatattaaaactataaaataaaaaattaataaagaaagaataaaataggttcgtatctaacgaagattttcggcttgttttcacgtttaactgcattttctatttttggttgaatgttatgaagaagagtgaaaagaaagaaagacaaggctcacagcaatagttgggtcttccaaaaggattaaactgttttttggggtttgaataaactcataatattttacggtgaatcttccctgaacgctatgagttttcatatagaatcctggctgtgtgttggtgtttttttttttttttttaagattggatttatgtttttttttaccctatcttcttcaagcttccaaaagaatttaaaatggatgggtttttaaggagggattctgttgctgtcgtttatctctgtttgtaatattagaataacacaataacaaaaccttctgccttctactactacctctgttacctaaactgttgatgtttaaagtcagtacacacagcttaaggaatagttaatactacctataataaattattactatttagtctaaaattctctcatttaatatcttttataggagtaattgtttgtttgaaaataacaattattaaataggggtatatgtagaaaaaaatagttaatgagacttgaaatttgtaaaacatcaatagttttggacttgaggaagtatcatctaagctgcgtttcaatctcaatgtgcgcacttaatattcaaagcaaaataaaaagtgtagcctgagtgcatttgcaaatgtgtcttttcttgggtcctgctatgagagaagcatgctgctaaatgttaatttcaatatctgtaaaagctttactgtgttatgattttatcgaatcacctttaccctccctttttgtaatgatgtgaaatgtttataagatggcaatcttcatttatctggagttttggctgttgtgtgtcttgtaccataactataagtgcttccccttgcatttggttcatgtaaaaccattatcctttcatgcacgttgtgttggtgttttgtggtattacattgagattcctcccttcatttgttttgtgcctgcatttgattcatgtaaaaggatcatctgttcatgtgcatgtccattgtggtgatctttttacagtattacattgtgattcttctttgtagtaatacaatgagattactcccttcaagtgcattgcccctgcatttggttcatagtagtcaatactgcaactttgcaccagtataatgatgatgtgttccagcacagccccctgccatgtctgtgtggcatgtagtggagcagttaagtgttgtgcttattgtgaggtgaatcgtgtctgcctgtgtagaatcatggcaatcctatatgttattttttccatgcataaaaccccatttgtttgacccctcaaacaatgtcatctggggctgcttctgtgtggcttgcagtggagcattacagtgtcatggattcatggttattgcatcacggattgtggccaccctacttgttattctttccttgtgcaaaaccctgtttgtttggccactcaaaaatgtcatttgatgctgtttctgtgtggcctgtattggagtagttcagtgttgctgtaattgcagtgcaacttgtggctgcttttgcatagacctgtggccatcctagctgttgttctctccatatacaaatccctgtttgttttgcccctcaaaatgtcatttggtgctgtttctgtgtggcctgtagtggagcagttcagtgttgtggttattgtggcacgaattgtggtctctttcgcatggaattgtggcatttccggctgttattctttccatatacaaaaacctatttgtttggctcctccaacgacgtcgtttggtgtcataaggctacaattccatgtgaaacggccacaatctgcctcaggaaaaaacccgtttgtttggcccctctaacgatgtcgtttagtgtcataaggtgggcagtcttgggattttttgcccttaaaagaaaaccctacttctctttgctatttgatgcaaatcatctgaccctgagctctcagctgcgcttctggccaatctgtggcactccagttgagtttccggccaaccctcaatctgaaattttggcaaactgttctgtggtctctattctgatcacatcctttggggcctgtactcttgacatcaaagaggggcccatgttctgttatgtgtgtgtatcaatgttgtaaagatcccgagtaaaatcgtgatcttgcatgatttcatgatcttgtaccctgcttccaagctgaattgcgggtaaaatcgtgaacttgcatgatttcacaattttgctccctgcctctgagttggattgtgagcaaaattgtgaaacggtgggatcggtttatgatcatagtcacagattggattgaaatcgtaatatcggttgatttttcttatcttctgagctggattttctgagacaggttgaatgcctcaaatttattttaacccactctattggtgccctaaattgatactttctgtttctcccccattttcagacctagacaagcactacccagcttttctctctcttttctattctctctatctcttggcttatcccttttgtctcctcagtcttgactcgaccctctctctgctatgattgtttgctgctgtgtgcctgtgtgcgttatacttgaccctctctctctggtctgctgtgatcgtgactgagtgctctgttttgcactcctgttctcactgaacagtgacacctgtgacactaaactttattttttatgcagccatgacctttctcagtattatttctttttcttttcttttccctaaaactcatgggttgggtgattttagcctttattcaagatatcttctctactgtgtcttttattatattctttggttttatgttatattcacttcttttattttttccacaaattattataaaatacagaacagaatgaaatattaattatacttatacagtatttataacttataaaataataggtatataaatatttaattttttaaatggattttactgatattattatatgtattatctaattatatttatcaaatttttgcattaaagtatatttttatatttttggtagattgttatgatccttgttaggatcccatgttcatgattttgcaaccctctgcccgatcttaagtaggatatatcgatcttgacaacattggtgtctatgtattgttgtctctttctttcactgttgtgcttagataggtaaccttatgttgctctttgttgctttactttattttttcttttgtattacttgactcttactattaacttctgtatttggcctaaaattatgacttaattattaattatgaatatgtctctaattatggctattttatttatttatttgagcatatatatatatatatatgtatatgcatatatatgtatatgtagcaaaaattctataaatttcatagtaatgatcaactggtcatcctggtatccacaatcctgctgtagcagttttggggttggccattctggctgctattctccatcctttcatgtgcattgtatcggtctcgtttcatgcacattgtgttggtctttttgtagttttacattgggatccctaccctccatgtgcattgcccctgcatttgattcatgtacaaccttttgcacacgttgcattggtcttttcgtattattacattgagatttctcccttcatgtgcactggcccctgcatttttcatgtacaagcagtatcctttcacacatattgcattggttcttttgtattattacattgagacttctcccttcagttatattctatttattgtatgcctcctttccatgttgacttcatagtgaagtgttgatttctttatttgagattctgagaacgtaatatttcagtgaatgaatttcttacaatgctttgacttgattgtgtctttagctgtatgtagattaagatttctctttcttaggtttattagtttattgtagttgacaaatgaactgattttctgttttcaagttccttcagttttattattctctatgcactttacctcccatctattatgcgtaacacaaaaatattgatgcagaacagagcatataaaaatgagtttgaaaagaggaggtgggagacctgtaactgtggctaacaatgatatgtccaaagggaaaagcatatctgaacctcagccaaaagttgagcagttgactcagggtattgctgatactaagctaaactcagaacaagatgatggtgagtgggaggtatatgcaaggaaatccaagaacaaggctggaagcagtgctgcaaaaccatggggccccccggtccataattctaatcctagggcatgggggaatgctgaaatggttcaaaagccaggcatccggagtcatggtggagttggaagatcttctggaaatccctggcagacaccaaatgctaactttaggagaccagctggcagaggaaatggaaggcctcaattaggaacaagtggatatgaaagcaactatgtgactccaaatcctgtaattcggcctccactcgagcatggctggaactggcaatccagacctggtgcaatgcagtccaatgtaagggatgaaatttcaccagaggaccttcaaaagaattatggtgttgatgatgatggggaggaggaggaatctgatgatttggaagatactgatgatgatctgatgagtgatgacgatgattctgatgctagtcaaaagagtcatgagacacgtaagaaaagcaaatggtataagaagttctttgagattttggatggcttgactgttgaacagataaacgaaccagaaagacagtggcattgtccagcttgccaaggtggtcctggagctattgattggtacagaggactgcagcccttggtgacacatgccaaaacaaagggatcaaaaagggtgaagattcacagggagcttgctatacttttggatgaggaattacgcagaaggggtacttcagtaattccagctggggaagtatttggaaagtggaaaggtttgaaagaagaagaaaaggaccatgagatagtttggcctccaatggttgtcattcagaatacaaagcttgaacaggatgaaaatgataaggtatagctatattttattggtgtcatatttgatattttgtttgcttgtatttatggagcataacattcacaattttttaataacattactggtttttatgtttactttggattttgttctttgtattcagtggataggtatgggtaaccaagaacttcttgattattttagcacatatgctgctgcaaaagcacggcactcttatggcccacagggtcatcgtgggatgagtgttttgatatttgaagcctcagctagtggctatctagaggcagagcgtctccacaagcattttgcagagcaaggaactgataaagatgcttggttcaatcgccctattttatatctacctggggggaatcgccagctctatggatacatggctacaaaagaagatctggactttttcaacaggcattcccaaggttccatttcctctttcttggttacttttattcatatttgcattatgcagattgtttgatgtctacccggtacaggttaatttatggagacaaagtataagttgaccttttttttggcctcctttcttctgaaactatgtaggtaaatctagactcaaatatgacataatgtcatatcaggagatggttgtacaccaaattcggcaaatgaatgaagacaaccaacagctgctctattttaaggacaaggctgtgaaaggtgcaaaacacacaaaagctcttgaagaatctattggtataatgtctgagaagctgcggaagacaatggaggaaaatcgcattgtgaggaggagaactaaaatgcaacatgaagagaccaaagaagaggtaatactaacatcaaacagactacatggctattaattttattgaaaagtggttaccttgttgtggaacgtactttattatttctgatgccactgagttgtggttagcatatgcttctggttgattgcttcgttgaaattttttagctgtaattacaagagtggataatctaaagttatctttaatcttcctgtatgaatgttttgcatataaaaatgtgattcatgtaccattgaacttcagtttgatgtgtcaaattagactagcactgaatatgagatacagttgcatattgttgatcttttacattttttagggttgcactggccaagactgcattaggctatttatctagatactataatgccttaaaagaaaggcacataatcttgttaagatttggatctagattgattatttttgttttgttgtggaggtctgatgcctaccattaaccctgttttccagaacaatttccatttatttataaattgaatgaataatttcatcctagttcttgctttcttggtttacttttttttactaacccagcattggtctgttttctcttcaaaaaaacaaaaattgttgttttgttaattttcccttctggttagcttttgtcttgaatgataaggtcataatattatcttttcatagttttgttttctcactaatgtttcctgtcaatcatgaaagatgtatatgcaagaacaattcttcaaagaccagatcaaaatcattcatgattcaagggatgcaaaggaagaagattttgagaagatgcaacaggaagagcgtgagaaggtgaagcagtcaagtagtactggtcatgtgaatgctgaggaatatagactcaagtatgtaattgtcattccttccattggactattgatatattcacatctgaagccaatttaatctaaataaattttgtgaaattattatgtaggtgattttaaattgaattgttgaaggacattttattcttaaaaactaatttcacgtagctgtaaaaagctaggttaattttttaaagagtaagaattatgtacatgtgctgaaaaattattgcctgttttgtgtgtgtacaataatggctgaggtttgaacttgtaactttgtgcaaactattcaaacccctggccgaccacagtaggtttaaaaaattattatctagttatttggatggtggtatttatatttttgaatggcttttgtgtgaatttgaattctctggatgaagggtggaagagtatctgaaatttgttgaggtccaagataaagaaatggagaactttgttgctgaaaaggagaaactgttgcatgctcatggcatgggttatgctgcaatgaagcggaggcattgggaggaagaagttcagtatgagcagaagtttgatgaggaactcgccaacctcatggaaaagtactccccgttggagaagttcaatggtatctaatggtagggtcttttgcacagactcatacaaacagataaacacagccaaataggtagagaaaatagagacatcagctttctagagatcgagacttttactaaattcagtatgtcattttcttttctttagtacttgttggcatttggtacatgactggatatagaaaaccttgttaaaattttaaatggtggtgcatgtggttcgaatgactagaaattttacaaatagaaattttacaattgggagttgctatgccccgatgaatgattgatgcattgtgagtttgaatatctttagccaggggattttacagtttgagt

SEQ ID NO: 211 - DNA, 9716 bp, Glycine max
  source 1..9716: mol_type = genomic DNA
gttacttggttttgttcattgcataataagtccgacaaactacttggaagaaatggttaaaatgtcagttttaatttgcaatacatttactttatccttagtatttgacatcaatattttaatcgtacaatatacatgcatgcttctcttaacgagtgctttgaatggattcaataataatcactgaagtaaatccaaggcaaatgctaaatggattccaattaaaataagtaatttaaacaatgttttatctctttaaaatgacattttattacttcgtaaattaattttgggataaatttgaatttgttattgaatttagtgtaataagcaaagagaaaccactgagtgcaactattatgtcatgtattagatgtcaaccataatcctagaaagttttaaggataattgagaaatgataattgtttatttcataactaatttcatttgttatagttgttattatttacactgattaagttgtgttttattatatgatgcaaaatttgactaatctaagaccattgtaactagagagaataaagacaattcacattcaatggataaaatatttactaagagttataataaaacactaaatgtttaaggaattttagaattgttagagttatgtttagcttaggttataaatgatatttatgtatcgagattattgtttcatgtagtttcagtgtttttttatttaatagtatttatttaacaataatttgaatataatatatattgtttggattgtttctgacctacattggttttgcttttaatttacatgtttgggttcatttatcaacaaaatataaaaaaagtgcaaaaccaatatcaattaagtcaaaactgatgttggtatgataacaaaacaacatcagttttaccaaaattgacattataatgcactgtacaacatcggttttgaccaaaattaatgttgtaattactattcaacattggtttggggaaaactcatgttgtatagtgcattacaacatcaattttggtataacatatactatttttatattatttttttatattttatctatctattgccataacacatcgattttgggaaaaattaatgttgtataatggatttaaacattaatttttataactaatgttaaaaatgacttattttaacaatgattgtttcaatacggatgttaaatattctttaaaatggatgttaatgacctattttctaataatgacgtttctatattcaagttttgaaaattatttaataggcaaaccaatcaagtttctcactccttagcaacaacttctaaattttatgtttgtcaacaattgtttttccatagttctcttgtattaactctcttgtttatattgatataatatgtctttatccttgaaaaaaaaaacagacttaagttttttttgccgaaaatgtaattctgagattgaaagcaaaaaatataaacattaatgagagactaattagagggggagagagtaatgaaacagaggcaactctttttcttgtttcctatcaacaacattctccttcgtctcgaagtttatccgtacgtgccattttaccatttcttgtttatttatttttcttttcctttctctgtactcaataaatcacatttcaagtccaccttggtcagtcttcctcctctaacgttccttcctttgctgttacaacactcactcactcgctctccgcgcttttctggaggcgcgtgagtctcaaccgccacattttcttcgcgcgatcttcctacgatcagtggtgattcctctttttctctccgattttcacacttttctttatgagccgatacgatgccgttttgtcttcgttatgagttctttgctacctgcgttggttctgttgggaaagttcgttttgcatgttgctcatccatgtaaagatgatgaatatattaaaactataaaataaaaaattaataaagaaagaataaaataggttcgtatctaacgaagattttcggcttgttttcacgtttaactgcattttctatttttggttgaatgttatgaagaagagtgaaaagaaagaaagacaaggctcacagcaatagttgggtcttccaaaaggattaaactgttttttggggtttgaataaactcataatattttacggtgaatcttccctgaacgctatgagttttcatatagaatcctggctgtgtgttggtgtttttttttttttttttaagattggatttatgtttttttttaccctatcttcttcaagcttccaaaagaatttaaaatggatgggtttttaaggagggattctgttgctgtcgtttatctctgtttgtaatattagaataacacaataacaaaaccttctgccttctactactacctctgttacctaaactgttgatgtttaaagtcagtacacacagcttaaggaatagttaatactacctataataaattattactatttagtctaaaattctctcatttaatatcttttataggagtaattgtttgtttgaaaataacaattattaaataggggtatatgtagaaaaaaatagttaatgagacttgaaatttgtaaaacatcaatagttttggacttgaggaagtatcatctaagctgcgtttcaatctcaatgtgcgcacttaatattcaaagcaaaataaaaagtgtagcctgagtgcatttgcaaatgtgtcttttcttgggtcctgctatgagagaagcatgctgctaaatgttaatttcaatatctgtaaaagctttactgtgttatgattttatcgaatcacctttaccctccctttttgtaatgatgtgaaatgtttataagatggcaatcttcatttatctggagttttggctgttgtgtgtcttgtaccataactataagtgcttccccttgcatttggttcatgtaaaaccattatcctttcatgcacgttgtgttggtgttttgtggtattacattgagattcctcccttcatttgttttgtgcctgcatttgattcatgtaaaaggatcatctgttcatgtgcatgtccattgtggtgatctttttacagtattacattgtgattcttctttgtagtaatacaatgagattactcccttcaagtgcattgcccctgcatttggttcatagtagtcaatactgcaactttgcaccagtataatgatgatgtgttccagcacagccccctgccatgtctgtgtggcatgtagtggagcagttaagtgttgtgcttattgtgaggtgaatcgtgtctgcctgtgtagaatcatggcaatcctatatgttattttttccatgcataaaaccccatttgtttgacccctcaaacaatgtcatctggggctgcttctgtgtggcttgcagtggagcattacagtgtcatggattcatggttattgcatcacggattgtggccaccctacttgttattctttccttgtgcaaaaccctgtttgtttggccactcaaaaatgtcatttgatgctgtttctgtgtggcctgtattggagtagttcagtgttgctgtaattgcagtgcaacttgtggctgcttttgcatagacctgtggccatcctagctgttgttctctccatatacaaatccctgtttgttttgcccctcaaaatgtcatttggtgctgtttctgtgtggcctgtagtggagcagttcagtgttgtggttattgtggcacgaattgtggtctctttcgcatggaattgtggcatttccggctgttattctttccatatacaaaaacctatttgtttggctcctccaacgacgtcgtttggtgtcataaggctacaattccatgtgaaacggccacaatctgcctcaggaaaaaacccgtttgtttggcccctctaacgatgtcgtttagtgtcataaggtgggcagtcttgggattttttgcccttaaaagaaaaccctacttctctttgctatttgatgcaaatcatctgaccctgagctctcagctgcgcttctggccaatctgtggcactccagttgagtttccggccaaccctcaatctgaaattttggcaaactgttctgtggtctctattctgatcacatcctttggggcctgtactcttgacatcaaagaggggcccatgttctgttatgtgtgtgtatcaatgttgtaaagatcccgagtaaaatcgtgatcttgcatgatttcatgatcttgtaccctgcttccaagctgaattgcgggtaaaatcgtgaacttgcatgatttcacaattttgctccctgcctctgagttggattgtgagcaaaattgtgaaacggtgggatcggtttatgatcatagtcacagattggattgaaatcgtaatatcggttgatttttcttatcttctgagctggattttctgagacaggttgaatgcctcaaatttattttaacccactctattggtgccctaaattgatactttctgtttctcccccattttcagacctagacaagcactacccagcttttctctctcttttctattctctctatctcttggcttatcccttttgtctcctcagtcttgactcgaccctctctctgctatgattgtttgctgctgtgtgcctgtgtgcgttatacttgaccctctctctctggtctgctgtgatcgtgactgagtgctctgttttgcactcctgttctcactgaacagtgacacctgtgacactaaactttattttttatgcagccatgacctttctcagtattatttctttttcttttcttttccctaaaactcatgggttgggtgattttagcctttattcaagatatcttctctactgtgtcttttattatattctttggttttatgttatattcacttcttttattttttccacaaattattataaaatacagaacagaatgaaatattaattatacttatacagtatttataacttataaaataataggtatataaatatttaattttttaaatggattttactgatattattatatgtattatctaattatatttatcaaatttttgcattaaagtatatttttatatttttggtagattgttatgatccttgttaggatcccatgttcatgattttgcaaccctctgcccgatcttaagtaggatatatcgatcttgacaacattggtgtctatgtattgttgtctctttctttcactgttgtgcttagataggtaaccttatgttgctctttgttgctttactttattttttcttttgtattacttgactcttactattaacttctgtatttggcctaaaattatgacttaattattaattatgaatatgtctctaattatggctattttatttatttatttgagcatatatatatatatatatgtatatgcatatatatgtatatgtagcaaaaattctataaatttcatagtaatgatcaactggtcatcctggtatccacaatcctgctgtagcagttttggggttggccattctggctgctattctccatcctttcatgtgcattgtatcggtctcgtttcatgcacattgtgttggtctttttgtagttttacattgggatccctaccctccatgtgcattgcccctgcatttgattcatgtacaaccttttgcacacgttgcattggtcttttcgtattattacattgagatttctcccttcatgtgcactggcccctgcatttttcatgtacaagcagtatcctttcacacatattgcattggttcttttgtattattacattgagacttctcccttcagttatattctatttattgtatgcctcctttccatgttgacttcatagtgaagtgttgatttctttatttgagattctgagaacgtaatatttcagtgaatgaatttcttacaatgctttgacttgattgtgtctttagctgtatgtagattaagatttctctttcttaggtttattagtttattgtagttgacaaatgaactgattttctgttttcaagttccttcagttttattattctctatgcactttacctcccatctattatgcgtaacacaaaaatattgatgcagaacagagcatataaaaatgagtttgaaaagaggaggtgggagacctgtaactgtggctaacaatgatatgtccaaagggaaaagcatatctgaacctcagccaaaagttgagcagttgactcagggtattgctgatactaagctaaactcagaacaagatgatggtgagtgggaggtatatgcaaggaaatccaagaacaaggctggaagcagtgctgcaaaaccatggggccccccggtccataattctaatcctagggcatgggggaatgctgaaatggttcaaaagccaggcatccggagtcatggtggagttggaagatcttctggaaatccctggcagacaccaaatgctaactttaggagaccagctggcagaggaaatggaaggcctcaattaggaacaagtggatatgaaagcaactatgtgactccaaatcctgtaattcggcctccactcgagcatggctggaactggcaatccagacctggtgcaatgcagtccaatgtaagggatgaaatttcaccagaggaccttcaaaagaattatggtgttgatgatgatggggaggaggaggaatctgatgatttggaagatactgatgatgatctgatgagtgatgacgatgattctgatgctagtcaaaagagtcatgagacacgtaagaaaagcaaatggtataagaagttctttgagattttggatggcttgactgttgaacagataaacgaaccagaaagacagtggcattgtccagcttgccaaggtggtcctggagctattgattggtacagaggactgcagcccttggtgacacatgccaaaacaaagggatcaaaaagggtgaagattcacagggagcttgctatacttttggatgaggaattacgcagaaggggtacttcagtaattccagctggggaagtatttggaaagtggaaaggtttgaaagaagaagaaaaggaccatgagatagtttggcctccaatggttgtcattcagaatacaaagcttgaacaggatgaaaatgataaggtatagctatattttattggtgtcatatttgatattttgtttgcttgtatttatggagcataacattcacaattttttaataacattactggtttttatgtttactttggattttgttctttgtattcagtggataggtatgggtaaccaagaacttcttgattattttagcacatatgctgctgcaaaagcacggcactcttatggcccacagggtcatcgtgggatgagtgttttgatatttgaagcctcagctagtggctatctagaggcagagcgtctccacaagcattttgcagagcaaggaactgataaagatgcttggttcaatcgccctattttatatctacctggggggaatcgccagctctatggatacatggctacaaaagaagatctggactttttcaacaggcattcccaaggttccatttcctctttcttggttacttttattcatatttgcattatgcagattgtttgatgtctacccggtacaggttaatttatggagacaaagtataagttgaccttttttttggcctcctttcttctgaaactatgtaggtaaatctagactcaaatatgacataatgtcatatcaggagatggttgtacaccaaattcggcaaatgaatgaagacaaccaacagctgctctattttaaggacaaggctgtgaaaggtgcaaaacacacaaaagctcttgaagaatctattggtataatgtctgagaagctgcggaagacaatggaggaaaatcgcattgtgaggaggagaactaaaatgcaacatgaagagaccaaagaagaggtaatactaacatcaaacagactacatggctattaattttattgaaaagtggttaccttgttgtggaacgtactttattatttctgatgccactgagttgtggttagcatatgcttctggttgattgcttcgttgaaattttttagctgtaattacaagagtggataatctaaagttatctttaatcttcctgtatgaatgttttgcatataaaaatgtgattcatgtaccattgaacttcagtttgatgtgtcaaattagactagcactgaatatgagatacagttgcatattgttgatcttttacattttttagggttgcactggccaagactgcattaggctatttatctagatactataatgccttaaaagaaaggcacataatcttgttaagatttggatctagattgattatttttgttttgttgtggaggtctgatgcctaccattaaccctgttttccagaacaatttccatttatttataaattgaatgaataatttcatcctagttcttgctttcttggtttacttttttttactaacccagcattggtctgttttctcttcaaaaaaacaaaaattgttgttttgttaattttcccttctggttagcttttgtcttgaatgataaggtcataatattatcttttcatagttttgttttctcactaatgtttcctgtcaatcatgaaagatgtatatgcaagaacaattcttcaaagaccagatcaaaatcattcatgattcaagggatgcaaaggaagaagattttgagaagatgcaacaggaagagcgtgagaaggtgaagcagtcaagtagtactggtcatgtgaatgctgaggaatatagactcaagtatgtaattgtcattccttccattggactattgatatattcacatctgaagccaatttaatctaaataaattttgtgaaattattatgtaggtgattttaaattgaattgttgaaggacattttattcttaaaaactaatttcacgtagctgtaaaaagctaggttaattttttaaagagtaagaattatgtacatgtgctgaaaaattattgcctgttttgtgtgtgtacaataatggctgaggtttgaacttgtaactttgtgcaaactattcaaacccctggccgaccacagtaggtttaaaaaattattatctagttatttggatggtggtatttatatttttgaatggcttttgtgtgaatttgaattctctggatgaagggtggaagagtatctgaaatttgttgaggtccaagataaagaaatggagaactttgttgctgaaaaggagaaactgttgcatgctcatggcatgggttatgctgcaatgaagcggaggcattgggaggaagaagttcagtatgagcagaagtttgatgaggaactcgccaacctcatggaaaagtactccccgttggagaagttcaatggtatctaatggtagggtcttttgcacagactcatacaaacagataaacacagccaaataggtagagaaaatagagacatcagctttctagagatcgagacttttactaaattcagtatgtcattttcttttctttagtacttgttggcatttggtacatgactggatatagaaaaccttgttaaaattttaaatggtggtgcatgtggttcgaatgactagaaattttacaaatagaaattttacaattgggagttgctatgccccgatgaatgattgatgcattgtgagtttgaatatctttagccaggggattttacagtttgagt

SEQ ID NO: 212 - DNA, 5674 bp, Glycine max
  source 1..5674: mol_type = genomic DNA
ataattgtgcatttagtgattatttttgtctttacaactaagaagttttggatataatattcatcaatcaccacctccatattaactaaaaggcttgagaattttattaagcatagattaagagtaattagactaatcaggatcttctaaattgatctcaacatttttttaatgtattttttatattatttcattatgttacaagtgattcattttttctcatataatttattattcatttttatatcaattattttcacacaattttttttttcaaacatgcctatatataatcaacgcgacccatgcgtatgcacacattatcaactagttatatctaaatgaatttcaataatttctaaaaaatatgaattgttaaaaataactttatattaaaaattaaattattcactataaattcaaattttaatttatatattatatttatttatttattataatttctactatataaaaacaaatatttatcatacgcaaatacacaaactgtgagtagtgcccatttttggagccactcttaaccgaatatggtggaagcaggagtagatttggagaaagacaagagtttatgtttaattaatttttaaatagaaaatataaaaaataaattgaaaatgtcataaaaatactaagttatttaaatataatagaatttttttacacgtaaaataaaaagataaaactgatcaaacatataaagtacaaatcaagtaaatattatttagatgtttctattaaacattttaataataaaattaaatttattaaattttcaaaatattatattacaataaacaattatataaactatttaaacaatgctattagatttttaaaaatatttatgttgtttattataattttgttattttattttttaatttaattgtttctaaagatattgtttaaaagatttaaaatatgatatacgtaataatttatatatttaatgaaaatgaataataataatatttttatgttattaaagtttatttaatgtaaaataaattttgtattaaatttttagatttctttttcagctaaaaaagaatttattctaatttaacaaattaggaagttaaataaatataattatcaatgatttatttaaaaaaaacatgatcttttcctaataaataaaaatcttaaaagcgttactatcttttaaagaatataaaaggtttagttccagtaacacactttttcaaatatattatctctaattaattagttaaaatttgaaaaccctaaaatttgaaaaaagggcatcaaacatgacacgaaactcaccaatttttaattaaccaataatatatttaaagaagtgtatcaggagtatattaataatatttctcataaaactttactatctttaaagaataacactctcatttagttttcataataaaaataaacactcatttaaaattaaaacagtaaaacacactcccttaagagtaattgttagagagtctctcacgggtaccgtgtgggactttttattgtgtgattatgatacacatacacattacacgctagactctggaccatcatctgctatcgggtatggctgctgctactgcattctctctccaattccatggatttttgtttttttaaattcttattgcttctttcacatgcaaaactcttaatagtacaattgccttatgaatgcgttattgctatgctgttataaaccaatgctttgttctgttgctccttctgctgttttcttttgttggcaggggtaagtagattcttttcatgaattctcaatgcatgtacccgatatttgctctttctcagataactctgttcctcgattgctcctttgttggggctgaaaaaagaggaacacaacgattgtttgtgtagttaatcaaccaaatgagaaaaaagaggaacacaacgattgagaattaagggataggtaatcaatcaaacttgttcttgactctgtgctatttccatcacagttgctggaaaggttttcactttatcattgaattgatccaatgctctggctctcggtttatgaattaattaaactgttttcattgacatgaattggaacttttggactgtttcttatgacaattttcaaactttatatataaattagcttgggtaaggattgttgtttatgaaaccaattcctttggaacttctgatgctagatgtatttttttaattaagccatccatttgcttgtttattgtttccctgattcccagaggcttcaatattttgaccactggaagctgttttgttgcctttgtatgaggtgtcattgataattatgcttcgaagtgacagtatcaactccctgagataggtggtgaaaattgaattatggctgatgatggtgctgatccatttccgaagttgacaagtgtgtatagagtgtctggttccaaaaacaataagctgagctggaatgtagccaattctcagcaaagtgttgactccagtgtaaacaactcaaggcagttacagagcatttctgatggcagtgcttcaagatcctggttttctcaaaattctagaccaaatgcatgggaagttccaagtgtgattcagaagctgaggctggggaagcggggtaatgacggattgactaacaacagtaacctacaggacaaaagtaattctccagatgctctggctttgacgggaagtggaattttgaatgacagcaagttgcctcctgagtcagcaatatctccaacatcagagacatgtttaaattcatctgttgatgttgttgatacaactacatccaaggatttaaaaaatgttgaatgcaaggatgagagaatcccagaaccccattgtgaagacaatggatctgatattgtttttgatagtgatgacgattgttttttagacaacattgacttggataccggggagagaagccatgaacagtgcaaaaagagcaagtggctcaggaatttctttgataaattaaatgcactcaccaatgaggagataagttcattagacaggcagtggcattgcccagcatgccaagggggttctggtgctattgattggtacaaagggttgcagccccttttggatcattccagaacaatacaaacaacgagggcaagactgcaccggatgtttgctgaaactttggaggaagagtgtttcaggagaagagctccattaacaacggttggcgaagtccacaatatatgggagggtcttgataagaaagtcaaggatcatgaaatagtttggcccccaatggttattatcatgaatacaagatatgagcaggacgaaagtaataaggtacaataatattgtcttattttctagtttggatatgatgtgttaaatcaaatatgcagctacttgctgatgttctctctgtgtgtgtgggtgtgtgtatgtgttaaatcaagtatgaagctacttgctgaatttcttttatgttatatgcatgtgtagtttcacctcattgaattcaattgtagtggaatggaatggggaaccaagaactcgtcgattgcttcagtgactatgctgcattgaaggctcgacactcgtatggtccacaagggcaccgagggatgagtgctttaatttttgaggaaaccacggcaggttatctagaagctgtgcggctgcacaagcattttaaagagcaaggaagagatagggaagcttgggattgctgtcaaaatccatttctcccaggtgggaagcgccaactttatggttacttggcttctaaagaagatttggatattttcaacaaacactccggaggtaattttttcctctctcttaatcagttttgtatttattgtatgtcagccctgtacagttgttacttgattgaaataattgatgatgaacttgaatatggcaactctacatttcttaagagtttggtaatctagtaattcttagttggcatattttttttttctgtctctaagagagggaactaagtgttatttttgtgtttcttctcttttttggcaatcgtttaatattttaaatgaatgctgctgatacatctacattctttaggaaagacaaaactgaagtttgaaatgagatcatatcaagagatggttgagagaaagataaaacatattaatgatgatagtcggaagcttgactattataagagcatggtagccaaagaacaaatcaaatcacaagtcggtgcagactctttatgtaaatcaagtgagaagttaagcatgacaactgaaaaaaaccgtgttgaccaacaggacaaggaggtaaggttatgaggatgaaattaaattaatgttattcttgttgggctcattgggtttcgcaagaagaagctctgattgttatcatataattgagagcctttatgcataaaattggttataatgctttatgttttgagggtaatcatatatgctggtgaatggtggctgtctttatgaaaatatgatatttacgagaaaccaaaccgataagataaggctatttttcttattcttacaacttcatttatttgttcctgtttttctcacttccatttttttggtgtctgctcaagcctttattgctgtacaacttttttagtgtgatcttttctggggaggaattttataaatttgtctttcttgattctggttgtagctttctgaatgatgatcattttgaaatactgttttctagatggatgcactagaaaaaaatttccagagccaaatccaagacattcaacaagccatagctgcaaaggaggataagtttgtgaaattacagctgcaggcaatgcaagaaaaagtgaaagagtcctgcaaagaatcttctgagaaagaggacaagtacacctaatatttcctaattgtgcattattccaatttccaaggatgtttcatattatcattcttttactacatatatatcttagctttcttttgccattttggtaaaatactcaactaagtgattagcaagcaatattctaatctatcttctttctgaagcaaaattctcttttgcgttcggcattttctaatatatcatcttctatcaacagggtggaaaatatctctagtttcctgaagcctcaagacaaggagatgaagcaattcgaggcagagagagagaaaattaaaaaaattcatgaagagaaaaagttggctctgaagaagaagcagtggcaagagcaggttgaacttgagaaggagttagagaatgaactgacgcagctcatggacaagtacaattgcaaccaatctcaagaaaaaaactgttagaaatgaatgacagctaggtaacattattaaggaaaacatacacagaaatggtaaaagccaaaagcattcataggcatacatatcaggcagagtacatgattatgtgttctttctgccacattttattttccataaattaatacttttttcttttggtttacccttgcattttttattttgaaagttgaaaagtgagagttaacaagccccaccggcaccgaaattctggtcccattttcattgatacttgatatagttttgctcattatatctgtagcgtgctttgcttgcaaatggtttcgaatataagtaattttctgttgattgaagttactgttgggaattttggatgcatagtttgaaatagaattagtctgaga

SEQ ID NO: 213 - DNA, 5657 bp, Glycine max
  source 1..5657: mol_type = genomic DNA
gattatttttgtctttacaactaagaagttttggatataatattcatcaatcaccacctccatattaactaaaaggcttgagaattttattaagcatagattaagagtaattagactaatcaggatcttctaaattgatctcaacatttttttaatgtattttttatattatttcattatgttacaagtgattcattttttctcatataatttattattcatttttatatcaattattttcacacaattttttttttcaaacatgcctatatataatcaacgcgacccatgcgtatgcacacattatcaactagttatatctaaatgaatttcaataatttctaaaaaatatgaattgttaaaaataactttatattaaaaattaaattattcactataaattcaaattttaatttatatattatatttatttatttattataatttctactatataaaaacaaatatttatcatacgcaaatacacaaactgtgagtagtgcccatttttggagccactcttaaccgaatatggtggaagcaggagtagatttggagaaagacaagagtttatgtttaattaatttttaaatagaaaatataaaaaataaattgaaaatgtcataaaaatactaagttatttaaatataatagaatttttttacacgtaaaataaaaagataaaactgatcaaacatataaagtacaaatcaagtaaatattatttagatgtttctattaaacattttaataataaaattaaatttattaaattttcaaaatattatattacaataaacaattatataaactatttaaacaatgctattagatttttaaaaatatttatgttgtttattataattttgttattttattttttaatttaattgtttctaaagatattgtttaaaagatttaaaatatgatatacgtaataatttatatatttaatgaaaatgaataataataatatttttatgttattaaagtttatttaatgtaaaataaattttgtattaaatttttagatttctttttcagctaaaaaagaatttattctaatttaacaaattaggaagttaaataaatataattatcaatgatttatttaaaaaaaacatgatcttttcctaataaataaaaatcttaaaagcgttactatcttttaaagaatataaaaggtttagttccagtaacacactttttcaaatatattatctctaattaattagttaaaatttgaaaaccctaaaatttgaaaaaagggcatcaaacatgacacgaaactcaccaatttttaattaaccaataatatatttaaagaagtgtatcaggagtatattaataatatttctcataaaactttactatctttaaagaataacactctcatttagttttcataataaaaataaacactcatttaaaattaaaacagtaaaacacactcccttaagagtaattgttagagagtctctcacgggtaccgtgtgggactttttattgtgtgattatgatacacatacacattacacgctagactctggaccatcatctgctatcgggtatggctgctgctactgcattctctctccaattccatggatttttgtttttttaaattcttattgcttctttcacatgcaaaactcttaatagtacaattgccttatgaatgcgttattgctatgctgttataaaccaatgctttgttctgttgctccttctgctgttttcttttgttggcaggggtaagtagattcttttcatgaattctcaatgcatgtacccgatatttgctctttctcagataactctgttcctcgattgctcctttgttggggctgaaaaaagaggaacacaacgattgtttgtgtagttaatcaaccaaatgagaaaaaagaggaacacaacgattgagaattaagggataggtaatcaatcaaacttgttcttgactctgtgctatttccatcacagttgctggaaaggttttcactttatcattgaattgatccaatgctctggctctcggtttatgaattaattaaactgttttcattgacatgaattggaacttttggactgtttcttatgacaattttcaaactttatatataaattagcttgggtaaggattgttgtttatgaaaccaattcctttggaacttctgatgctagatgtatttttttaattaagccatccatttgcttgtttattgtttccctgattcccagaggcttcaatattttgaccactggaagctgttttgttgcctttgtatgaggtgtcattgataattatgcttcgaagtgacagtatcaactccctgagataggtggtgaaaattgaattatggctgatgatggtgctgatccatttccgaagttgacaagtgtgtatagagtgtctggttccaaaaacaataagctgagctggaatgtagccaattctcagcaaagtgttgactccagtgtaaacaactcaaggcagttacagagcatttctgatggcagtgcttcaagatcctggttttctcaaaattctagaccaaatgcatgggaagttccaagtgtgattcagaagctgaggctggggaagcggggtaatgacggattgactaacaacagtaacctacaggacaaaagtaattctccagatgctctggctttgacgggaagtggaattttgaatgacagcaagttgcctcctgagtcagcaatatctccaacatcagagacatgtttaaattcatctgttgatgttgttgatacaactacatccaaggatttaaaaaatgttgaatgcaaggatgagagaatcccagaaccccattgtgaagacaatggatctgatattgtttttgatagtgatgacgattgttttttagacaacattgacttggataccggggagagaagccatgaacagtgcaaaaagagcaagtggctcaggaatttctttgataaattaaatgcactcaccaatgaggagataagttcattagacaggcagtggcattgcccagcatgccaagggggttctggtgctattgattggtacaaagggttgcagccccttttggatcattccagaacaatacaaacaacgagggcaagactgcaccggatgtttgctgaaactttggaggaagagtgtttcaggagaagagctccattaacaacggttggcgaagtccacaatatatgggagggtcttgataagaaagtcaaggatcatgaaatagtttggcccccaatggttattatcatgaatacaagatatgagcaggacgaaagtaataaggtacaataatattgtcttattttctagtttggatatgatgtgttaaatcaaatatgcagctacttgctgatgttctctctgtgtgtgtgggtgtgtgtatgtgttaaatcaagtatgaagctacttgctgaatttcttttatgttatatgcatgtgtagtttcacctcattgaattcaattgtagtggaatggaatggggaaccaagaactcgtcgattgcttcagtgactatgctgcattgaaggctcgacactcgtatggtccacaagggcaccgagggatgagtgctttaatttttgaggaaaccacggcaggttatctagaagctgtgcggctgcacaagcattttaaagagcaaggaagagatagggaagcttgggattgctgtcaaaatccatttctcccaggtgggaagcgccaactttatggttacttggcttctaaagaagatttggatattttcaacaaacactccggaggtaattttttcctctctcttaatcagttttgtatttattgtatgtcagccctgtacagttgttacttgattgaaataattgatgatgaacttgaatatggcaactctacatttcttaagagtttggtaatctagtaattcttagttggcatattttttttttctgtctctaagagagggaactaagtgttatttttgtgtttcttctcttttttggcaatcgtttaatattttaaatgaatgctgctgatacatctacattctttaggaaagacaaaactgaagtttgaaatgagatcatatcaagagatggttgagagaaagataaaacatattaatgatgatagtcggaagcttgactattataagagcatggtagccaaagaacaaatcaaatcacaagtcggtgcagactctttatgtaaatcaagtgagaagttaagcatgacaactgaaaaaaaccgtgttgaccaacaggacaaggaggtaaggttatgaggatgaaattaaattaatgttattcttgttgggctcattgggtttcgcaagaagaagctctgattgttatcatataattgagagcctttatgcataaaattggttataatgctttatgttttgagggtaatcatatatgctggtgaatggtggctgtctttatgaaaatatgatatttacgagaaaccaaaccgataagataaggctatttttcttattcttacaacttcatttatttgttcctgtttttctcacttccatttttttggtgtctgctcaagcctttattgctgtacaacttttttagtgtgatcttttctggggaggaattttataaatttgtctttcttgattctggttgtagctttctgaatgatgatcattttgaaatactgttttctagatggatgcactagaaaaaaatttccagagccaaatccaagacattcaacaagccatagctgcaaaggaggataagtttgtgaaattacagctgcaggcaatgcaagaaaaagtgaaagagtcctgcaaagaatcttctgagaaagaggacaagtacacctaatatttcctaattgtgcattattccaatttccaaggatgtttcatattatcattcttttactacatatatatcttagctttcttttgccattttggtaaaatactcaactaagtgattagcaagcaatattctaatctatcttctttctgaagcaaaattctcttttgcgttcggcattttctaatatatcatcttctatcaacagggtggaaaatatctctagtttcctgaagcctcaagacaaggagatgaagcaattcgaggcagagagagagaaaattaaaaaaattcatgaagagaaaaagttggctctgaagaagaagcagtggcaagagcaggttgaacttgagaaggagttagagaatgaactgacgcagctcatggacaagtacaattgcaaccaatctcaagaaaaaaactgttagaaatgaatgacagctaggtaacattattaaggaaaacatacacagaaatggtaaaagccaaaagcattcataggcatacatatcaggcagagtacatgattatgtgttctttctgccacattttattttccataaattaatacttttttcttttggtttacccttgcattttttattttgaaagttgaaaagtgagagttaacaagccccaccggcaccgaaattctggtcccattttcattgatacttgatatagttttgctcattatatctgtagcgtgctttgcttgcaaatggtttcgaatataagtaattttctgttgattgaagttactgttgggaattttggatgcatagtttgaaatagaattagtctgaga

SEQ ID NO: 214 - DNA, 5638 bp, Glycine max
  source 1..5638: mol_type = genomic DNA
actaagaagttttggatataatattcatcaatcaccacctccatattaactaaaaggcttgagaattttattaagcatagattaagagtaattagactaatcaggatcttctaaattgatctcaacatttttttaatgtattttttatattatttcattatgttacaagtgattcattttttctcatataatttattattcatttttatatcaattattttcacacaattttttttttcaaacatgcctatatataatcaacgcgacccatgcgtatgcacacattatcaactagttatatctaaatgaatttcaataatttctaaaaaatatgaattgttaaaaataactttatattaaaaattaaattattcactataaattcaaattttaatttatatattatatttatttatttattataatttctactatataaaaacaaatatttatcatacgcaaatacacaaactgtgagtagtgcccatttttggagccactcttaaccgaatatggtggaagcaggagtagatttggagaaagacaagagtttatgtttaattaatttttaaatagaaaatataaaaaataaattgaaaatgtcataaaaatactaagttatttaaatataatagaatttttttacacgtaaaataaaaagataaaactgatcaaacatataaagtacaaatcaagtaaatattatttagatgtttctattaaacattttaataataaaattaaatttattaaattttcaaaatattatattacaataaacaattatataaactatttaaacaatgctattagatttttaaaaatatttatgttgtttattataattttgttattttattttttaatttaattgtttctaaagatattgtttaaaagatttaaaatatgatatacgtaataatttatatatttaatgaaaatgaataataataatatttttatgttattaaagtttatttaatgtaaaataaattttgtattaaatttttagatttctttttcagctaaaaaagaatttattctaatttaacaaattaggaagttaaataaatataattatcaatgatttatttaaaaaaaacatgatcttttcctaataaataaaaatcttaaaagcgttactatcttttaaagaatataaaaggtttagttccagtaacacactttttcaaatatattatctctaattaattagttaaaatttgaaaaccctaaaatttgaaaaaagggcatcaaacatgacacgaaactcaccaatttttaattaaccaataatatatttaaagaagtgtatcaggagtatattaataatatttctcataaaactttactatctttaaagaataacactctcatttagttttcataataaaaataaacactcatttaaaattaaaacagtaaaacacactcccttaagagtaattgttagagagtctctcacgggtaccgtgtgggactttttattgtgtgattatgatacacatacacattacacgctagactctggaccatcatctgctatcgggtatggctgctgctactgcattctctctccaattccatggatttttgtttttttaaattcttattgcttctttcacatgcaaaactcttaatagtacaattgccttatgaatgcgttattgctatgctgttataaaccaatgctttgttctgttgctccttctgctgttttcttttgttggcaggggtaagtagattcttttcatgaattctcaatgcatgtacccgatatttgctctttctcagataactctgttcctcgattgctcctttgttggggctgaaaaaagaggaacacaacgattgtttgtgtagttaatcaaccaaatgagaaaaaagaggaacacaacgattgagaattaagggataggtaatcaatcaaacttgttcttgactctgtgctatttccatcacagttgctggaaaggttttcactttatcattgaattgatccaatgctctggctctcggtttatgaattaattaaactgttttcattgacatgaattggaacttttggactgtttcttatgacaattttcaaactttatatataaattagcttgggtaaggattgttgtttatgaaaccaattcctttggaacttctgatgctagatgtatttttttaattaagccatccatttgcttgtttattgtttccctgattcccagaggcttcaatattttgaccactggaagctgttttgttgcctttgtatgaggtgtcattgataattatgcttcgaagtgacagtatcaactccctgagataggtggtgaaaattgaattatggctgatgatggtgctgatccatttccgaagttgacaagtgtgtatagagtgtctggttccaaaaacaataagctgagctggaatgtagccaattctcagcaaagtgttgactccagtgtaaacaactcaaggcagttacagagcatttctgatggcagtgcttcaagatcctggttttctcaaaattctagaccaaatgcatgggaagttccaagtgtgattcagaagctgaggctggggaagcggggtaatgacggattgactaacaacagtaacctacaggacaaaagtaattctccagatgctctggctttgacgggaagtggaattttgaatgacagcaagttgcctcctgagtcagcaatatctccaacatcagagacatgtttaaattcatctgttgatgttgttgatacaactacatccaaggatttaaaaaatgttgaatgcaaggatgagagaatcccagaaccccattgtgaagacaatggatctgatattgtttttgatagtgatgacgattgttttttagacaacattgacttggataccggggagagaagccatgaacagtgcaaaaagagcaagtggctcaggaatttctttgataaattaaatgcactcaccaatgaggagataagttcattagacaggcagtggcattgcccagcatgccaagggggttctggtgctattgattggtacaaagggttgcagccccttttggatcattccagaacaatacaaacaacgagggcaagactgcaccggatgtttgctgaaactttggaggaagagtgtttcaggagaagagctccattaacaacggttggcgaagtccacaatatatgggagggtcttgataagaaagtcaaggatcatgaaatagtttggcccccaatggttattatcatgaatacaagatatgagcaggacgaaagtaataaggtacaataatattgtcttattttctagtttggatatgatgtgttaaatcaaatatgcagctacttgctgatgttctctctgtgtgtgtgggtgtgtgtatgtgttaaatcaagtatgaagctacttgctgaatttcttttatgttatatgcatgtgtagtttcacctcattgaattcaattgtagtggaatggaatggggaaccaagaactcgtcgattgcttcagtgactatgctgcattgaaggctcgacactcgtatggtccacaagggcaccgagggatgagtgctttaatttttgaggaaaccacggcaggttatctagaagctgtgcggctgcacaagcattttaaagagcaaggaagagatagggaagcttgggattgctgtcaaaatccatttctcccaggtgggaagcgccaactttatggttacttggcttctaaagaagatttggatattttcaacaaacactccggaggtaattttttcctctctcttaatcagttttgtatttattgtatgtcagccctgtacagttgttacttgattgaaataattgatgatgaacttgaatatggcaactctacatttcttaagagtttggtaatctagtaattcttagttggcatattttttttttctgtctctaagagagggaactaagtgttatttttgtgtttcttctcttttttggcaatcgtttaatattttaaatgaatgctgctgatacatctacattctttaggaaagacaaaactgaagtttgaaatgagatcatatcaagagatggttgagagaaagataaaacatattaatgatgatagtcggaagcttgactattataagagcatggtagccaaagaacaaatcaaatcacaagtcggtgcagactctttatgtaaatcaagtgagaagttaagcatgacaactgaaaaaaaccgtgttgaccaacaggacaaggaggtaaggttatgaggatgaaattaaattaatgttattcttgttgggctcattgggtttcgcaagaagaagctctgattgttatcatataattgagagcctttatgcataaaattggttataatgctttatgttttgagggtaatcatatatgctggtgaatggtggctgtctttatgaaaatatgatatttacgagaaaccaaaccgataagataaggctatttttcttattcttacaacttcatttatttgttcctgtttttctcacttccatttttttggtgtctgctcaagcctttattgctgtacaacttttttagtgtgatcttttctggggaggaattttataaatttgtctttcttgattctggttgtagctttctgaatgatgatcattttgaaatactgttttctagatggatgcactagaaaaaaatttccagagccaaatccaagacattcaacaagccatagctgcaaaggaggataagtttgtgaaattacagctgcaggcaatgcaagaaaaagtgaaagagtcctgcaaagaatcttctgagaaagaggacaagtacacctaatatttcctaattgtgcattattccaatttccaaggatgtttcatattatcattcttttactacatatatatcttagctttcttttgccattttggtaaaatactcaactaagtgattagcaagcaatattctaatctatcttctttctgaagcaaaattctcttttgcgttcggcattttctaatatatcatcttctatcaacagggtggaaaatatctctagtttcctgaagcctcaagacaaggagatgaagcaattcgaggcagagagagagaaaattaaaaaaattcatgaagagaaaaagttggctctgaagaagaagcagtggcaagagcaggttgaacttgagaaggagttagagaatgaactgacgcagctcatggacaagtacaattgcaaccaatctcaagaaaaaaactgttagaaatgaatgacagctaggtaacattattaaggaaaacatacacagaaatggtaaaagccaaaagcattcataggcatacatatcaggcagagtacatgattatgtgttctttctgccacattttattttccataaattaatacttttttcttttggtttacccttgcattttttattttgaaagttgaaaagtgagagttaacaagccccaccggcaccgaaattctggtcccattttcattgatacttgatatagttttgctcattatatctgtagcgtgctttgcttgcaaatggtttcgaatataagtaattttctgttgattgaagttactgttgggaattttggatgcatagtttgaaatagaattagtctgaga

SEQ ID NO: 215 - DNA, 5575 bp, Glycine max
  source 1..5575: mol_type = genomic DNA
aattttattaagcatagattaagagtaattagactaatcaggatcttctaaattgatctcaacatttttttaatgtattttttatattatttcattatgttacaagtgattcattttttctcatataatttattattcatttttatatcaattattttcacacaattttttttttcaaacatgcctatatataatcaacgcgacccatgcgtatgcacacattatcaactagttatatctaaatgaatttcaataatttctaaaaaatatgaattgttaaaaataactttatattaaaaattaaattattcactataaattcaaattttaatttatatattatatttatttatttattataatttctactatataaaaacaaatatttatcatacgcaaatacacaaactgtgagtagtgcccatttttggagccactcttaaccgaatatggtggaagcaggagtagatttggagaaagacaagagtttatgtttaattaatttttaaatagaaaatataaaaaataaattgaaaatgtcataaaaatactaagttatttaaatataatagaatttttttacacgtaaaataaaaagataaaactgatcaaacatataaagtacaaatcaagtaaatattatttagatgtttctattaaacattttaataataaaattaaatttattaaattttcaaaatattatattacaataaacaattatataaactatttaaacaatgctattagatttttaaaaatatttatgttgtttattataattttgttattttattttttaatttaattgtttctaaagatattgtttaaaagatttaaaatatgatatacgtaataatttatatatttaatgaaaatgaataataataatatttttatgttattaaagtttatttaatgtaaaataaattttgtattaaatttttagatttctttttcagctaaaaaagaatttattctaatttaacaaattaggaagttaaataaatataattatcaatgatttatttaaaaaaaacatgatcttttcctaataaataaaaatcttaaaagcgttactatcttttaaagaatataaaaggtttagttccagtaacacactttttcaaatatattatctctaattaattagttaaaatttgaaaaccctaaaatttgaaaaaagggcatcaaacatgacacgaaactcaccaatttttaattaaccaataatatatttaaagaagtgtatcaggagtatattaataatatttctcataaaactttactatctttaaagaataacactctcatttagttttcataataaaaataaacactcatttaaaattaaaacagtaaaacacactcccttaagagtaattgttagagagtctctcacgggtaccgtgtgggactttttattgtgtgattatgatacacatacacattacacgctagactctggaccatcatctgctatcgggtatggctgctgctactgcattctctctccaattccatggatttttgtttttttaaattcttattgcttctttcacatgcaaaactcttaatagtacaattgccttatgaatgcgttattgctatgctgttataaaccaatgctttgttctgttgctccttctgctgttttcttttgttggcaggggtaagtagattcttttcatgaattctcaatgcatgtacccgatatttgctctttctcagataactctgttcctcgattgctcctttgttggggctgaaaaaagaggaacacaacgattgtttgtgtagttaatcaaccaaatgagaaaaaagaggaacacaacgattgagaattaagggataggtaatcaatcaaacttgttcttgactctgtgctatttccatcacagttgctggaaaggttttcactttatcattgaattgatccaatgctctggctctcggtttatgaattaattaaactgttttcattgacatgaattggaacttttggactgtttcttatgacaattttcaaactttatatataaattagcttgggtaaggattgttgtttatgaaaccaattcctttggaacttctgatgctagatgtatttttttaattaagccatccatttgcttgtttattgtttccctgattcccagaggcttcaatattttgaccactggaagctgttttgttgcctttgtatgaggtgtcattgataattatgcttcgaagtgacagtatcaactccctgagataggtggtgaaaattgaattatggctgatgatggtgctgatccatttccgaagttgacaagtgtgtatagagtgtctggttccaaaaacaataagctgagctggaatgtagccaattctcagcaaagtgttgactccagtgtaaacaactcaaggcagttacagagcatttctgatggcagtgcttcaagatcctggttttctcaaaattctagaccaaatgcatgggaagttccaagtgtgattcagaagctgaggctggggaagcggggtaatgacggattgactaacaacagtaacctacaggacaaaagtaattctccagatgctctggctttgacgggaagtggaattttgaatgacagcaagttgcctcctgagtcagcaatatctccaacatcagagacatgtttaaattcatctgttgatgttgttgatacaactacatccaaggatttaaaaaatgttgaatgcaaggatgagagaatcccagaaccccattgtgaagacaatggatctgatattgtttttgatagtgatgacgattgttttttagacaacattgacttggataccggggagagaagccatgaacagtgcaaaaagagcaagtggctcaggaatttctttgataaattaaatgcactcaccaatgaggagataagttcattagacaggcagtggcattgcccagcatgccaagggggttctggtgctattgattggtacaaagggttgcagccccttttggatcattccagaacaatacaaacaacgagggcaagactgcaccggatgtttgctgaaactttggaggaagagtgtttcaggagaagagctccattaacaacggttggcgaagtccacaatatatgggagggtcttgataagaaagtcaaggatcatgaaatagtttggcccccaatggttattatcatgaatacaagatatgagcaggacgaaagtaataaggtacaataatattgtcttattttctagtttggatatgatgtgttaaatcaaatatgcagctacttgctgatgttctctctgtgtgtgtgggtgtgtgtatgtgttaaatcaagtatgaagctacttgctgaatttcttttatgttatatgcatgtgtagtttcacctcattgaattcaattgtagtggaatggaatggggaaccaagaactcgtcgattgcttcagtgactatgctgcattgaaggctcgacactcgtatggtccacaagggcaccgagggatgagtgctttaatttttgaggaaaccacggcaggttatctagaagctgtgcggctgcacaagcattttaaagagcaaggaagagatagggaagcttgggattgctgtcaaaatccatttctcccaggtgggaagcgccaactttatggttacttggcttctaaagaagatttggatattttcaacaaacactccggaggtaattttttcctctctcttaatcagttttgtatttattgtatgtcagccctgtacagttgttacttgattgaaataattgatgatgaacttgaatatggcaactctacatttcttaagagtttggtaatctagtaattcttagttggcatattttttttttctgtctctaagagagggaactaagtgttatttttgtgtttcttctcttttttggcaatcgtttaatattttaaatgaatgctgctgatacatctacattctttaggaaagacaaaactgaagtttgaaatgagatcatatcaagagatggttgagagaaagataaaacatattaatgatgatagtcggaagcttgactattataagagcatggtagccaaagaacaaatcaaatcacaagtcggtgcagactctttatgtaaatcaagtgagaagttaagcatgacaactgaaaaaaaccgtgttgaccaacaggacaaggaggtaaggttatgaggatgaaattaaattaatgttattcttgttgggctcattgggtttcgcaagaagaagctctgattgttatcatataattgagagcctttatgcataaaattggttataatgctttatgttttgagggtaatcatatatgctggtgaatggtggctgtctttatgaaaatatgatatttacgagaaaccaaaccgataagataaggctatttttcttattcttacaacttcatttatttgttcctgtttttctcacttccatttttttggtgtctgctcaagcctttattgctgtacaacttttttagtgtgatcttttctggggaggaattttataaatttgtctttcttgattctggttgtagctttctgaatgatgatcattttgaaatactgttttctagatggatgcactagaaaaaaatttccagagccaaatccaagacattcaacaagccatagctgcaaaggaggataagtttgtgaaattacagctgcaggcaatgcaagaaaaagtgaaagagtcctgcaaagaatcttctgagaaagaggacaagtacacctaatatttcctaattgtgcattattccaatttccaaggatgtttcatattatcattcttttactacatatatatcttagctttcttttgccattttggtaaaatactcaactaagtgattagcaagcaatattctaatctatcttctttctgaagcaaaattctcttttgcgttcggcattttctaatatatcatcttctatcaacagggtggaaaatatctctagtttcctgaagcctcaagacaaggagatgaagcaattcgaggcagagagagagaaaattaaaaaaattcatgaagagaaaaagttggctctgaagaagaagcagtggcaagagcaggttgaacttgagaaggagttagagaatgaactgacgcagctcatggacaagtacaattgcaaccaatctcaagaaaaaaactgttagaaatgaatgacagctaggtaacattattaaggaaaacatacacagaaatggtaaaagccaaaagcattcataggcatacatatcaggcagagtacatgattatgtgttctttctgccacattttattttccataaattaatacttttttcttttggtttacccttgcattttttattttgaaagttgaaaagtgagagttaacaagccccaccggcaccgaaattctggtcccattttcattgatacttgatatagttttgctcattatatctgtagcgtgctttgcttgcaaatggtttcgaatataagtaattttctgttgattgaagttactgttgggaattttggatgcatagtttgaaatagaattagtctgaga

SEQ ID NO: 216 - DNA, 6708 bp, Glycine max
  source 1..6708: mol_type = genomic DNA
tgatttacatttggagcagaaagtggtatttcagacctcttgtggttcagcccattttagacttggtggagtactgataccattctatagcctcaggtccctatcctagttgcttgggttccacctcaatgcgagtttcttaatgaaagatattaggaaggtagattgaaggacctactgtagcattttcccatagtttaaggattcagttagagtgaaagtggtggctacaatcatgcaatagctccaacagtgaaaactatgcaataaccccaagaagtacaaggtgtaggacctatcataattagatgataaaaattatgtaaattctaggttatgtgggtttgtcagcgtgtaacattattcttatctgctaagatcttgatactttggaaacgtgcgatttgacaagaggctgttgctttgatttctccggctgttaaatggattccaggttggccttaaggatcccaaaatgaatagactaataacagcaataccattctgttgtccaactagggttggaacttgtaaaaacttaacctgcaaaatctttggcagcatcagcatgctacgttggaccagtaaggctttatgttgtttagcattaatattggattccaagacattctttgccggtaaacttcaaaaggatgcgaccgcctcttatattgcaagatcaattggtgggtattccgatttatgatgcagcggagacaaatgaatgttgtattgttggagtcagttgactgcattatgtaaccatttttttaaaatagtttatgtaaccattctattctttgaaggtttatgtaaccattcatggtagtgtttgcttccatttttttttaattgttaagatatgcacgaatcacgggcgaataaaatgtatatatgatcactgattaatggtatttgttgtgtcaaatgtaattgatttcctaaattttaataattttccaattgtatgagacattggttgatatttacattttagttatgttgtaaacaggtaataaatagttaacagataatataaataataataagaaacaaatagtgattatcttttttcattaagtataatatgtaacagataactattttttttcttttttacaatagcataatgaatcctagcgtgttcattattaatttacgttagttatctaaaaaacaataaaaatctcattaattttaaaaaaaatataaatttaagataaatttaataatactgttaattacattaattccataaaagaagactgaatgagtatataatgagaaagcgggtaaaggaagatagatagatttcgtagcagtaatagatgattcggtgttgtaaaatgattcacactagttgtaatggttgtgtcttaataaagttctttatgataaagattaattataatttctgacgaaaataacttggtactaatattaagattttttatatatataaaaaaaaaaaagatgattcggtggatcggacagcgttgaaatttaagacgcgtgtgaaaattgacaaaaaatgaaatttgataaaaatttcaagtccgaaaatacaacaaatgagagaaaatgccaagtcaacttaaagttcacttagctatcagccctttcgttttgcttcacacaacagccggcgatcgccttcggatctctgaggtaccaagttctttgttcctctccaacattctcttactctctcttcttagatttcagtcttgtacttctatttgtactaatttctatatagtatcgaatttaagcataaagggaaagattctcattcattatacatacacgtaatttctatacagagaccagacaggcataactacctgacccaaaactgtctaaccaactaacagagaaactagctaactaaatattaccaaaaataggctttgtgcaattaattagagaaaatagccttttcattaacagattaaagcatatttataccgttatttaattacaaatgattaaatttattgacttttattaaactcaattcattattgactatatttggatatatcattatcctgtaatattatacgtgatatcatgctttgggttttgcattttttggtccttaatatttctttatcttacgtgaaaaatatcacgacttttttttcttttttcttttgagaaacgttgagtttccacgttacgtgatgaggtcatttagagaatctctaaactctaaagggaactaaccatgataacttgaaagtaacaaacatatgtggtaatatatgataatactaggaaacttaattaagttgaagacgaatgaaaagtttgtttgagcatcatgtattttatattagtattgtttatatgctatattaaataatagaatgttaaattttgatgtggaaagctttttatgccaaccctcaatcatttgtttggtgattctttatgaatattatggattctctgtttttgtgtttgacaaacaaaaattgtgatccagaaaaggaattcaaaaagagggtgtgagagacctttcactatggcagacattggtgattcttcttccaaagggaaaaatgtattggaatctcttccaaaaattgagcaattaactcaaggtgttgctgatgttaacatagagtcaggacaagatgatggtgaatgggtggtatatgcaaagaagtccaagaatagagcccgaagcacaactgttaaaccatggagtcctccggttcataattctagacccactggaaatacaaagatggctcacaagccagttactcggaatgatggaggagttggaagggcttctgggagtggaaatccttggcagtcccaaaatgctaacttcaagagacctgctggcagaggaaatggaaggccacagttaactgcaagtgaatctgaaagcagcaataatgtgacttctaatccagtcattcgacctcccctcgagcatgggtggaattggcaatctatatctggctccaagcagtccaagagtgttgatgatagcctggtgaagggtgaaattacagaagagtcccctatgaagaatgatagtgttgatgatgaaggggatgaagaggaagggtttgatgctatggaagatacggatgatgatctaatgagtgatgattatgattctgatactagtcaaaagagccacgagactcgtaagaagagcaaatggtttaaggatttctttgagaacttggatggcctatctatcgaaaagatcaatgaaccggaaaggcagtggcactgtacagcttgtcgaggtggtcccggtgctattgattggtacagaggactgcagcctctgattactcatgccaaaacaaaggggtcaaaaagggtgaagatccatagggagtttgctgagcttttggaagaggaactgcgcaaaaggggctctgcagtaattccacctggggaagtatttggtaagtggaaaggtttaaaagatgaggagaaagatcatgaaatagtttggcctccgatggttgtcattcagaatacaaggcttgaacaggatgaaaatgataaggtatgagtatttttttttcttttttgcatcaaatgatgaataattagtgataataaaaaaaaaacttcgtaccccattgcccggaggctcttcgctatgcgaaggtatgggggagggatgttgtacgcagccttacccttgcatatgcaaagaggctgtttccggattcgaacccatgaccaacaagtcaccaaggcacaactttaccgctgcaccagggttcgccctctgaataattagtgataataatagtattattttattataacctttcgtgttaatgtagcaaaatattcttaaatttcctgaactatttctggattttgtgttaaattcttattttcttctttgtatgtagtggctaggtatgggtaaccaggagcttcttaattattttagcgcatatgatgctgtgaaagctcgacacgcttatggcccccagggtcatcgggggttgagcgttttgatatttgaagcatcagctataggttatcttgaggctgagcgtctacacaagcactttgcagaacaaggaactgaccgagatgcttggtttagtcaccaccgtagattatttctccctggtggccggcgacagctctatggatacatggcaataaaagaagacctggactttttcaacagacattgccaaggttcctatttctcttcctttttcagtccttttccttcctgtgctgctggttgtttgatgtgatctggttgcgtgttaacaaagccagttctatggagaaagtatattgacttgtattttgggggtaactttttaatctgaaattgtgtataggtaaatctagactcaaatatgacatgagatcataccaggagatggttgtaaaccaacttcggcaaatgaatgaggacaaccagctgcttatttatttgaaggacagggatgccaaaaaacaaaaacaaacaaaagctcttgaagaatctttgggtatagtgactgagaagctgcgaaggacaatggaagaaaatcgcattgtgaggttgagaactaaaatgcaacatgaagagaacaaggaagaggtaatactaacagttgacagtgacaaacttgtggctttgattgtggcatgtacttttagctgttgatagatgagttttggatgtgcttcggaatgaattgtttcattgaaaggtgttagctgtaatttatatttttatagtacaattgctgaagtttcgttagtatgtataagctaaacttctcacattttccttcagtataataatgggcctttgtgtcaaaagaacttcagtataacctgtcaaattagaggagcaaggaagaagagatcttctttggctatttgatctatgtgccttctctctcataataaatcattgagcaatgtaatgaaattcctagaattctttagtaaaacaactgatattcttaattcttgtaatgatttagtaaatggtggttgctactgttttgttgtggagtctgttgcatactttccgtgacccacccagttttccagatcagtttgtgttgattaatgaattgatccaatagcttttctactgagtgccctgataatttcatgtgattcatagttagttagctcttttctagctatctgaaaaataatttattctttcagacagatgatttcaatcccaatttgctttcccttctggttattccttatcaatatttcactaatatttttttctaggttatgaaatatttcttctttttcttgctattttttctgaccattggaactttgtctcaatgaaagatgtacatgcaagaagaattttttaaggaacagatcagaatcattcatgattcaagggctgcaaaggaagaagagtttgagaggatgcagcaggagaaacgagagaaggtgaagccgtcaagtactagccctttaaatgaagaggaagggagagttaagtaagcactttacattccttgaggttatatgttagattcagttgaagtgttggactaatccctataattatttattcacatctggtggcatgctagtatgttgtaatttttgggaaacacaatatcaaagaaacctaaattcacgatagtctaacaaattaatattttgagaagagatgtatatacatttatagaaacactgtagtccagttgttttggttgtgcactcgtgctatttaaatttttcattggcctatgataaattttcatttctttggatgatagggtggacgaatatctaaaatttgttgagtttcaagataaagaaatggaaaactttgttgctgaagaggagaaactccgtcaagctcataaagacaatgttgatgcaatgacgcggaggcactgggaggaaaaggtgcagttggaggaaaggtttaatgaggagctagccaagctcatggaaaagtattccctatctcacccagaaaagtccaatggtatctgatgacagtgtgttgcacatcgcagacaaaaagataaatacagcattataaacagaagataaatggatagagtgattgttctaagttgaagaccctcagatatctgcacttttgtacttgaatacaaggacatgcctagagaatggagatagaaagcttgctaaaatacaaatgacattgcttattttctcctttggtattagtggcttgaacttttgatgtaattgcttttatgcaaattttttgaatagcagcaatttggatggagtgaaatacaccactttaggttatctctggctttggtgaatcgtatgaatggaagcctgatagctctgctgtaagagaagtgttagcgacacactccctaacacacttcctattattattagtgaaaatttattggaaattacaaagtttgagtgaaactcattaaatagttaagacttaccaataaatttcagtcactaataagtgtgttaagtatgttgttaacatttttcttactgtattcatctgtgaagcctgcttctgtattcatctgtcaagcctgcctctgttgcttcaaaactcaaaaggcctgaattcaacgttgtaataaatattgaattttgtttttataggggttaatatttatgtttatccttgtgttcacttgtccgttcgccccatggttatgtttttcaaactttgaggtaataggtttagttgcctttaaatgtaac

SEQ ID NO: 217 - DNA, 5687 bp, Glycine max
  source 1..5687: mol_type = genomic DNA
ttaaacttaaaattagcattgatgacaataaataagagaaaattgttttacattgacatagacattaaactcaataataaaagaaaattgattatgtatttataaaaagttttacacgattctctaataacaatttattatgtatgataattttttttatttttaaaataattattttaaattaatttaaacgatgattaataattagatgataatataaaattattttacattaaactgataaaacaaatacttgttgttgtttttttttttttatcatatggagaaagtaaaaacaaaacgattacagacgaaggaaaacagtgccaatgacatttattgtcaacacaggaataacatcttctgggcagagaatatgattaactaagaggtctaaactaacagcacatttcttagctaatatattacaggcccagccctgaactatgatgagggatgggttcacaaatttttattttggtgtaatattttaaaaaaatcattttaatatgactaattaattcatagactaatcaattaaaaaaaccctttcagtttcctctccacttttcgatataacccacccaatggctgttctcaaattcaaaggttacaagcaattgaatattaaatttccaccaacttattcaatagcttttacaaatttatagttttgtggccctttatttatgattttgtactggacccataaaatattaataccggctccattggaaagagagcaggttcttgatgcttgcattaatcaccatagcaaaagggtgagaactagcagattgatgatgaattgaagatagagaatcagtctccagcataataaatccgaatccattgtcccatgaagaatgcccagatccacatttgtcgtattgctgcagtgacccaactaatactttagtaaatataattttttttaatagattcggtgtaagacaagagtttatttatgattatttttttaatagaaaatataaataaataaaaaatatgtcataaaaatactaaattatttaaatataataaaaaaattacacgtaaagtaaaaatataaaattaattaaacatataaagtaaaaatgaatgaaatattacttagatgtttctatcaaatattttaataatgctattatatttttaaaaatatttatgtttttgaatataatttatgttattttattatctaatttaattgtttctaaagatattgtttaaaagattaaaaatgtaatttatatatttaataaaaatgaaaaataataatattttatttaaaatttatttaatttgaaataaatgtcgtattaaatctttaaatttctttttcagtaaaaaaacacgaatttattctaattgcaaaaattaggaagataaataaatataattactaatgatttatttttaaaaaatccatcatctttacataataaataaaaatctttaaaacgttactatctgttaaagaataataacactctgatcgtttaaaagtaaattgttagagaggacgcagtcacgcctgtgactgtgtgatacactagactgtattgctgctactgcattctctctccaattccatgcatttttgcttttttaaattcttattgcttctttcacatgccaaactcttcgagtacaattgccgttacttttattcctccttatgaatgcgttactgctatgttataaatagatgctttgttcttgttgctccatctgtcgtgttcttttgttgacagggtaggtagattgttttcatgaattctcaatgcatgtacctgggatttgctatttctctgataactctgttcctggattggtcctttgttgggggtgaaaaaagagattgtgtgtgtagttaatcaagcagatgagaaaaaaaaaatgaattctttgtccctcatgtaaaaaaggatccattttttttttttatagaattgtttgtggggtgtttgagaattaagggataggtaatcaatcaaacttgttcttgactctgtgtgctatttccatctggaattacatccaatgttagttgcgggaaaggttttcactttatcattgaattgatccaatgttttgcctctcggtttatgaattcattaaattggtttcattgacatgaattggaatttttgaactttttcttatgacaattttcacactttgcatttaaattagcttgggaaaccatttgctcgggaacttccgatgctagatgcatttgattttatttttttagttaagccatccatctccttatttattgtttgcatgactcctgaggcttcattattttgatcactggaagctgttttgttgcctttgtatattcttcgaaataacaatatcaactccctgtgataggtggtgaaaattgaattatggctgatgatggtgctgatccatttccagtgttgacaagtgtgtatagagtatctggttccaaaaacagtcagctgggctggaatgtagccaattctcagcaaactgttgactccagtgtaaacaactcaaggcagttacagagcatttctgatggcagtgctccaagaccctggttttctcaaaattttagaccaaatgcatgggaagttccaggtgtgattcagaagctgaggccggcaaagcggggtaatgacggattggctttgacgggaagtggaattttgaacgacaagttgcctcctgagtcagtaatatctccaacatcagagacagagagagggacagggttaaattcatctgttggagtcgttacaactacatccaaggattgtgaaaatgttgaatgcaaggacaaggataagagaatcccagaaccccaatgtgaaaacaacaatgatcagattgttgacaatggatctgatattgtttttgatagtgatgatgattgttttttagatgacattgactcagatactggagagagaagccatgaacagtgcaaaaagagcaagtggctcaggaatttctttgataaattaaatgcactcaccaatgaggagataagttcattagacaggcagtggcattgcccagcatgccaagggggttctggtgctattgattggtacaaagggctgcatccccttttggatcattccagaacaatacaaacaaagagggcaagactgcaccggatgtttgctgaaactttggaggaagagtgtttcaggagaagagctccattaacaacagtcagtgacgtccatgatatatgggagggtcttgataagaaagtcaaggatcatgaaatagtttggcccccaatggttatcatcatgaatacaagatacgagcaggacgaaagtaacaaggtaaatgatgttgtcttaatttcttgtttggatgtatgcacttaatcaaataatcagctactcgctgaagttctctttgtgggtgtgtgcatgtgttaaatcaagtatgaagctacttgctgaatttcttttatttctttacacgcatgtgtaatttcacctcattgaattcaattgtagtggaatggaatggggaaccaaggactccttgattgcttctgtgactatgcagcattgaaggctcgacactcgtatggtccacaagggcaccgagggatgagtgccttaatttttgaggaatccacggcaggttatctagaagctgtgcggctccacaagcattttaaagagcaaggaagagatagggaggcttgggattgctatcggaatccatttctcccaggtgggaagcgccaactttatggttacttggcttctaaagaagatttagatattttcaacaagcactctagaggtaatttttttttcttctcttaatcagttttcctatacagtttttttcttattgagataattggtgatcaacttgaatatggcagctctactttccttagagtttggtagtttagtaattcttagttggcaatcgtctattctctttaggaaaagagagggaaactggtgttatttttgcgtttcttctctttggcaatcatttactattttaaattaaagttctgatacatctatattctctaggaaagacaaaattgaagtttgaaatgagatcatatcaagagatggttgagagcaagataaaacatattaatgatgatagtcggaagcttgactattataagagcatggtagccaaagaacaaatcaaatcacaagtaggtgcagactctttattgagattaagtgagaagttaagcttgacaaccgaagaaaaccgtgttgatcaacaaaataaggaggtaaggttatgtggctgaaattcaattaatattattgttgttgtgctcattgggttttgcaagaagctctgattgttatcatataattgaaaacttttatgcataaaattggttacaatgctttatattttgagggtaatcatatatgctggtgaatggtggctgtctttatgaaacaatatgatatctatgagaaaccaaaccgataagttaaagctattttacttattcttacaacttgatttatttgttctgtatttctcacttccatttttttggtgtctgctcaagcatatattgacgtataatttttttagtgtgatcttttctgggaaggatttttacaaatttgcaaatttgtctttcttgattctggtagtagctttctgaattatgtaaaaagtctttctacaactgatcattttgatatactgtttttgttttttctagatggatgcactagaaaaaaatttccagagccaaatcctagacattcaacaagccatagctgcaaaggaagataagtttgtgaaattacagcaggcaatgcaagaaaaagtgaaagagtcctgcggagaatcttctgagaaagaggacaagtacatctaatattccctaattgtgcattattccaatttccgagcgtgtttcatattatcattcttttactacatatatcttaactttcttttgccatttagataatactcaactaagtgattagcaagcaatattctaatctatcttccttctgaagcgaaattctcagtggcgtttggcattttctaatccatcctctatcaacagggtagaaaatatctcttgtttcctgaagccccaagacaaggagatgaagcagtttgaggcagagagagagaaaatcataaaaattcatgaagagaaaaggttggctctgaagaagaagcattggcaagagcaggttgaacttgagaaggagttagagaatgaacggacgcagctcatggacaagtacacttgcaaccagactcaagaagaaaactgttatgtggatcattaaggaaaacatacacagaaatggaaaaagccaaaagcatccacaggcatacagatcatgcagagtacatgttatgtgctctgccacattttccatgaatttatacttttttcttttggtttactcttgcatttattttgaaagttgaaaagtgagaaagttaacaagccccaccggcaccaaaattctggttccattttcattgatacttgatatagttttgctctcattatatatgtagcgtgcatgctttgcttgcaaatggtttcgaatataaattttctgttgattaaagttactgtcttactgtagggaattttggatgtatagtttgaaatggaattagtctgagactcatactgaataataccaaag

SEQ ID NO: 218 - DNA, 10714 bp, Glycine max
  source 1..10714: mol_type = genomic DNA
ggttttaccctttaaaatagctgttagttttgatggttgcaaattttagaggttttgaaaataatttatattattaattatgatgctacatggcgttaagtgactgatgaaataatatgcataattagttaattcacatcacatcatatatatatatatatatatatatatatatatatatatatatttaaatgtatatacatatatttatatataaatatatattatgaaaactaaaattaacaaaaagaattaaagaactaaaataaaaatttattatatttaaatgaattaaaaatatatttaacttttattatctattttacatataaaaaagatttcttcttcatactataattgatgtcactgttatcattttatatactttttatttcatatcatttatattttatttttacttcataacaagacacatttctttcatatcatttatattttatttttacttcataacaagacacattattaagttattatgttatcattttttgggtctatctttttctctttttcctatttcttttatttctatcctaatttcccaaaaacaaggtgtcctattatccctactctacataaaaatatacattaggtaagaaagatcaataatatgacatcttgtacttgcatagtcatttctattccatatgttgtctttatgccaattaccttagatacatttactaataacaacattacaacaatacataagagtaatgttaaataataaaagaatacctggtacaatttgcataaaacacaaaaaatacaagtataatttactctaaataaagtaaaagtcatgatttttgtttactataacaatgaaaaaagtaatattcatctagaagaaaatattaaaaaatgaaattacatattaattacaataaaaatttaaaatacaattaaatatctcatcttctaaaaaagaaagcacattgaaaaaatcaaaaccactaaaataaaataatagttataaccttccacctacttctttttctctattattttcacactattatttttcatattgtctttgtctttcacattatttattacatatattacttatttttttttctgtttctatttttctcttatttttcatgtgactagcctcatttatatattttttctttcatatcattcacattttattttcacttcttaataagacacatcacttacttatttacttattacatcatcatttcctctctcaacccttttcttttttatttatttctattattcttaccttaattaactaattcataattataatctttcacctactttcttttatatattattttcacctattatcttttcatgtgtctctttctctttcatattatttattataggtattactttttttcctagtctacctctccaatttcctatgtatatcctcatttatatactttttctttcataccattcacatttcattttcatatcttaataagacacattgcttaattattatataatcactttttctctctacgtttttctttttaacttttctctcttattcctaccctaattgactaattcaccaggtgtccattcatcaccactccacataaacctatacactaggtaagcaagatcaagaatcacatcttgcatttgcttcttgcacaacaatttccacctttttttataaaagaaacttcaatgttcaaatgtctgaaactattagttcataaatttcaaaccccacccaatccggaaaccaaaaatttcccaattgtccatttcccctccaatgcatcttcttccctccaaatcaccatttccaaagctccttctccttattcttcttcgccttcttcttccaatctgaaccctacccaacaccatcaccaacaagaacaccaccttcttctataacactaccatgaattctctcttttcgccggaaaaccttcctccaccaccgggaatcccaatccccgccacaattgccgccgccagcaccaccaccccaaacccaattctaatcccaaagctggaacctttcgatgaatggctcaacacccacacaccccaacaacagcaacaatctcaggaccccaattcttcaaatgggtccctcgacctcgaccttaagctcttcggcgacgaatcccccgaagatttctccggcgaccctaacttgctctccgacttcaaccgtctctctcagcttttcagaaccgctttctccaacaacaacgccgttcccgaccccatcacccaagggatccagcagctcggaaacgacgccgtttccaacccctttgccaaacccccccaaaacgaaaccaccgtggttccaccgccgagcttccaaaacggcaccgtttcggaccccgggatgctgctgcagcagcagcagcagtatccgaacggcgccgtttcagacccagattcgcgggcaattgtgccggtcccggaggacgggcggtcctcctcggtggcggtcaccacgccgcggcagccgcggcgctgcaaagagctggtccgcctgatggatgtcggcgggccggagcagcgtcacttccgggacgtggtccggcggacgaggatgctttacgactcccttcgcgtcctggcgacggtggaggacgagggccgggtggatgcccggcgggggcgcagcgatttgcgtgcctcggcggtgatgaggaactgtggcctgtggctgaaccgtgacaagagaattgttggtgcaattcccggtgtctgcattggtgatgtgttcctttataggatggagttgtgtgttgttggccttcatggtcagcctcaggctgggattgattatctccctgccagcatgagttccaatggtgaaccaattgccactagtgtcattgtttctggtggttatgaggatgatgttgatgagggtgatgttatcatttactctggccacggtggccaggacaagcattctaggcaggttttccaccagaagcttgaggggggaaatcttgcaatggagaggagtatgcactatgggattgaggtcagggttattcgtggggtgcggtatgagggtgctgcctctgctaccgggaggttgtatgtgtatgatgggttgtataggattcatgagtgctggtttgatgtggggaagtcgggtttcggggtttataagtataagctgtgtaggattgatgggcaggctaagatggggactgtggtgatgaaggaggcgcttatgcttaggaaggatcccttgagtttcaaacccatgtgttgtttgtctcttgatgtttcgaataggaaggaaaatgtggccattcggctttttaacgacattgatcgtaactatgaccctctgcagtatgagtatcttgtgaagacaaattttccgcagtttgtctttcatcagagtgggagggggacgggttgtgagtgtgtggatgggtgtgttgaggggtgcttttgtgctatgaagaatggaggggattttccttataatcagagtgggattctcttgagagggaagcctttggtttttgagtgtggcccgttttgtcattgtcctcctcattgtcgaaaccgtgtcacgcagaaggggttgaaaaataggttggaagtgtttagatctagggaaactggttggggagttaggtccttggaccttattcaagctggtgcttttatatgtgagtacacgggggttgttctcactagggatcaagcacagcttttgacaatgaatggtgattcgttgatatatccgaatcggtttactgataggtgggcagaatggggggacttatctatgattgactccaattatgtgcgtccatcgtatccgtcaatacctcctttggattttgctatggatgtgtcaagaatgaggaatgttgcttgctatatgagtcatagttcgactcccaatgtgttggttcagtttgttctctatgatcacaataatttgatgttccctcaccttatgctatttgcgatggagagcatccctccgatgagagagctcagccttgattatggggtagctgatgagtggacaggaaagctctctataggtaactgaacaattttgggagtttcatacactttataatatactgaagctgagttttgggcattgtttgcagaggtaaagccaagttctttcatcgacttactcgttttcagaattttcatcattgtttttccatttcattttatgtcatatctcaatctttgtgtggtctccattataagctctgttaaccatatgaggttgtaggcatattattcattatgaactgctccattttgtggtcttcctagcatcctggtgtacttcagatgacaggaagtttaatatttattgtgactttgaagattgagataatatgttgtaatatcttatcattgtagtttggtttgcaaaccgatcagtattgtgcttgctctgaatatgagatttttctgcttctggcagtcgaaatctgttttcctgtatttgggtttatatgtgtgtttgcattccatctatctattattggcgctattttattgaacacatgatcttaaaactttcctttcctttcctaagaaatccactttatttacaatgacatcatattatgtattagtattatgaattattcaattataatttgtaagactgtaaccattaattctttgatataaaatatccctgagcaatagtctttcaaaattatttgtggaatattagaagactttgttcatagcttcatattgggaattcaggtgtgaccgtagaagttccctatttaaaagtaatgggtttgcgcagttagcacaaggtgttaagttctaacctttttgctgccattatttattttttttggaaggcaaacatagatatatattattaataatatcaaatcagtaccagaagtactgatgaattacacataaagacaagacactaagagtgtcgcctcccaaacaaagcaagccccctaaaaatccactacaaaggataaaatacccatcccaatacagatatacaataacccagcccaattcaactaaaataagccacaagattagaagaccattggttgaaagaaatgctgaagtgtttgtctctggtttttaaccatgtccagttgaggaataaagcatcctccatcactttagatggttgaaagtgattaccctcaaaaaccaactgatttctatgcttccatatagaaaaagtaatgggctaagggaggaatatgtcagttaaatgacccatagacctaattaagtttttgggccgggaagtggtgtaaagcctataagtgtggttcttgcttaagcccatgaaaagagatattctcaatgttttgggcttcccttctccttacagttcacttgttattgtattctttcagtgtgggtttgatagagacttggaccggatgatgtaaattgtaaacagtttagatgggctggatgatgtaaggcacctttcaggggaggggctaagcagtgatggaatgttttttgtcatgtggatttgctgacatggacaagttagttaagctagccagccagtgttataggggagagtaggggactaggtgagaatcatgttgagcagtattgtcacggtgtggccgagcatgttctctgaaatgccttggatctggtaggagaaattgtaatttctatggttatattttaattcaataatagtatcagattcaaccatagttaccaggttcacaatactctctggaacgtggtatgggtacctgtacacggtatgcaaccatacaaagtattggtacacggggtatatagagttggtatgcttattaaaataaagcccttttaaaaatatgttaatttatttttacaattttaaatttctatcatccacttaaattttaaagcgagaagtgttgaataactataaaaagtaaatgaataactctttattttatgttactcttcttctttgtacattcgagttgtgtttggtagagaggaaagagatagagggagtggaaataggcaggtgggaaaagaagggaaataaataagaaatagagtagaaatattggttgtttggtttaagaaaaatagagtggaacgaacattgatgctgtttagtttgaaagaaagaaaaggaaagaaattagataatcaagaaatataccattttagtgattttaccttcacatatgtagtcattattttttacttgtaggccccatgctctccatataatcgattatatggctcctatcacacaaaatagaggaacatgttgcaactaattgattatgcttgcatataattggttatgtttagacacaatcaattatgtgcaagcataattgattagctgcacttaaaaatccattttgggttacttttggtaaagtgaaaaaaaaaccaagacctctgtagtatttcatcgttcatgagagtggaaataaaaagtgtgggtccacactttttttgaaaatctctatttcttgggtaccaaacaagggaacttccgtacttcaacttcatttccttgccgttcctcgcattcttacatctttcaccactaccaaacacaagattttttattaattgattggtttgtctaatatgattctgattccaccggttatagagcatataaatggaatttgccgttataggttacctcttgatctcgtattgaaaattgataataggtgacatcatagtcaattcacctccaaatttccatattttcatggtggtaattgcattgttgttgagattgtgtaatcgcacaatcttaagcattaaaagccccctttcgtgctaactcgtgctgtggatcatggttgagcgggaccagtcttccacacccaatagtgtagttggcggtcccctgtgagcaggaagaaacagaaaagcagagtggtcgtccactactcttgaggcacttgttgcgaagcacctgtctgttgcagatgttgtgcagccatttggggtgcaaattgcagcgttttgtgggcttcatagtagctcctccatttcttctgttgccagacatagcactgcaacctgcactgttgctggacagcctctgtcacctccctcttgctgcttccaacctcccagtacacctccatttgtgttctcgccatatgcaatagggaattaaggttgcacttgctttttcagaacagcggcagcacttagtagaaaagctgacgggtcctagggttttagggaaattgcgtccaaacatttctctctgttttcctttttctggtttgatttgttgggcctcaacttgagttcaattcagcttctccctcttttttttttttttttttttacgtaaaacataacatatactataataaactgaagaataactgtaataaaaaaatattagtattaaaaatatagtaaactatttaaagcataacatataacatatatataatataataactaagtaataataaactaaaaaaagcatataatgtgatataataaattaaagaatgatagtaataaaaaatatgtattatatataagtattttaggcaggggactgtagggtcttatgatctgagttacaggttttcatccccttcttgttcctcttgattttaacaaccttagataattgagacttggttacaaatggtagtgcttctgctgtaactaaatgtcaatgttaatatatatttctttttacccgaattaattcctcatgaagataaaagaggctactaattgctctttgttattgaatttttccttctctacttgaagttgaactgaagcttatttgctctagtattctgtatctaattattgtgtgtattcattaagtgcatttcctattctgtgaaataaggtgtatgatttttaattgttccagtaaaattatttccaaaattaatgatttattttttttcagttgttcatagattgtcttctagatttatataggttcaatatattttggtttcaaaatcatatctctggttccagtttcctagttttctccaagaaggttgctaggttgttgcaaaacttggctaatttaaatgtttatagtgtatagtaactgaataagttcttcattttggtcttctattaattttagcatttacctctactgatgggatgaagaactggataattactttcatatttttgtaattacttatagactttttattgctgtaccatgaatctttgcttcaatataaggtgaacatgtcatcttgtaacacaacagctgaaagatggtcattaggctcaagtaatttatgttgccaaaatgtgctttatttttttccatcctgcctgacttcccattgggtttcactacatactttcttttcatgtgggcttttgcagcgtcttttaggtttgttcctaacttcctatcaaactagattggtgattcaaatattgttgtggatctgtaaatggtcaaatagaaatttattattatttgtcatgttctgataattttctttatgtttacaatttgcattgaaagctggttgattgaaaatatttctagtctgtgtttggggggatgcttactttgggattggcaaatggatgcctctgaacattcaattttagcaattgagtctcttggaattttgcaaaatatatcattagcacttctatctaattttttggtcaattcatattttgaaatttaacattttatttatttatttgaaattcatatttgacttgctgtaaagaagattggactgtagaccgcatagtcacagaagctatgataaatgtcattaactaattattctagaaacataaattgttgggtgaaggctcatgcatggttgtaagtaaaacaaactgcttgtaacttgaaatgttttcaataagcaagctttccattccgtgttaaaatattcatgcttaatgttatgaactattttatttttaattattaggcatttaagtccttttcctttttatgatttatattcaattgggccatatttgaacctgcttctatattgtctgtgggcataaaatttggtataaattagtcatttctttgagtacaaattagttactgcatcttttttttttttttttaaattatgttaaagtaggttagttgacaaaattaatgttccaggggtctgattgcaatccccctaaagttaaaggagctcgtgtgctttacatttatatggtcctcacagtccattattccacccccattcttcacactgtcacgtttatatggtcctcacatagtccatgattctcttgttcattgtcctacattttctttactcttttagctgtattcccaagtttgtaactttgtcaggttatctcaaaatttaatttagtacattaactgcacagaagttttttacattgccatcaagtcatatattgttatgaatgataaaattgttgacttttgtaataattgctttgaaagtcatttctagggtgatttttaattggttagctgtgtaacaaaactttacactgacagtgcatggaaaatctctttatctttaaagaaaagactcaaatgagtgtggtcaatgatatctgcagaaataactgttctgagataaaatcataacataaatattgatggtgtgagatattttatcatcatagatttaaaacagatcctattgtattcttttgttcattttgcttcaataaggctttttatcatagaccaaacaataacatactggttcgatatattttatcgaagaactcaacagacaccaccattctttacctttttttattgattgtgctttgaaagttttacatgtgtttttaccatacatgttggccccatctgagcagttgagtttaggtgcaaatggtaactccatttactacgtttgaaaacttttatatactttcttgaaactctagtgtgacttaaatcatatttgtctttcatcatcagcattgtaattattttgggttagtcctggattttacatttccctattttgatttttcaatttactatcccatatagttttgctattgcaattaatcaatatccaggcatgccaatttgagttgatattcatttgcagagatagtcaagttgatgcagcacaactttcacaagttttcaaccccgccaatttacaaggaacagtagtagaattgcttgctatttacggtgtcaggatatcaaaattcaaatataaagaaatgtctattacgttattctatctaactgttggtggctagtacacggtgtgcctttgtgttgagaaagatcaggaattgaagttgccaagtctgcttaatcttgaagacttctgtaggtttctcacttgttgatgtcatttgttttttctgtaattgatgtcttcctcatctcggcgaagcattttcacacatttttgtaagcactaatagtgcaagctgtattaactctttcttcttttggagtactttgtatatagtataagttcaaaacttgtataggttttgtattagtgactggtatcggatgcagcattttaattagtttagaactgggtaaattgggcatctggttattaagatgataggatatagccattgttgctaatgatcttgtatgaggaaagtcaattatgatgaaatggacaatttggttatgaatttcacccaataaggttgtagaacatctatgataagacattgtttgcacgttgcatgtaga

SEQ ID NO: 219 - DNA, 18794 bp, Glycine max
  source 1..18794: mol_type = genomic DNA
aataatagttgattaaattatttgaatttgacttaatttcatttggtatggattataatttttatatttgaattgcaaaaaaataaattaaaattaaagcacaattataattatgagttgaatttgaattttaatgagagtgttgataacacaaatattaagataatatttaattatttttattagtataatatttatataaatatattatatgattttttaattatgaattattgagtagaatttaattaattttattaatatataatcattaattgctaatatctctttttataaaaaagaagccccatttaagaaataaaaaaaatattgaaataaaacaataattatgatcttcttcctaattccttttctatattattttcaccccattttctttttatatgtttatttttgtttctctttcacattatttaatacataaatgatctttttttatttatttatcataatttacctatcctattatatatgtcactattattcttttatatattttctctttcatgccatttatattttattttcacttcataatacaatacattgcttagttattacattatcactttctttatctaccttttactcttttttccatctctcttatccctatcctaattcctccaaaatgagatgtcatgttatccataatataagagggtgtttgatttgaccgtgaacaaccaaaaatcgtggtgagaacataaaaaaataattaaaacagttaaatgttgctttctcgtcatgattttgacccccattatgatctaccttaccaccaccccaaatacactgtacataaaaatacacattaggtaaacaagatcaataatgtgacatcttgcacttgcttgactatttcattgcatactcgacattttctacaaattatactccatatagttaaggataataacattacaataataggtaaaagtaatgtcaaatgatggaagcttgtgaacacaatttatataaaatacaaaaatacgagtttaatttactctaagaaaagtgaaaaaaatttaaatctttattataacaataataatgaaaaattaatatttatctagaaaaattagttaaaaaataaaattacatattaattacaataaaaaattaaaattaaaattaaatatcatcttctaaaaagaagaaagcctcattaaaaaaaatcaaaattacaaaattagaaaaaattaaaataaaacaataattatgatcttttacctactttcttttctatattattttcaccccattttctttttaatgtctctttgactttctctttcacactatttattacatgtatttttttttctctataccttttttctttctttctaattctcttctatttatatctactttacctctcttattacatgtcactgtcatcatttatgtattttctctttcatctcatttatatctcatctcaacttaaagaaacttacttatcttttaagctatcattttctcactttatctatttcttttcttctcatctctcttcttcctaccctaattcccaaaaaatgaggtgtccattaatcaccactccacataaatctacacattaggtaagcaacatcaaggatctggcatcttgcacagctatctctacctttcccacaaaacaaaaaagcaattcaaagttcaaattctgaagctcttagttcataaatttcaaaccccacccaaccaaaatttcaaaaccggaaaccaaaaatttcccaagtgtccatttcccctccaatgcatcttcttccctccaaatcaccatttccaatgcttcttcttcttccaatctaaaccctacccaacaccaccaccacctccacctccaacaagaacaccttcttctataacattaccaccatgaattttctcttttcacgggaaaaccttcccccacctccgggaatcccaatccccgccaccattgccgccgccaacaccaccccaaacccaattctaatcccaaagctcgaacctttcgacgaattgctcaacacccacacaccccaacaacaacaacaatctcaggaccccagtttttcaaatgggtcccttgacctcgacctcgacctcgacctcaagctcgtctgcgacgaaacccccggtgctttctctggcgacccaagcttgctctcagatttcaaccgtctctctcagcttttcaaaaccgctttcaccaacaacaacgccgttctcgaccccatcgcccaagggctccagcagctccaaaacgacgctgtttccgaccctctagacggcactaccgttgttccaccgcagagcttccaaaattcggaccccgggatgcagcagcagcagcagtacccgaacggggccgtttcggacccggattcgcgggcaattgtgccggtcccggaggaagggcggtcctcttcggtggcggtcaccacgccgcggcagcggcgcttcaaggagctggtccgcctgacggatgtcggcgggccggagcaacggcacttccgggacgtggtccgccggacgaggatggtttacgactccctgcgcgtcctggcgacggtggaggacgagggccgggtggatgcccgccgggggcgcagcgatctgcgcgcctcggcggtgatgaggaactgtggcctgtggctgaaccgtgacaagagaattgttggtgcaattcccggtgtctgcattggtgatgtgttcctttataggatggagttgtgtgttgttggccttcacggtcagcctcaggctgggattgattatctccctgctagcatgagttccaatggtgaaccaattgccactagtgtcattgtttctggtggttatgaggatgatgttgatgagggtgatgttattatttactctggccatggtggccaggacaagcattctaggcaggttttccaccagaagcttgagggggggaaccttgcaatggagaggagtatgcactatgggattgaggtgagggtcattcgcggagtgcggtatgagggtgctgcctctgctactgggaggttgtatgtgtatgatgggttgtatagaattcatgagtgctggtttgatgtggggaagtcgggttttggggtttataagtataagctgtgtaggattgatgggcaggctaagatggggactgtggtgatgaaggaggcgcttatgcttaggaaggatcccttgagtttcaaacccacgtgttgtttgtcgcttgatgtttcaaataggaaggagaatgtggcggttcggcttttcaatgacattgatcctaactatgaccctctgcagtatgagtatcttgtgaagacaaattttccgcagtttgtgttccatcagagcgggagggggacaggttgtgagtgtgcggacgggtgtgttgaggggtgcttttgtgccatgaagaatggaggggattttccttataatcagagtgggattctcttgagagggaagcctttggtttttgagtgtggcccattttgtcgttgtcctcctcattgtcggaaccgtgtcacgcagaaggggttgaaaaataggttggaagtgttcagatctagggaaactggttggggagttaggtccatggaccttattcaagctggtgcttttatatgcgagtacacaggggttgttctgactagggagcaagcacggcttttgactatgaatggtgattccttgatatatccaaatcggtttactgataggtgggcagaatggggggacttgtctatgatagactccaattttgtgcgtccatcatatccgtcaatacctcctttggattttgccatggatgtgtcaagaatgaggaatgttgcttgctatatgagtcatagttcaactcccaatgtgttggttcagtttgttctgtatgatcacaataatttgatgttccctcgccttatgctatttgcgatggagagcatccctccgatgagagagctcagccttgattatggggtagctgatgagtggacaggaaagctctctatatgcaatgaatgattttgaaagtttcatacactttataatatactgaagctgactttcgggcattgtttgcagaggtaaagccaagttctttcatcaacttatttgttttcataattttcactgttgttttccatttaattttatcttatcgctcaatctttgtctggtctccattataaactctgttaaccatatgagttggtcttcctagcattctggtgtacttcagatgacaggaagttcaatatttattgtgacttttaagattgagataatatgttgtaatatcttgtcattgtagtttggttttcaaactgatattgtggttgttctgaatatgagctttttctgcttctggcaatccaaatctgttttcctgtatctgggtttatgtgtgtgtttgcattccatctatctaatattggtgctattttattgaacatatgctcttaaaactttcctttcctttcctaagaaatctactttatttacagtcacatcatattatgtattagtattatgaattttcaattctaatttgttaagactgtaaccactaattctttaattttaaatatccccaagcaatagaaactttctgtgttgatttggtgatcatgctggggcaatttctctgaattctagatcttggttctttctaaattggttgtggaatattagaagacttactttgttcatagcctcatgttgggcattcaggtatgagcgtggaagttctccatttaaaagtaatgggtttgggttgttagcacaaggtgttggttttaatcttgttgttgccattatatgcacacacaaaaaaggtaatgggctaatggaggaatatgccagttaaaggacccattgacctaattaagtttttgggtcggggtgtggtgtaaagcctataagtgtctcttgcttaagcccatgaaaggagatcttcacaatgttttgggcttcccttgtcctaacagttcacttgttattgtattgtttcaatgtgggtttgatagaaaccttggactgcatgaggtaaattgtaaacggtttagatgagctggatgatgtaagccacctttcagaggaggggctaaatagtgacggaagttttctgtcatgtggatttgctgacattgacaagttagttaagccagccagccagcattatagaggggagtagggggctaggtgagaatcatgttgaggagtactgtcatgatgtggctgagcatgctctctcagggattccttggctctggtaggagaaattgtaatttctatggttatattttaattcaataatattatcagtttcaaccacagttaccaggtttgcaatactccctgggacatggtataggtacctgtacacggtatgcgatcatacaaagtattggtacacgggtatatagagttggtatgcttattaaaaagaagcccttttaaaaatagaagaattttaaattttaaatttctattatccactataattttaaagtgaaaagtgttgaataactgtaaaaagtaaatgaataactctttaatttatattactcttctcctttgtacactagggttgtgtttggtagataggaaggaaatagaggtagtggaggtaggtagatgagaaaagaagaaaagataaatagattagaaatagagtggaaatagtggttgtttggtttaagaaaaatagagtgaagataagataaagaaatatagcgatgatcataaaaatacaattttaccctacacaaagataacattttattttatttttttaccattggacaacataatcaactattttgaatgcataatcaattaagttggagatcgaatgctggagcttgcgaggaagaagacaccagcagcacgacatcaaaagctagagcaaaagaggaagaagacacaaggagcacagggtcagttttgtaaaagaagtagctccctcaagatttccacgaaaataatctccgtggagtgtggaagctgatgactgtgggccccaccaattttttatttttatatattttcaatacatctcgtgtgtaccaaacaagcgaatttgtacacttctttgcatttccgttctcaccacttcttttctttggtacttcatgtgtaccaagagagcctcaatcaagttttattgagaaaaagagctgcacaaccttcctaaattaaaagaactggataacactcaagtgtcaagtcttattaatatatattttgttataactctttaattctaaagcaaggctgtgctatccagagtttgaagttgaatggatttattgactgcacatttaatcttatcttctcactctaatgagcgtgcaaatgtttcctagaaaaaattaccctattaatgcactcttcaatctctctctctctcctactgcacttattgagaatttggaattctcatattctctctcttcaatttgtcatacttcatattcttggatcgtcactgccatgaatttttgccaatttttagcataccagtatgagaacgttccgtgaattggtactcatgaacccatttgcagttcttttttaaaatcatgaattatgtttcactggtttcaatcttgtactattatgcatattctggtgttctattagggctctggttcctacactagaaattgtttctctaaggatttggtactttttgtgaacatgatattaaaatgtgggttttgggtctaattcaacctcaaaagttagctcatagggtgaggattgtggcccacttatatattctatcttagtcttatctctagccaatgtggaatttggattttttccaatacactccctcatgcccaatacttttttggacttggtgcatggatgacatggtgggtggttcgtttaatggatctaggatagactttgatatcatttaagagttatttattgctttgtgttgttgtatcataccacccgaaatattcttatttataatcaaggaggtttacaaaataaggaaacaaaataatgagtaataatggaaacaatcccatactaaactgtaattaaaacatatcaaatcatatctttgacactccccctcaagttggagtatatatgtcatatgaaccaagtttgttacaaatgtggtaaacccaacagaaacgataaacggttctagttgggtgattgtgccagataagcatggctcgacagtatccaatgaaggcccatagtggtgatgtgtgttcaccagtaaataaaagcacaccttgaggtggaaggaggtggttccagtgtgacgcttgccggagatgcgttgtgtgtgtgaacttcacgaactgaaaaagggccctgcgtcatgtcgtgttaagatattatatgatagagatttaggagttttgataagatatgatgatgttataatatggtagagattaagatatgattctgtgtatgatatggtagagatatgatagcttatttctaggaaagtgggaaacttttatcttatctagtaggattatatctctaagatttatagtagattttggttaatcttttcctttttactagcttatatttttttgtaagctaggtaggatttaagaatgttacaattgagatagtacaagtccttttaattaaaattgtattgaaaattgatccctgaatttttcacctacaatataaaacttgtaaaatagaagaaaccgagggatatttggactgaaaaccgtgtgtatttctgtgtctgaaatacacacgggtcattgtttatatagacatattgcattaaatacacataagtagagaggataataagtttcatcgaaatcagatcctctaaatcagatatcatatcctatcacatcattatacattaaattccttattctcaacaaaactaaattacaaggttaataggggctgctcaatgctttcattaaataatttgttctgaaaatattgactaagattcttaaaaatacagatgacaatttactaactaactttctgctactttatgtcattaaaggtgttaattactaaatttgtccagccaacaaactacagagaagaccaagataaggttggaaccttgaacaagaacaaaactaatatagttgagaatcgaacaactatagagaaccttaagctatcattttaagatgctcaagagattaaggtcattaacattgtgtttggtagagagaggaaatagaaggagtggaaataggcaggtaagaaaagaagagaaatatataagaaatagagtagaaatatttgttgtttggtttaagagaaatagagtggaacaaaaattgaggttgtttagtttgaaagaaagaaaaggaaagaaattagataattaagaaatataccattttacccttcacatatgtagttgttattttttacttgtagcccccatgctctccataaaatcgattatactattagtatagtcaattatatgtctccaatcacacaaaaatagaggaatgtggtgcagctaattgattatgcttgcatataatcaattatgtttagactttagacacaatcaattatgtgcaagcgtaattgattagctgcacttaaaaatccattctgggttacttttggtgaagtgaaaaaaaaccaagacctctgtagtatttcatcgctcacaagagtggaaataaaaagtgtgggtctctcactttttcaaatatctctctatttctctgttactaaacaagggaacttgtgtactacaaccttatttccttgctcttcctcccattcctatatctttcactgctaccaaacacaacataaattttttgataaattgatttgttttgtctaatatgattctgattccactggttatggattatataaatggaaattgccattaaaaggttacctcttgatctcatattgataattgataataagtggcatcatagtcagctcacctccaaatttccatatatgcatggtggtaattgcatcgttgttgagattgtgtaatcacacaatcttacgcattaaaagccccctttcgtgcaaacttgtgctgtggatcatggttgagtgggatcagtcttccacactcaatcgtatagttggtgatcccctgcgagcaggaagaaacagaaaagcagagcaatcgtccactgctcttgatgcactcattgcgaagcacctgtcttttgcagatgttgtggagccattttatggggtgcaaattgcagtgttttgtgggcttcatggtgactcctccatttgtgccgttgccagatatggcactgcaacctgcgctgtcgctggacagcctctgtcactggacagcctctgtcacctccctcttgctgcttccgacctcccagtacacctccatttgtgttctctgtcatctgcattgtgcaatagggaattaaggtggcacttgctttttcagaacagcggcggcacttagtagagaagcttatgggtcctagggtgataggtacagaatgagaaagaaagcacatgaagagagggagagaattgttacttttctgatattcctcctacagtgcacatataacgtatatatacacatgtagggcacaaacgacaaaacatgaaaacatgcaatatacgtgaatacacatagtgctataacccactaagaaattgcaggtatattcctgacaacctacaacacacacgtactatcgggatttgcaaatcctactgatttgcaaatcctttatttcaatccgcgcctattacacgtaatcttggaaagctcaggagctgatgttctccttttgggccttttgttcttggtctgagtcgtgcttggcctatcattcccggcttcataaaaaatcaccttgtcctcaaggtgataggcctccttcaaggtggtccagtcctcccatgatgtgtcgtccacatgaagaccctgccattgcactagcacctgcaagcgagagttgtctgcggagccctcccatcgagtacttaaaatggccagtggcatgattactggttggttatccaaggttgacggtggcagcgaaagtggcttgggtgtggctgaagtatcgtgaaggaagggtttaaggagagagcagtggaaaaccggatgaatacgagaaccttccggtaagcagagtttgtaggccacaggaccaatacgttcgataacctagaatgggctgtaaaaacgtttggcaagcttgttttggctggttcccgtcactgaagattgacggtgaggtcaaagcttgaccattatgttatcaccaaccttgaagtgaacctccctgcgatgcatatcggcgaaatgcttcatgcgctcctgagctttgagtagttgcttttgtaagctagcaaacatggcatccttggagcacaattagttatccacgacatcaactggggatgagcttggaatatattggagaattgtgggaggtttctttccgaaagtgacctcaaacggtgaaatacccgtgcttgtgttacgggaggtattgtatgacccctccacccaaggtaggaatttgccccatgtcgcgggtcgtttatgaacaaaggctctctggtactactcgatgatacgattcatgacctttgtttgaccgtcaaattgggggtgataagcaaagcttagccacaattttgttcctgagagtttgaatagttcctgctgaaacttgctgatgaagaaaggatcctgatcagagaccaaactcttaggcataccatggtgtttggctaagatatccaaaaagagagtggcaacttggtaagcgaaatatttcattggaaggatacccggatggatccccttcgagaatcaatcaacaatgaccggtacagtggtgtttccccggtacggtggtaacctgacgataaggtcgagagataatcctcccaaggtctgtgcgaaattggaagtggttccaagagccctgctatttttttagtttcgtatttggttgcctgacaatcaacacactgcaccataaatttatgaacatccttgtggattgaattccaatttaaattctcctataatattgacaatgtcttagtaatccccatatgtccgcccgtaggtgttgagtggaattcttgctgcaaaagatggataaattttaagctattgggtaaccaaatacaacccttcttcagaattaagccattgttgtaattgtactccgagtgactcaagggctcgtcttgcaacgatttttgaagagccacaaactcttggtgggcagctagttcatttttaagctcggtcaagaacgtgaagtgcggaattgataataaaaacaccatgcctgtgggtgtcttcagagtatgagaaagtgcgtccgccactatattcgaactatccgagcgatattggatggtgaaatcatagcccatcaatttggttaaatacttatgctgttctggggtttgcacaatttgactcattagctccttaaggcttctatggtcagtgagaataacaaaggaatgaccaagcaagtactgtctccattttttgacagcaatcgtgatcgcatggttcacgaacataagttgaagcttgttgaagccttggataaaactgtttactaaagaatgcaattgggtgagtttgctgagatagcacgacacccattccagaacctaaagcatctgtttccaagtaaagggtaaggtgaaatccggtaagcgaagaactggggcagtacttacgatggatttcaaggtttggaaggcatcctgtgtttcaagtgaccattcgaagtgtttcgggttaagagatgaaccaaaggggctgctatcgcagcatttcccttgatgaatcgtctatagaaccccataaggcccaagaatccttgaagggtgcgaaatgaagtgggttggggccattgctgcacggcgagcaccgtttcgagcactggttgaactccagccccggacacgacatgtcccaaatattcaatttgctgttgggccaggcaacatttagataatttgaggaaaaatcgaccatccttcgggacctgcaaggcacaatccaaatgtcgcaaatggtcttcaaaggacttgctgtaaatcaatatatcatcgaagaagacgataatgaatttacacaagtagggttgaaacgttgtgttcatcagtgcctgaaacgaggagggggcattgcacaagccaaagggtataacacgaaattcataatgcccttgatgagtgtggaagactgttttatgaatgtcttcttcattcaccaaaatttgatgatatccctgcaacaaatccagcttcgtaaaccagctagcgccccccagttcatctaatagttcatcaatcatgggtatagggaatcgatctttaatggtaatagcattcaacgctttatagtttatgcaaaactgccaagtgccgttgcgttttttcaccagaaggactggtgatgagaaaggactttgactaggtcaaatgatgctgctacacagcatggtctcctcctaagattcgatttcctattactgaaaaatgtgggtacctataaggttgcacattgaccggggttaagtggggaagaaggttaatggtgaggtttgtttcgtggtttggaggtagggtagtgggtgtttggagaaggaaagtgtaacggtgaaggatggactctatttctggtgagtggttgttaagtgtggagatttgggtagaagggggctcaggtgtggtgaggcgaatgtggaagagggtgctgacaccattggtttgaaccatgcgctgtagctggtggtggttgacactgaatgttagcttcacgtttcccctgtagctcaacaacatgaccatgctgcatgaacttcatagtcaagtcagcataatcggtcaaaacgggtcccaaggatttaagccattgaactccaaggactaggtccgtccctcctaatggcagcacatgaaagttgactgtgaaacgatgcccttgaatgtggaggatgacatctcgacaaacctgcaaacagtcaatttcactatcattgccaaccatcacctgcaacatttgagtgggttgcactcgtaagcccaaagtagtgaccaagcgttcctggagaaaattatgagtacttctgctgtcaatcagcaccacaacattactgtcgtagatggttcccacaaggcgtagagtttcaggagctaggtggccacaaatggcatgaaaactgatttgagcgggagatttatcatcttgatctgttgcttcttgaacaaattcttcatgagggaggtcgttcgggtccagctcgtcttcatcagcgatgaagagaaacaactttgaagaacaacaatggcctcgggtgaatttctcgtcacaattaaaacacaatcctttttctccgtgcaatgtaagttcctctggggacaagcgtttatatggaactggtggtttaggtggggtaggcaataaaaggggaggtggtagggaggaagaggtagggatgggtcacggaaagttagaaggttgggtgtacgaacgagggcgaaatggcttgtgcaactcacagaacttgtcttcttgcagacgagtcagtgcggcagcatgaatcatggaaagaggttggagtgcttgtacttcacaatgaatctctggggataggccgaagataaaacaactcaacaaaaatgagggtggaaggcctaggatccggttcgcctacgcttcgaactcggttaggtagtcattcaccgagccttgctgggcaagcttaaacaaagaccccgtaggatcctcgtagtgagacgacgcgaagcccgcttcaagggcctataacagacctgaccaggaagtaatctgtccgttgcaggtcatccattgataccacgcaagtgcaggcccatccatgtaaaaggagacaatcgtcagccatttgttttttggagttgcatgataataaaaaaattgattgattttaaagagccagccaactgggtccgtgccattgaaacggggtatttcaagtttcaggcgatatggtgtgatcgtcggagacggagatggagggtgggccgaagaagcaggtgagtgctgcgtcgactccattactgcaaacttttgacaaagatcatcaagtttagctgacatggaaagctggtttgtggtgagttttgctatggcatcttccagcctatcaagatttgattttgagtgtgtggagtcggccatgagagttcaggatgagagcaccaattgataggtacaaaatgaggaagaaagcacaggaagagagagagagaattgttacttctctgatattcctcctacagtgcacatgtaacatatatatacacatgtagggcacaaacgacaaaacatgaaaacatgcaatatacgtgaatacacgtagtgctataacccactaatgatattactgttatattcccgacaacctacagcacacacgtactattgggatttgcaaatcctactgttttgcaaatcctttatttcaatcggcacctattacacgtaatcttggaaacgcttaggagctgatgttctccttttgggcctttcgttcttggcctgagtcatgcttggcctatcatagggtttcatgggaattgtgccccatatgtttctctctgttttctcttcttttggtttggtttgttgggcctcgacttgagttcaattcagcttctttttttttttttttttttttttgcgtaaaacataacatatactataataaactgaagaataacagtaataaaaaatattagtattaaaaatataataaactatttaaagcatgacatataacataatataataactaaataataataaactaaaaaaagcatataatgtgatataataaattaaatgatagtaataaaaaaatgtattatatataagtattctaggcaggggactgtaggatcttatgatctgagttacaggttttcatccccttcttgttcctcttgattttaacaaccttgggtaattgagacttggttacaaatggtagtgctcctgctgtaactaaatatcaatgttaatatatatttctttatacctgaagtaattcctcatgaagataaaagaggctactaattgctctttattattggatttttccttctctacttgcagttctactgaagcttatttgctctagtattttatatctaattattgtgtgtattcattaagtgcatttcctatactgtgaaataaggtgtatgatttttaattgttccagtaaaattatttccaaaattaatgaattattttttcagttgttcatagattgtcttctagatttatataggttcaatgtattttggtgtcaaaatcatgtcttgggttgcagttccctagttttctccaagaaggttgctaggttattataagacttggctaatttaaatgtttatagtgtatactagcagaataagttcttcattttgatcttttattaattttagcatttagctctactgctgggatgaagaactggataattactttcacatttttgtaattacttatgaatcgtttattgctatactgtgaatctttgcttgtatataaggagaacatgtcatcttgtaacacaacagctgaaagatggccattaggctcaagtaatttatgttgccaaaatgtgctttatttctgttggatttccatccatcctgacttcccattgggtttcactacgtacatttgtttcatgtgggctttttgcagcatcttgtaggtttgttcctaaattacaatcaagctagattggtacttcaaatattgttgtggatctgtaaaagttcatatagaaatttattgttatttgtcatgttctgataattttctttatgtttgccatttgcattgaaagctggttgattggaaatatttctagtctgtgtttgggaggatgcactttgggattggaaaatggatgcctctgcactttcaattttagcaattgactcttggaattttgaaaaatatatcattagccacttctatctaattttttggtgaattcatatttgaatcgtgtcatgaactaaatatccaaaaagtattagctgtttgggtgaagttcttacacatccatagttaataacaaagcacagtggctgacctccaaaatgctataggggaatagcacatagtggggatgaccagttttatatacttcatcttccattttgcccccttgtacaattcccatccccttcctagacctagagctagcagcatcttttttcttccttccacttgttttctgcgtagtgttagttgaaggctaaccagattcaaatgcatcagcaataggtctctaagttaaattatcaccatcaaaaaccaattcattttcagtatgttctccattttcacccatttctcctatcaacctcacattacaatcattaatgatatcatccaggacaatgggatcaatcatatctcgaatttcataatgatctttcaaagtccaattatacttcacaaaaaccaaatcttgcaacttttggtgcttaagtctgcttctcttagaatgaatctaagaaaacactctgcaatagtattgtgtgtcggccaaagactgctccagcccccatccccactgtgatagtgctgctatcacctgttattgataaatatcaacatgccttaaattatagtcagtgcacagggcctgtactatcttgtttttgaaatttaactttttatttatttagaagaatgtgtaatgaagtttgggctgtagactgcatagtcacaggtggcatgataaatatgtcatgaaccaattattctagaaacttaaattgtagggtgaaggctcatgtatggttgtaagtataacaaactgcttgtaacttgaaatgttttcgacaagaaaactttccattccttgttacaaatagtcatgcttaatgttacgaactatgtttttttagttatttggcatttaagtccttttcctttttatgattttatatccgtacatttatcagtatatttatattcagttggtccatatttggacttgcttccattgtctctttgttggcgtgccccttttttcaatacttaaataaaataaaatttggtaaaaattagtcaattctttgcgtacaaattagttattgcatcttcccctcccccccttttcataaaaattagttaaaggagggttggcaaaattaacgtttaggggtctgtttgcaatccccctaaagttaaaggagctccggtgctttacaattatttggtcctcaaacagtccatattccacccccattcttcacactgttccattcccttgaaatctttccagcactgattctcttgttcattgtcctgcattttctgtactccttagttataaacttaatgtgaaggagttgcttcaaaactgtattcctaagtttcaatggatcaggcttttatgatatatttttgtgaatggtaaaattgttgacttttgtaataactgctttggaagtcatttctagggtgatttttaattggttggcagtgtaaaaaaactttacactgccagtgcatgaaaattaatctctttatctttaaagaagagactcaaacgagtggtcaatgatacctacagaaatattttttctgagataaaatcataatataaatattgctggtgaaatattttatcagatttagaacagaccctattctattcttttgttcattttgcttcaataagcctttttatcatagactatacaataacatgaatattgttggttcgatatattttattgtagaatgagacagacaccactatactttacatttttttttttattgtgctttgaaagttttacatgtgtttttaccatacctgttggtcacatctgagcagttgattttaggtgcaaatggttactccctttactacgtatgaaaaaatttatatactttccttgaaactctagtgtgacttgaatcatatttgtctttcattatcagcgttgttattattttgggttagtcttggattttacatctcttccctattttgattgttcaatttactatcccgtatagttttggtattacaattaatcaatgagttgatattcatttgcagatagtcaagttgatgcagcacaagttttcaacactgccaatttacaaagagcagtagtagaattgcttgctatacgacggtgtcaggaaatcaaaattcaaatataaagaaatgtctattacgttattctggtttttatctaactgtcaatggctagtacacggtgctcctctggtgaggaaggtcaagaattgaagttcccatttctgcttaatcttgaagacttcagtagttttctcacttgttgatgccatttgtttgttctgtaattgttgatgtcttcctcagctcggcgaagcattttcaaatcacatttttgtaagcaataatagtgcaagctgtattaactctttcttcttttggagaacttgtttgtatatagtataatttcaaagcttgtaaaggttttataatagtgactggtatcggatgcaacattttaattaatttagaagcgggtaaattgggcatctggatattaagattactaggatatagccattgttgctaatgatcttgtatgaggaaaatcaaattatgatgaaatggacaatttggttgttatgaatttaacccaataatgtagtagaacaactatggtaaagaaattgtttgcactttgtatgtaga

SEQ ID NO: 220 - DNA, 3557 bp, Glycine max
  source 1..3557: mol_type = genomic DNA
aggattcttttgttttttttgttattattgtgttgttattattgtgagattttcaatatgtcacaaatgcatttatcacataaaatgatatttaagtatatataacaaataatttgatcaattatgtataattagacatatatttacaaaaataatatattaatctattatgttacctaacaaataaagaatataagtaaaattatgtatatattaattatttcaatatataaattttagcacaataaaataaaaaaatgcatacatataagcatgttaagcctgtattttcgctagtatttaataaaatgcatttaatgttagtccatcaatgtcttctatcaagatcctttagaacaatgatcagttagactcatttaaaaaaaaataatttgataattatttttatatttaaataaaataagtcaatgagtgctctaaaaatttttgtttttatttttcacaaattttctataagagtgtgtcttactcacaacctgatggactttaaatataaacatttactggaattcaaaccataattaaccaaaatgtgaaggtatacttctcgttatattgaatatttttaataataatattcaataaaatatatttaatgttcgtcaaccggtggcttctaaccagtgccagtgcccgtagaaaaattattagttgaattaatctaaaaaaaaatatatatcattttttatatttttattaaaaataggtcaatgagtgttctaaaaatgatttttatttttcacaaattttctatatgagtttgtctgactcgcaacagggttggactttgaatgtaaatgtttactccaatgaaattcaaatcataattaaccaatttgatgaactcttttcgttagattgaattttttcaataataatatttgataaaatacatttaatgttcgtcaaccattgctttagaacaaattttagttggattcatttaaaaaaataattttatatactaataaaaataggtcaatgagagtgctaaaaaaataattcttaaggagtacatatttcctctctgtttaatgccttgaaaagtgtagacgagtgctctaaaatgtgttaatcctggtcattcttttagtcctcctcccaaacaagcacgtaggagagagagactatgacatgagcaaccttccaagtttaactgagaggcaaggcttaagtgagttatcattaatccattttctgcgattttctcgagaaaagtgcgtccatttccaattccaaatgtacgtcactcgcttggccatctttcttagtagtagtaatttttgcaccattcccaccatcattttctgttgctcttctttttggcacacacactcctgagaggagagttcagtttcggttctattaattgtgatgatggattctgttctccccgatacttccactaatgccattgcctcttctacacccacttcacaccctcattcccaaccctcactcccacaaaccctcttagtccccaaacccgaacccttctgggatacccacatcgaaacctccgacgaactcgacctctactccgagttcaatcgcgtcactgagctctttcacttcgccttcggagccaccaacgttgtcgaccctttcggagccaccaatgttgcatgccccgaacagactccgctggttcctgttcctcaggagctcgattcagcggcccagcccgacccgaattcgccctccgaggacgtcttgcgagcgatcgttccggtaccgccggagcagcaggacggcgcggtggccaccgccaccgtgccgaggcggaagcagagccggcagaaggagctggtgagagtgatggatctgtctccgagggacgaggctcatttgcgcgagaccgtgaggaggacaaggctcatatacgactcgctgcgagtgttgacctccgtggaggaggagaagcgagtcgcctcagtggcagcggcggcggtggcagcagcagcagcagtgacaacactagagggctgtctgccggtggatggctccaccggcaagttgcggcgtctccggggagacctgcgggctgccagcctgatgagagagcgtggactgtggctgaaccgtgacaagaggatcgtcggggcgatccccggaattatggttggggatttgttcctttttcggatggagttgtgtgtggttggattgcacggtcagatacaggctggaatagattttcttcctgcaagcatgagttccactggagaacctattgctaccagtgtcattgtttctggtggctatgaggatgacatggatgatggtgaggttatagtttacactggccatggagggcaggagaagaattcctccaggcagatctctcatcagaagttggagtcagggaaccttgcattggagaggagtatgcattatggtgttgaggtaagggttatccgtgggatgaagtatgaggggagtgctgctgggtctggtaaggtgtatgtgtatgatggggtgtataggattgttgattgctggtttgatgtggggaggtcgggttttggggtttataagtttaagctttggaggattgaggggcaggctaagatgggtagtgctattttgaaggaagctaggaatgttaggaggagtgagctggatttgaatcccacatctgctgatatggctaacaggaaggagaatgttgcagttcggctttttaatgactttgatgatgatcggggtcctctttgctatgaatatcttgtgaggacttgttttccgaagtttgtgtttcatcagagtgggaaagctactggctgtgactgtgtggatggttgtggtgatggatgcttttgtgctatgaaaaatgggggtgagtttccttacactctgcaggggcatcttgtgagagggaagcctttgatttttgaatgtggcccattttgctcctgtcctcctcattgtcgcaatcgtgttgcgcagaaggggctgaaatataggttggaagtgtttaggtctaagcagacatcttggggagtaaggtccttggaccttattcaagctggttcttttatctgtgagtttgcaggggttgttttgaccagggagcaagctcaactcttaacaatgaatggtgattcannnnnnnnnnnnnnnnnnnnnnnnnnnnnnnnnnnnnnnnnnnnnnnnnnnnnnnnnnnnnnnnnnnnnnnnnnnnnnnnnnnnnnnnnnnnnnnnnnnntcattgatatatcctaatcggtttcggaaaggtgggccagaatggggggattgtctcagatatacccggattatgtgcgtccattgtatccgtcaatcctcctctagatatttctctggatgtgtcaacaatgaggaatgttgcttgctatatgagccatagttcaactccaaatgtctgggttcagtttgttctgcatgatcacaacaatttgatgttcccacaccttatgctatttgccatggaaaacatccctcccatgagagagctcagccttgattatggtgtagctgatgagtggacaggcaaactctctatatgtaactga

SEQ ID NO: 221 - DNA, 7901 bp, Glycine max
  source 1..7901: mol_type = genomic DNA
agatttcaatataataggagtttcacattttttttctctacttaatttaaatattttttgtcaattttattgaattccacttaacaaaactcaaatttgaattgaacaacagaagaaaaaaaatgttttgtattttaataaagtgaaaatattttatccattctttttctcagacactttttcttctttcgtccaaacacgtcagatgtacagagaaaaggtacgaggcttccctattgaaagttggaatggtacggaacgcagaatattctatactaccaaaaccggaaagtattgctttttactggatttggaataatataaaaaggaaaaacacatcatatatttatataaccatccattcatgataggtgaatttgaagagaaagaagacagataaaaaaaattatgaaagggaaaattgataaattttataaataataacatgatgctaaaatgagatataaaaataaataaaacgtatgtagtaatacatgattattattataaaattataaaaagaggtgtaggaatacagaacacatggcttgatggcacaatggagaggaagtggagaatcacgtctgcattctgcagcgccgcttacgcagcacgaatgactgatcgcatagttggtcattcagtgtttttcacgcgcctttcttggaatttggatgttactcgcgcgctgtgaccaaaaaacttctcaaggacgtaaatatcttttgacagcatgtgggaaaaacaaaagttctgcgttacaacttttttccttaaaaaattatcatttattgtactaatatttattatgttttggcctaaacatcttttgacacatgtaatatatttttgctcagtttattattcaaaaacaattttttattactcctaaatttttaaaattttacttttgatgtttatagttaatttttatccatcaaatgataatgtaataaaactaactgaggatttcatcataatcataataatattacatgttaacaaaatatcatatcattattttttttatacagataaaacttacgtagtattacatgattattattataaaataaaaaaaaatataaacacaacacaagaggttatagcaacccatggctaatttttattccaaaaatatttttaattaatagtaatttgtcactttctattgagtggtaatcttcaatactaatttttattgcatgagttgttaaaaatttaattttaattaaaaataatgttaaaactaactaaactattattgctcctaaattttgtttattttgtgattaaaaattaagacaatctttcttaatatgtgagactaatttcataggacagattctgcttgtcataggaccgatttcactccaccacctccttatttattggttactccttaatgtcggtttggctttgccatcgggcaaaagaaaattcccaccaattataaaatgtaatgctgattttaaggcatactatgcaataaccaaatttaaaaactagtaatattgtactgtaccactcttaaatagagatacgcaccttattattgttaattcaattgaagttactgacacaagtaatcattgatgttacgttcgaactcgaaaatttcgctgtaaattttcttacaagtatttatcttaagcctttaatgcgctcacctcaattcatttctacaaacggcgtatttatccataaaaacaaaataggagcaagaaaaaaattagattctaattttaaaattaatttttttaaaaaagataattattttctcttgatattttccttattttttcaccacactctacccagaaagggagtgcacgatattcagtaatcacccactctcactcattcgtaaagttttttctggattctactcatttgtatttgtatagtttactaccaactgcaaataaaaaaaagaaaaagatgacgacctttcttccattcgaaactgttaccttcgctgcaataccagcaatagtacgttgcctctccccgctcacgccaacaacacttcgtaataccaaacaaacattcccttcaatttctctttctctctcaaaaaatgtctcctcgcggtggctccaagcagcaaccagattcacgccgtcaagcgccaccgtccgcggcggcggcggtgccttctcctcccggaagaggacgcggccgtggacgcggagaatcctccgttcccgcgccttctctggtgaatgcaccatctgctcctcctccggcttccaccatcggcgttccgtccggcgccgcgccttttcgtgctgcgttgccacctccggcggtggaatctctcacttccgcggtcgaaaagcaacttacaatgcaaccttcggcgccgtcgtcgtcgaaggcggtgaggttcaaggaacggccagggttcggtcttgctggggagaaaatcaaagttcgagcgaatcattttcaagtccaagtcgccgaacaagatctatttcattatgacgttcgtaaactaaacctaactcatgcattttattcttaacgatttcatcgttttattgtttttagtttgttctgttttgattttctggttaaacgttagtgttgtttgtttgattttttacgtgtgcgattgagaagaaacacctagataatggttctgagagagtgtttattgtatgattaggtctctatcaatcctgagattacttcgaagaaggtttctagagatgttatgactttgcttgtgcaagcgcatcgtgaaaagattctcggaaatcgcataccagcctacgatgggggaaagagtcttttcaccgctggatccttgcccttcgaatctaaggattttgtgatcgtgctaaaagacgacgatgaaccaggctcgtcgtcttcttcctctcctactaggtgcttttttttaaagcgtgtctttgatatttttgtcctcgtcatcattattattattattattattatttgatcaatcgctggttattttttgtttctcttaggaaaaaacgtgaacgcgagtatagagtcaccatcaggcttgcttccagaactgacattcaccacctcagtcagtttctcaggcgccgtcagttggattgtccttatgagactatccaggctcttgatgttgttctgcgtgctacaccgtctgaaaggtagggtatatgctatttttaatattattgatgcttgttgtttggttggtttgattttgatttgttgttttctgtgtcttactgacttttttttctttctttttttttttgtaaaatgtaggttcgttgttgtgggaagatcgttcttctcaccttctttggggaaacctggatcgcttggtagcggaacggagtactggaggggctattaccagagccttcgcccaactcagatgggcctgtctcttaacattagttggttttacttctcttattgttaattgttgtttgttaatacatctttgagtaccttgaataatgctgtctttgtcaactgattatacttgtgttgcagatgtgtcggcgagggctttttatgagcctattcctgtgattgatttcattgaaagtcattttagggccaatccttccaggcctttgcctgatcaggatcgaatcaaggtatttgtgttagattttatgttgttgattgttcatatttaggatacattttgcttatgcatgcctgctaattagttctgtgaaaatgaacaagggttggttggataagtaaatgagcgaactagcttttctatctttcagcttaagagagtactgagaggagtgaaggtagaagtgactcatggaaagaatcttagacgttacaagatcactggagtcacaaaagaacaactcagaaagttaatgtgagcaagttatgctattgcttccattttaattgttgtttttcctatttagattctcaaggtggaggaaaaaacattcacatgggagtaaaatgaatagtgttttttttctctggtctgaaattgaattgtcgcccttctttcctttatcataaattaattagttcatttctatatggcaaaaagtcttctctgttattatacttgatacttgattgcatgtaaaatgcacaggctcgtaatttgattaatctatttattggatgtgttattgtttggtatctttaaggtttactcttgatgacaatagaacaaaaagctcagttgttcaatattttcatgagaaatacaatattgtgttgaagcatacgcttcttcctgctcttcaagctggtagtgacattaaaccaatttttctgcctatggaggtttatctctgccccactcttgctatttatatttatgataaacatcaactagttatttttgcctaagccctgattacgactcgttgttttctattgtagctttgtcaaattgtggctggacaaagatatacaaagagattgaatgaggagcaagtaactaatcttttaagggcatcttgtcagcgtcctcgtgatagagaaaactctatcagacaggtaccttttgtaaagtagtattaatgcacgaatgtatgttgtgtatttgtcttgagactaacattttgctatttgacaggtggtgaggcaaagtaatttcagcacagacaaatttgtgagtcactttggaattcaagtgagggaggatccagcattgcttgatgctcgagttcttcctgcaccaatggtatacatatgattttccttgacataatttgacaagttttattttataacatctaatttttttttgttactgcagctaaaatatcatgacacaggtagagaatcaagtgttgaacccaaaatgggccaatggaatatgattgataaggtgaatctttgaatgtacttttttgtgttgatagaaactaaacaaatgttttaaaaatactgctgtggcctctttgaatgacttaggctattgaagagtatgatttttcttagataaatgatacttgtgtgttctttttatgaaactaagtaatctaataatgatttttatgtggcattcaggttcattcttaaaatatatgttaaaagttattttatctttgtttaagttgtcaatgttctagtgaagggatctgtcatatttatgttagatatgggtagtgtgctatataatgtagtgaatataggaaattataatttattttcaattacagtattgtaaatcacttagttttattatataataatttgtttacagcagaacaaagatttagtcccttgttatattttgtagaaaatgtttaatgctggtgttgtggaacattggacttgcctcaacttttctggaaaaataaacagagagtttccaagtgcattttgtcataagttggccagaatgtgtagtaacaagggcatggtatgatgctagcttgtgtcatttgttagtgtggttatcttatggctgcattgttgagaaatttctttctgtttggaatttataccagcgttttaattcaaagcctttactgcccataacatctgctcaaagtagtcaaatagagagtgctcttgtaaatttgcataagcagtctattacaagactagcaaaccaaggaagactccaattgttgatcataattttgccagatttcgaggggtcctatggtaagtgtcttctatgttcaaactgaacactctaatttgattttatcatgttaaattgttcttgttttggcagaaaaaataaagcgtatttgtgaaactgagctaggaatagtgtctcagtgttgtcagccgaggcatgtttgccagatgaagccacaatatcttgaaaatgtggccctcaagataaatgtgaaggttgaagttatccaataataactctttgtaaactttttggttgctttttgaagttagccaataaataactctttgtttcagtaatttttttggtttcttttaaatattaaacctgtcaatgtttatataggttggtggcagtaacacagtattgaatgatgcaattgctagaataattcctcgtgtgtctgacagacctacattaatcttgggtgcggatgtaacacatccacagccaggggaagattctagtccttctattgctgcagtaacttctctttccagccctatttgcagttttttttattgggtgccatttttattctgtttaattgttgaatgttggtataggtagttgcatctatggattggccttatgtaacaaggtacagaggagttgtttctgctcagactcaccgtgaagaaatcatccaagatctttataatacatgtgaagatcctgtgaaggggaaggtgcattcgggaattatcaggtcctggggacaggggattgatgttgtattgccacttgtaatagaggaatccaattgattttcttgcctctttttcagggagttacttcgcgctttccgtttgtctactaatcagaagccagagaggattatattctacaggttggattttttttaaacttaaatttatatatttttctttttatttacatatttaatataataattgtttttcaatttcaatttgtgctcaacagggatggagtaagtgagggccaattcagccaggttttgctgtacgagatggatgcaatacggcgggtatgaaaaactgctttactgctcttcttgttcatgatatattttccatcttcacgaatgttgtgtgttttatgttttcttgtttcaggcttgtgcttcactacaagaaggctatttaccccgtgttacttttgtggtggtccaaaaacgacaccacacaaggttatttcctgtagatcatggaagtcatgatcagacaaataaaagtggaaatataatgccaggtttttcatctcttgtatttgtatttggcggtattgcatttcacacgtccacccctctctcctccttaaatttattgatttagtgtactttattgttaaagggactgtcgtagacacacacatatgccaccctcgggagtttgatttttacctcaacagtcatgctggaatgcaagtaatacagtactctaagatggattaacttcattatgctattttattgttccaagggcatttgacaggttctctattttgactgtactattttttttttcagggaactagtcgaccaacacattatcatgtgctgttcgatgaaaacaacttcactgctgacgggttgcaaatgtttactaataatttgtgttatacgtaattctccttccacactgctgttttttgctattattattactctactactattatcaatctctagaaatatgtattttaatttttcaggtatgcaaggtgtactcgatcagtctcaataggtttgacacttaacatttttttattccacatatatcttgattatacatttcatccggagttgattttgtttgcagttccacctgtgtattatgcacatttggctgccttcagggctcgctgttacattgaagttgcaacatcagattctggttctgcaagtggaggccgggctgctaactgtgaggttagattgccttcggttaaggaaaatgtgaaagatgtgatgtttttctgttaagcctgtgagatgcttttgtgaagatggggggatattgatatgaggttatgtatgattttgggctttatagagctactttataaacattttgctatcttttttttttttttttaatttgttgctgctacattcaaagttcagttaatatacaaagttcagttagctttcggttcgaatatatcttggcctcattcctagcatcagtagagttgtagctctcacctgaatacttgaatggttttgttgagacacaattggagcaatttttgcagcctggattatggatgtggatttagtcttaatatagtgatgcatttgaagtttcag

SEQ ID NO: 222 - DNA, 7822 bp, Glycine max
  source 1..7822: mol_type = genomic DNA
agtattagcttttataaaatatacaatttcatgttaaaaaacaaaatatttaagtttttataaatttaaaagaataaattggataaaaataggattaatttattttattttatcttttataattttttatattctttttatacaaaaatttattttgtgaagtaacatttatttttctatggagcaaaacactaattatttagtatatttaagtaaaaagatttacttagtgaaacaattgatgacaatatagatccatccatgattacattgattcttgagtgtcttaatactagtttggctttttttttttttactgttggttccacttcatcttctagcaaaataaaatgttcgccaattattaaatgtaatgctaattttaaggcataagtagcaataaccaaattttatactactactcttaaatagagaaacacaccttatttaaattttcattaattaaatagttaatgttaatcattggaattccaaaattgtataaattttcttccagtaataatttatttctgaaaggtacatttatagctaaccccatattcataacattttactagtatttttttagtaatttcaacctatccaatattatacctatatttttagtgtgctaattttggagagagattttttattcaaaaattactttataattaaggaatctaaatacattagtaattttggagtaatttttttttacaacaatcactaattaaattaattttaaataatattaatttttaaaaacaatcatcatcaaagttaatctttttatgtataatgttccatattttcaaagataattagtatatttttaattatttttatactaaataataaggaaagagtattaatattattattatttagcacatttaatattttagaatatttataatcattaatggtaatagatttacaaaactcataattaaaaaaaaatcatttttttatttatcacattaaatgcccagcaattacttgttattttcattaccgtcaataaattcgttttctttctaacattctgaaagactactttatttattactcatgtgtttatataggataaaaacaaaatactagtagttagaagaaaaaaattctaaatttttaattttacaagtaattttttatcttttatttctttttttttgaaaagataatttattcccatacacttttatcaaaatacagcatatacataaatattactaccattttgaataattataattataatcattcaataattttttttattttatcatattactattattttattattatcttatcatatattccttctattttcaccacactactcaagatggagtgcaggataatcagtaatcaccacttatttgaaaactactaattgcaaataaaaaaatacaaaaaagaaaaaaaaaaggacaacttttaaaattcatttacctgttggtcttctttttctcctttcattgcaagttacattggctgttggtcttctttttctacttataaggtcactactctctccccactcacgcataccacacttccttccctcctagtcaaaccaacaaatattctttctctcaaatcctctttcttactctaaaatgtctcgtcgcggtggctctaaacaacaaccagattcacgccatccagcaccaccgtctgcggcgccttctcccgccggaagaggacgcggccgtggccgcggagaattctcctcagttcccgctccttctccggtgaatgcaccatccgctcctcctccggcttccaccatcggcgttccttccggcgccgcacctgttcgtgccgcgtctccgtctccggcggcagaatctctcacttccgctgtcgaaaagcaacttacattgcaaccgtcggcgccttcgtcgacgaaggcggtgaggttcagtgaacggccagggttcggtcttgtagggaagaaaatcaaagttcgagcgaatcatttccaagtcaaagtcgctgaacaagatctatttcattatgacgttcgtaatctcaaccaccgaactcatgcatttcattctaacgatctcatcattttattttgactttgattttctggtttgaatgttagtgtagtattgtttgttttgacttttttaccggtgcgattgagaagaaacactgagataatgtttctgaaagagtttattgtatgatcaggtctctatcaatccggagattaattcgaagaaggtttgcagagatgttatgactctgcttgttcaagcgcaccgtgaaaagtttcttggaaatcgcataccggcctacgatgggcgaaagagtcttttcaccgccggacccttgcccttcgaatcgaaggattttgtgatcgtgctgaaggatgaagatgaaccaggctcgtcttcttccgcgcctgctaggtgttttattttttaaaacctgtcattaatgtttatgtttttcttgtcgttagctattattagtggtaataataatatttgattgattgctggttatttgtttctcttggaattagaaaaaaacgtgaacgcgagtttagggtcaccatcaggtttgcttccaggactgaccttcaccatctcgggcagtttctcaggcgtcgtcagttggattgtccttatgaaactattcaggctcttgatgttgttctgcgtgctactccatctgaaaggttgggtttatgcttcttttttttttattcatgcgtggtcgttgtttggttcgttcgattctgatttgatttgtggttttcggtgttttactgacttttgttgttgctgttgtcaaatgtaggttcgatgtggtgggaagatcgtttttctcgccttttttggggaaacctggaacgcttggtagcggaacggagtattggaggggctattaccagagccttcgtccaactcagatgggcctgtctctaaatattggttggcttttttacttctctaaatatattttgatttctgtttatatatgtttaattgttaatacttctttgagtgctttgaataatgctgtctttgtccactgaatcatacttgtgttgcagatgtgtcagcaagggcgttttatgaagctattcctgtgattgatttcattcaaatccattttaggctcaatccttccaagcctctgcctgatcaggatcgaatcaaggtatttgtattgggctaccttttgcttatgcatgcctgctaatgagttccgtgaaaatgaacaagggggttgtataagaaaatgaacaatctatgtactgtagattatctggtttatccttttgtaaaggttttcattataattttttctctattgccattcagaaactgtatgcaaccattaatgggaatcatcatgtctttcttttttgctttctaatttgcagcttaagagagcattgagaggaatcaaggtagaagttaatcacggaaagaatcttagacgttacaagatcactggagtcacaaaagaaccactcagagagttaatgtgagcaagttatgctattgtttcccttctttcctttatcataaattaattcttttttaaatggcaaaaaggcttttgcacattagttttgtttggttcgtttcttgaattaataaatttaaaaattcttttctgttgttatacttgacttgattgcatgtaaaatgctcaggatcataatttgattaatctaactattggattttgttctttggtatcttttaggtttactcttgatgacaaaagaacaaaaagctcagttgttcaatattttcatgagaaatacaatattgtgttgaagcatacacatcttcctgctcttcaagctggcagtgacagtaaaccaatttttttgcctgttgaggtttgtctctattccactttatctttttatatttataataattgtaaacagcaactagttgtttttgtttagacttgaatatgattatttatttttattttttattgcagctttgtcaaattgttgctggacagagatatacaaagagattgaatgaggagcaagtaactaatcttttaagggcaacttgtcagcgtcctcatgatagagaaaactctatcaaacaggtaccttcgtaaagtattaatgtactaatgtatgttatgtatttgtctcatgaccaacattttgccatttgacaggttgtgaagcaaagtaatttcagcacagacaaatttgtgtgtcactttggaattcaagtgaaggaggaaccagcattgcttgatgctcgggttttgcctcccccaatggtatacatattattatgcttgaaataatttgacaatttttatttataatatctaaatgtcttttgttactgcagctaaaatatcatggcacaggtagagaatcatgtgttcaacccagaacaggtcaatggaatatgattgataaggtgaatctttgaatgcatttttttgtttttaaataaactaatacaaacgttttaaaaatactgcagtggcctctttgaatgaccaagtctattgaagagtattatttatcttagaaaatgtggtacttgtgtgttcttattatgttgctaagtaatctaataatgatttttatgtgacattcatgttcaatcttaaaatttatgttaagttattttatcatttgtattgtcaatgttcaggtgaatggacctgtcatatatatgatagatatgggtggtgtaatataatgtagtaaaaacagtgaattattagaattaaattaatttttaattagagtattgtaggccacttagttctattatataattaattatttgtttgcagcagaacaaagatttagtcccttgttatattttgtagaaaatggttaatggtggcgctgtgcagcattggacttgcctcaacttttctggaaaaacaaaccgaggtttggcagcttcattttgtcaagagttggccaaaatgtgtaataacaagggcatggtaagctgttagtatgagccatttgttagtgtgttattttatggttacattattgataattttcttttttgtttggattttatgccagcgttttaacttggatcctttgctgcccataacatctgttcatagtagtcaagtagagagtgctcttgggaatgtgcataagcaggctattgcaaaactagcaaacgaaggaagactcgaattattgatcataattttgcctgatttgaagggatcctatggttagtgccttctatattcaaactgaacaccctaatttgattttatcatgttaaatctctcgttttggcagggaaaataaagcgtatttgtgaaactgagttagggatagtatctcagtgttgtcttccgaggcatgtttaccagatgaagccacaatatcttgaaaatgtggccctcaagataaatgtgaaggttgaagttatccaataaataactttgttttggtattttttttttgttttcttttaaatattaaacctgtcattgtttatataggttggtggcagtaacacagtattgaatgatgcatttactagaagaattcctcacgtgtctgacttaccaacaataatcttgggtgcagatgtaacacatccacagccaggggaagattatagtccttctattgctgcagtaatttcccttttcagcactatttgcagtttttttgattgggtaccatttttaatttgtttaattgttgaatgttggtataggtagttgcatcaatggattggccttatgtaacaaagtacagaggagttgtttctgctcaaactcaccgtgaagaaatcatccaagatctttataatacacatgaagatcctgtgaggggaaagacacattcgggaattatcaggtactggggacacgggattgatgtggtatttctgctcagactcaccgtgaagaaatcatccaattgcttttcttgcctctgttttttcagggaattacttcgtgctttccgtttatcaactaagactaagccagagaggattatattctacaggttggatttggttttaactgaattgttctttttattttacattttaatttaaaatttatttttcaattgctcaacagagatggagtaagtgagggccaattcagccaggttttgctgtacgagatggatgcaatacgacgcgtatgaagaactgccttactgctcttcttgttcaggatttatttattttccatgttcatgaatattgctttgatatttcttgttttaggcttgtgcctcactacaagaagactatatgccccgtgttacttttgtggtggtccagaaaagacaccacacaaggttatttcctgcagaacacggaagtcgtgatcagacagataaaagtggaaatatattgccaggttttgtatctctcttgtatttggctgtattgcatttcacatgccccccaccccatctaaaattattaattttgtgtactttattgttaaagggactgtcgtggacactcaaatatgccaccctcgggagtttgatttttacctcaacagtcatgctggaatacaagtaatacagtactctaagatggatcaactttagtatgctattttattcttcctaaggcatttgacaggttctctattttgattctgctatttatgtttttgcagggaactagtcgaccaacacattatcatgtgctgttcgatgaaataacttcactgctgacgagttgcaaatgcttacaaataacttgacttatacgtaattctccttctgcactgctgttttttgctattattatcactaattgccattattatttctctactactattatcaatctaaaaaataagtattttattttcaggtatgcaaggtgtactcgatcagtctcaataggtttcacactcaaatttttttctattccatatatgatcgtgcacatattatcataatttcattcggagtttattctatttttgcagttccgcctgcatattatgcacatttggctgccttcagggctcgctattacatggaaggtgaaacatcagattctggttctgcaagtggaggccggactgctaactttgaggttaaattgccttcggttaaggaaaatgtgaaagatgtgatgttcttctgttgaaggctgtggtatgcttttgtgaagatgggtttgcttttatgagatgctttttgtgaagattggggtggtgggggtattgatatgagattaagtttgtttttgggctttatagttttttataaacattttgctatctttttcttaattttagttgctgctacatgcaaagttcagttatatacaaagttcagttagcttttcggtccaaatatcttggcgtcgttcctagtatcattagagttgcaattttttgcaggctggatgacggatgggaatttaatctttactataatcatgcatttgaagtttcagatagtttacaacttaaacaacattttagcgaagaattgtaaggaataagcggtaaacagagcgttgtgggtagaaaagttgagcaataggaaattatggtcaacttgtaggaaaggcaatgttccgtcagcttgttatattaatttatttaaatagtaattattagttatgttataattataaaatgaagtttaaagttgtagttctaataaaaaaataatatatgatgtagacgatgaaggacaaggtgacaaaaatgcaaacgcgttcaacttttaagactacatttaatcttctttaaatagaagatgatattgatttgtacttttgttatgatcgtcatttggctatttaattggtacacttgt

SEQ ID NO: 223 - DNA, 10496 bp, Glycine max
  source 1..10496: mol_type = genomic DNA
tatgatatcaattaataaaatttatatgatatcaatttgattaattaaaattatatatataaaagaatttggaactccttcactcagggtcactgcatatccaatggagggttagtgagtgttgttgacttcacattgacgatcctttttttttcctgtctgtttgcttccaatttctcataccttcaatcttcaatcttgggttagtctcagtttcttcattcttttgctcattttttcacatggtgggtgttcatgatcacttcatcatgtttatacccacagaaaatttatctttcacgtctggtttattgttaccgtttgatgtaatgaacaaagaaaactacttattggggttgctagtatggaagaattctgtgtctttctttgacaaagatgctgcctttctgtcaagtttgcctctttttttgtttacgattatactttttttttaatttcatgtgtgatttcttgttattgtttgatgcattgggcaaagaaaatcacttaatggttgctggtgtggaagaattctgtctttctttgacagagatgttgcatttctgtcaagtttgcatttttattttgttttttttatgatcatatctttttcttttttttttgtattttagaagattggagaacagcattgattgagttttaccacacgatcgtagagcttctgatatttttcgaagaggtgagcacatatgaatatttttatgtctaacaattactttgttgggcaggtttttacgaactaaatgggtttttctttccatggtttctttgactaggacgtctttttgggaagaaaatgtaaacgtaaatcacattttgggtggaaggaagagtgagatatcagaataaaaaaaaaaagagagagacggtagagagataaaagtggtagatgtgatagttgtcgtatgattatcaaaatccatcttcttcatggtctcgtgttttgtttatgaattttatcagaagttatttttgttagaggtgttaggaatttttacctttttaagggtcagtttggaaatagagtagaactgagccggggggggggggggggggagaagggtgtgtgtgaaaagttcttggatcatttattttgtaattcacaaaagtaaagaaaaaaaaaatccatcgattagttttgttattaagactgaactcaaaatttatcaattttacatttataccgtgtacaaaaaaggtttaattgatttctatcttcctttgaatttacttctttgtccaaatggctgacagcaaagggttcttgcaatgtttgttgatcctatatagcttgtttgttagtttttaaccaacttttttatgattgaatccacatcacgaactacaactagggctctattgctgcttcttattttgaaaaatgaggtagcataatttactagatatcaagaagaaatgtaatgctaaggtttgacagttttgtgtataccatagactttgtttaatcttctttttgtgtaatttctgtagctttaaattctttgaattttactcctttatacttattgatagcagctggaggacaattaaagttgctgacattgtaatccatcgattatgtagttcctgagataagtggaagctgcctttacatatttttatgaatgaaccatctgtattttgaatctgaatattttcctgaatttatgatctaactgacatgttacattcaaagcaaaggtttctagaaaatgcaggctaaaggttgaacaagttcttgacatctttttttattttcttctttatttttagttcttttgggcaatcagtttatgcaagggaaaattcattttctcttgtggaacattttcccttgaatgttatttaatgtgaaacaaatgaaatagtattaggtattatgatgctaggctacaatcttctattgacaataatttctcaatgttttatcccagctgccacaaccttcctacttatataaataattggaggtgggactcttagcatagattactatgtaactagaattagttttgttggttaatctctatgtagccagagttaatgagttagttactcttgtaactaaccatataaccaactgatataactaactttgtaagctgattcattctatgcaattcattgcttccttcatctctttttctctctaacttcctctgcaagctttgcattcattcattcatggcagacatgaaatttatgagggacttcgataagtagtgctgagttgctaagagttgttttctcttttttctcttttgttttttttatgtctagacataatctaggcttgacaaaaaaggaaggtccagaaatttgttgagaggtattatgcattcttcaaatgaatcaaattgttaaaatacttttaggaaattcagtagaagtatacaattatggtatgtttggaaaaccattggaatgcacttttaagtccgttcacactttccaagagacaaaacatagatgctagattttgtttctccaggtgaaggttggtttccgttgtgatgactgtgaaacagacccactagtatttatctatgtagattctattttgtatctaaagttgtctgtccctgcaaatttgtgttacaattatttcaactgtttgatatatttgctgcttttgaaagatataagggataactactattcttctggcaccataaatatgttttgttatatcaatgtgcctacaaagtttttctgaatatggtttgaccatatggacgctttacatatttaagtatgaaaaggaaaaggttcagttacttttaggaaacttacttgaggacaaaaaagaatgcaatataatatctatgtagattccatatggtttctaaaactgttgctacgccgcaaataaatcttgcacttgttttcttccttttagggatgttgccattttcaaaagacactatgaatctttttaagttttgctgactatggtttgactataaggacctgttgcatatttaagttttacatgcttaacattcagtgtaaagtgaataaattttgaagttgaacctttccactttcctgttgcgagtatgctggatttctatgttgttcattagttcaaaacactttccagtttctatgagtagaatatttagattgttatctgcagtaagaaatgaatatgtggaacacagttatttctcaatatttggttaaaactaagcctacactgtgaacttatgtttagtcgtttagacttcagtgatatttctatcattaagaagtgattaacatgttgcaaatgtagcgaacataaatttaacaaatttggtggatatgctcagcgtataatgtgtatatttaccaggataatgttcgtgaacttcaatctgctttaattatcacaaattgttgtatctgcttgttaatataaattgatatattttaattacttgctgtggaattataatttttccacatctgtattatttcctttttataatttttttcttcttttatccaggaaaggcaaaagagttagcatttaggatgggaaaaacaattgagttgtatggattccctacatctgtgaatgtgtctgatgtaaagacatttgtagagcagtatactggtgaaggaactgtgttcgccattaaattaagacatggaaaaggtcgggttccaagagcatttgcaattattcaattcaccaccgcaaattctgctacatctatgatgtccagagctaacaacattttgagaacattgcggtatgggacctcctatttaaaagctcgggaaatggaaagagatattgtgccaaggccaagggtgtttttgcatagtttggatgatgtgaaactgtcttttggctgtcagatctcaaagggaagattctctgttttatggaaaaagcaggatgttattgtaaattttgggagtggaatgagaaagatgcatttcttattttcccacaacaatgtgcaatacaaacttgagctttcatatgagaacatttggaagattgagctgcatcggccacggaatgagactacacgttatctgttgattcaggttcttaaatttgatttctgaatgaaattaatgaacatgttaaacttccaattggagttgaatcatgacaaatacatagcttggctttgaatccaggagtttgcaattggagtatggcaatattaaatattaagtattaacttgtaagttttgctaagcttgtggcctgtcctgtcgttggactgggtttcatttaccaaaaatgaaaatgctaccaaactgacaattgcagaggctaccaattaaattatatgcctaagcatcctggtgaaaccagaactcagttactaaaaaaacaaaatatacaacaacaaagcatatagtgcagtcttggttatctgttgaatgaactatattgaatgttttgcatgtgttttctttttaacttatcatgttatatctggttttggattgttttcagtaggcatctactcttttagtttagaagagtttttcctttatttctatggcctagattaaatttatctttggaatttatttttttattaaactgtgttggtttactatagaattttcatacaaaaactaagataatatttttaggtttgttgttcaagatgataaggaaaggtggttttaatgtttagaaatggttctgcaattaaaatcaaagtttattgaacttggagcatttatggctactacattaaataatatatagaagaagaaatacatttatggccactacatttcacactacatcttgaaaattagctgttctgcaattttatatgtaattagttgttttcttaatcataagtttctgaatcttctcctacattttgtcttcatgtatgttttctttcagctagtaaacgtaagattatctccgaaatcaaagtagttattttattgtctctcaaattttcaattatgatatttgttacctttcatgttgagcaagttgtcctaattgaaattattccatattatatcttctgcaataatgggtttaagaaattttgttttgtgctaaataagttacagtctattacttatcagagataaaattttatgcaaattaaaaatttactgcattagcttttactgaaaggcaacgttttcatctttaatatatgaactcttatcatcgaattttatgatcgtcttttttctataatcgtattttactatgattgctgcaatggacatatgctgaatcttattcatttcgcttcaattgtcagttacttggtgctccccgggtttttgagaacgatgtacctacatcaacaaatatctttgatgatcctttgttcaacttcttcaaagatgcccctgatgagcaatggatccgagcaattgatttcactccagaaagtcgtattgggcagtcctccgccatatgtctggagcttcctaatggccgacaacttccaaatttcagggaaaactttgcttattatgaggaaagtgagaggcaatacactttacagacaggagttcccttttctcaaaattggggtcttgtccccattgttgctcctcctctaggtgttaaaatatcatatgacatcttgtttaaagtcaattcattggttcaacatgcatgtcttgcaggacctgcacttgatggtgacttctatcgcttggttgatccacgtagaatgccccgtgaatttattgaatatgctttagaaaagatttactattcaaaggaattttgttatgaacccacaaagtggctgactgatcagtacaaaacataccttgagtcaaaaaatcatcctcggtcacctgcaatatccttggatacagggttggtatacgttcgcagggttcagatcacgccttgcaaagtatacttttgtggtccagagatgaatgtctcaaatcgtgttctccgtcatttccgtgaacatattgataactttctacgtgtttcatttgttgatgaagaattggataaactgttttcaactgatttatcatcacgttcacagaacaagaaaactgagatatacaccagaattctttccatccttaagaatggcatagttgttggtgataagaagtttgaatttctagcattctcatcaagtcagttgcgggaaaactctctctggatgtttgctcctacagaaactggatgtactgctgcttacataaggaaatggatgggaaattttagccagattaggaatgttgctaaatatgctgctaggctggggcaatcttttggttcatctactgaaactctaagtgtccatagggatgaagttgaaattattcctgatgtgaagaagcttacatatgatggaaacgaatatgtcttctctgatggaattgggaaaatatctcttgaatttgcccagaaagtggctaaaaaatgtggttatgattgcactccatctgcctttcagattcgatatggtgggtacaaaggagttgtggctgttgaccctaaatcatgctacaagttatcactgaggaagagcatgcggaagtatgattcagataacacaaagttagatgttttggcccgtagtaagtttcagccatgttatctgaatcggcagttaatttctctcttatccactcttggtatcaaggatgatgtttttgagaaaaaacaaagagaaactgttaatcaactgaacactatactaacagattcattaaaggctcaggaagttctggacttaatgtctgctggagagatcactaatgttctgaaggagatgctcatttgtggatacaagcctaatgaagaaccattcctttcaatgatgcttcaaacatttagggcatcaaaacttttggaattgcgacttaaatctaggatctttattccaaaaggaagagcaatgatgggatgtctagatgaaactagaaccctagaatatggtcaagtatttgttcagttctctaacaataggctgcagaatctatctgatgattttttttcatatgatttgccaaagaattatatggttaaaggtaaggtagttgtagcaaaaaacccctgcttgcacccaggtgatgtgcgtgttttacaagctgtggatgtgccagatttgtaccacatggtggactgtgttgttttccctcaaaaaggaccaaggtaaatatgcttcttaaatatttctatttttatgcatgttcaacactattttatagagtgatgtaacatttaaaagttttatccaataaaaaaattagtctctgaaattgaaataaatgaaactggtgaaataatggttacttagctactgtctacattgcttttgtatgtttatgggtgttaataatatgtatgtgataggtacctcttttatatatcttgaagactgggactagaacttagaatttactggaattaaaaggatttagagaaggaacagaaattaaagataacccaagcttgagagaggcagaggctttaaaaatcttaattcaatctttgcatctttgttccgaacactttcctctcactaacactcctgtctccactgccaggtgtgtctaggaagatacaagaaaataccttcgcataaacctttcaatttatttttcctctgatagactctagaaataggagactagccattagtgtgcttaatggatacatgactttactgcctaatatggatgacttttccatattgaaaataattctaaataaatatgatgtgctgtgttgctgctacttgatgatttggatagaagtatggtacttgatagaacattatggcggaagttgatccatgtagccgaccccacctagtgggataaggcgttgttgttgttgttgttgttgtgttgctgctacttcaaaccaaagatgcatccatattcaaaaaaattgttttattttcttctttttttctggactaggtgtcaatttctttgtttcatggagcattgctattttaccctagatggtggcaccttttagtctgtcaagatactaatatctatattttgttactctgtaaagttaatttttcttaggttttctttcatactagaaaatcggctgaatgtataaactgctaggcaatttcagtttattagtttcctgtaatatcatcctttttttttctattggcaatgttacttaagcaactatgagtatgaaatcacacatacaattacatcttatctaaatagagttctgaaaaatatttccatccattaatgtaatgctctgacttctgcctgcacttggcataatacttgttttgtaagttttgttccctgtgaaatgtccagagaattagattgagttccagagaatttgcaagtacctaatattgttttgcaagttttgttgtcatttataatgttattttgcgaagatttctcctggaaaattgaaatgttaatttttctggtagtcaaatgatttataattttcttttaacagacttttttacaccagtcagcagaaaatagactggtgttgatgttgataaactcacctagataaggcttttgttgtttttgtgttatctactgacaccagtaactaattttttatatcagacctcatccaaatgagtgttcgggaagtgatctggatggagatatctactttgtttgttgggaccatgaattgattccttctcgcccaattgatccaatggactatactgctcctgcaactgtggaattggatcatgatgtgatgatcgaggtattgtttttagagcttggctaacataggcactctttcatgtattctttgcatttgtctttggttttataattttgtgtttccactgaaaaatatctttgcagttgtttttgcattctttgttgttgctttgattatgttgccattttgtcatatctatatctttggttttgttaaaatgttgaatggatttccatattccattgttttcccttccacccatgcaaatactgtaatggatgcttacttgttagaatgccttatgtgctagattcataactccatcatctggctagaacagacttattttaaccgtcattgtttgtcttttactacactcccatgtttatattagtaaccacacatttttatccccaaaatttttcaccccttttcctaaaactatcttcatgtctatggacccccacatctttatcttcaatgattccttttctatattcctctattgaaattcaaagaattgtttgtttttgaggtgtcattgttatttaaagtaaccactctaacatgcctctatatttagtaatgactaatgcaatataaaattaattgtatttgttagaccccctttttcttcttgtatttgttttattctgcagaatgatattttagagaatgtttgtgacatgctttccttatgcaggaggttgaggagtattttgccaattacatagtcaatgacagtctgggaataattgccaatgcacacactgtctttgcagataaagaacatttgaaagcaatgtctgatcaatgtgttaagcttgcaaggttgttttcaacagcagttgactttcctaaaactggtgttccagctgttatacctcctgaacttcatgtcaaagaatatcctgacttcatggagaagcctgacaaacccacatacaaatcgcataacgtgataggaaagctctttagggaagtgaaagaaatatcaacaagtgccggctcaattacatccttcacaaagttggttgcgagagactcttacgaccatgaaatggaagttgatggcttcatggattatgttgatgatgctttctatcacaaaaccaattatgactacaagttgggaaatctgatggactactatgggatcaaaactgaagctgaaatcctcggtgggaatattatgaaaatgtcaaaatctttcaacaaaaggagggatgcagaagcaatcaatatggctgtgaggtccctaaggaaagaggccagggcctggttcaatgaaaacagcagtggtgatgtagattcagggagtagtgatgtgtatgcaaaagcttctgcttggtaccatgttacttatcatccaagttactggggttgctataatgaaggcatgaatagggatcattatctaagtttctcatggtgtgtttaccctcttcttgtccaaatcaagaaagagaaactcagcattagaaggtcctctttggaatacagtttcagtgggttgcgtttgagttgacaactttggactttgcactccctattttccagttggatttctgagccaggcagcttgtttatatttttatagtaactatgcatgtatgttctatggtaatgtcgctatataacatgtatgagtgaatatatacatattctatcaaggaatgagggtgtgcacttccattcccttgctttttttaaaattatatataaatattttgaatgtgtagattttgtctttctctaattttttatatttgaacatcttattcttaattttttatttccttcataataa

SEQ ID NO: 224 - DNA, 10496 bp, Glycine max; identical to SEQ ID NO: 223
  source 1..10496: mol_type = genomic DNA

SEQ ID NO: 225 - DNA, 10496 bp, Glycine max; identical to SEQ ID NO: 223
  source 1..10496: mol_type = genomic DNA

SEQ ID NO: 226 - DNA, 23580 bp, Glycine max
  source 1..23580: mol_type = genomic DNA
cttctaaaaaaaacatatgaagactaattttctagccttattggaagacgcgcattcaatgcaagtaaaataataacatttcaattgataatataaaaaataatccaaaattttatggaagcttaattataattaataatgaccattgaccagtcataattaattttcttgactgtctattcacaatcacaacctaacgttacattgtcaatttcacaacataatttttttagttgaattaactactaaaactttcactaaaaaatgataaaattatgagaaataggtgatgtattggtgtaaaaatattttataaaattattttatcataattcattatgtagaaaaaatttgttgacttttataataattacattcaaaattatataaataatgatttgtgtttggttagcaatataaaataacttcatattatcatcaccattaaaaactaaatttatttaatcaaatattataattgtgataaatcatttaagaaaaattacatgcgtttatatgtggtattttttttatataaaaactaataacaaataataatttattgtcaggtttaaagtttaagctttaatacctttatcttgagtttactctggtagcttgagctaatgtgatcatcttctttatgacaaggtccattcatttactaaagtaaataagacgattcaataagctaataagataataatatttgcttttcaattattccctaattactgataaaaaaaaactattccataactgataaggaaattaatcgagtaaagattgattttttttaaaaaaacatattttttaaagtgattataagacattaaattccccatcatttatatataataatacaattcaaatttattccttttattattggataaaaatatttgtctcacggtatacaaacccaatgctatatacatacacacaaaaactaatcttttggtagagataagaaaaatttgatagatgaaaataaaataaacaagtatttttcaatcataaaaaataaaaaataaataataaatgagtgagaataaatgagaaatagaataaaacttaaaagtgtttgattgaagataaaaaagaagagatgttgagagatataagtaaaaatacgtaaaataaagtataactaaatcccacacattttaaaatatttttactttattcacatcttatcaaataaatcaaactatttttcttattttttggtctaccaaacaaagtttaatgatataatgtgttttaatttatggtgaaagatacctaaaataaatgattgttgaataaaaaattacaaattctcatttgtttaaaaaaaatacatcatgaggatgtgtgtcgtttaaaccatacaaacccatataaattttatttctacataaaaagtaaatataaaatttatttataaaaaaccattttgtttggtaataaatactagttacaaaaaacgacacggaggggagttgggaagtgaagtgattcgaaaacgtgcgtggaaagaaaacaaagaacaaagacctttatgcgagaaaaaaaagataatcaatgttgggtcacacacaatcattctactggtcagtcttagtgagcgagcgtgttcactaaggtaactctttatcactcttttcttcgctgactccattatcaacgttttgaacaaaactctctctcttgttattattattcttctttttctcttttcactctcctttgtttgtcctttgaacccacccgtgaaccctccttcaaccgtcatcgttttgatcacatacacccactcttaaaccttcaaactctcttcgccttgggtaatgccggacggagaatcctccgtcgtcgtcgccggcggccaagcttccatggaaccctccttaagcgtctccaatcaactgcagtccctgagtctttcccaagacaaaaaccatgatgactcagtcaagaaagatccccggaaaattgcaagaaagtaagtaactttcgctacccctttgttctttcgattattttcttcactgagtcgcgtttatttttcaaatgggtgtgtggggtttggctttttattttttattttttattttgatttattattattttttactcgtggctgtggtcgttatcgctcggtggggtttgctgttgtagtgagttaattattttttgtttggcttttgagaattggagttcaagaaaaagcctgtttcaagattctacttaaaatgtgactactgaattgaattgcattagcaagctctgttgtgtgtgcaagattgtacttcttgcttctgttaacttttcaactgagtgtttttttaatttctatgctttattccagaaaatgtttgtgtagttcaagaaaatgttcccaatttatggtgatcagatgtctgaattgtgatgtttaatgtgcttatccttttgatttctcacttgtcttctggaactccaataatcttgtgaatgttttgatctttttgaaggtatcagttggagttatgcaaaaaagctatggaggaaaatataattgtgtatttagggacagggtgtgggaagacccacattgctgtgcttcttatgtatgggatgggtcatttgattcggaaaccgcagaagaacatatgtgtctttcttgcccctactgtggctttagtccatcaggtgagctgctgtacatattgttgtgttcaatgttgtacaaagtattgtttttggaagtacaatatttttttttctggaaaaattagaaatctaatggaataaatatctttttttcccccttttatttttgggtgctctgtactttggtcatttcaggttgggtaatttggtcttgcaggtgtacaatccgtaaggcctgtgagaatgactttctgggataaataggcctagcaaggaagtattcttttgtattataactgaacatgaaatttgtaatgagagtttttttcctttatatctttgattgtaatcattgcaattgggtcaatctcaatttcttgccaatctttttgaataaaacattgcttgaatctaattagaaaacttagtgatctacttgttatgtgaatcaagcatggttgttttatgtgtgaatctgatgaattgatctgttcttgtgtttaataatctcccaccaaactttagtgttaactgattttactatgttggtcaattccatcatatgttttctgaagcctattttttatttatctatagcaagcaaaggttatagcagactctactaattttaaggttgggacatactgtggaagttccaagcgcttgaaacgtcatcaagactgggagcaggagattggacaatatgaggtgataatgctagttaaatcatgttgaaattaattatgtttttgtctaaaattattttattgtttatccatacatgttactgttacagcatttttatgtaaaagatgttgaaagaaagttggtttcatcactgaaattttatttaggcaaacaattcaaattagctcctgctattttgaaatcttaaaatctgcttacttaaattttaatccaatggaatttgttgcttctaaaattgctctttgcgatcttgttttttccccttcaggttcttgttatgaccccacaaatattacttcataacttatctcattgcttcatcacaatggagatgattgcacttttgatatttgatgaatgccatcatgctcaagtcaaaagcaaccatgcttatgcagttatcatgaaagtatgatgtactctcactcaactttaaacattcacaatggagctacacaattttccacataaaatctttccatttccatagcctttatttttgacaatatttaatttggcattttttcaggtcttctacaaaagtaattcctcaaaggttccccgtatatttggcatgactgcttcccctgttgtaggaaaaggtaaaataatgcttatcttcaaaaagttgagtactaacaagagcctagatatttgcctgcctcaattaccttttgatactgtcaagtacacacagggtcaaggtatggaagggaggggaaaaaagagaatatagacactgaaaatatactgttatacccttatcgtaatggaggagataagagataaaataaaatcatgggacaacttagtttgtacaatccaaaaattataaaccactttcttttccctctaaacgcccctaaatatcggatgtgagacaaaaatagaagggaagggagctccctcatttccctccaaccaaacaaattgtgctagatgtacgaatttgttggaagaaattataaagtggttgtttgtgaaagcttttattgagaaaaataattgcttgcttttcaaaagttctctctgaaaggggtaatgtaaaagctttttttttactctgaataagctatttcaaacactctttgaaacagttaattctatcaaaaaaaggttcaaggtggggggtgggggaagagaatttgtcacacagaagaaggtcaatgggttgtgtggtctattaatccatttttatacatggatggaataaagtatgaaagatctggacttaagtaatcagtttgttaagttcaccaaaaggcttaccctgccattaacaagcaaatttctttttttaatatagtttgttatgatatattatgcaaggcactattgttgtgcctaggtaaaatgtgtaaatggtatggtgcacctttatatgtgtatacacattctctttatcagaatgaaaagatcttaaatttcagcaaagaggctgaaagagactgactgtataggatgtggtccgcatatagttggactggaaaccatggttaactttgaaaggttaaaatgtgtcaagaaaaagaaaatcatatgatgtgagggatctttttcttgagtatgggacagggggtgaaagggacagactaaggtcactgacattttatataaaattttcaattattgacaagaatttttttaatggaaattttaactggccactttagttttcaatactttgaccttcgtttcattttttttctaggactaggtccatctgatcctgcaaaatatttttgaaaatataaatgtttttttttttttttatatcccactttagtctgttcatcgagagtgttaccctataatttgcctacattgttggtaatatatcctttctttcctttatatattttatgcatatttcaattagcataattgctgaatactgatagtgtagtttattccaaatatgtaaaatcctcttcataatttatgaatttgctagttctttcaattttcaggtgcttctagtgaagcaaatctagcaaaaagcatcaatagtcttgaacatatacttgatgctaaggtagggtccatttagtacaatatatgtcaaaattcttaaatttgtgaacatttgttgtttgtgtaaaaggtattgtgtcaaacttttcctgtgcaagaaagcaattgttctttccattaactattgactagaaaccattgatataatggttgaagtaatgtattggtcaagtgtttgcatgggctaaggtttgtggaaatgtagtatttgagctccatagaaagatattggttatgaactctgttaagattatgttttgatattattcatgatattatatttattattagaatattcaattttctattaattagtaattgattgatcttgtaatcaatattgattcccttttccatattataaatagcatgaggtgcggtctacattgacacacaacattacactaaaacactgttatatggtattagagcttaggttattcttgacagagatccactatccctggtggatctctctgctttgcccgtcttctagcgaccttgtttctgcattccagtgctctgacgaaacttctctccttctttgatgatatgtttttgaatttctggcaacttctcctgtcacagctgtcggccgctgccatctggccacctttttgactggcgaacccacgatttggaacgcccattgtcgatctatccaacaccacccaccgtgcctccattagaaaaccgacaccctgccgacatgccagttctttgcgcaaccaaacaagttctgtttttggtgcgtcggagctctgattaggccatgcttccggtgttgtggtcgccctcccagaacgacgccacccctgcagttttgcatcaattagagcattttttattttatattttatgcccattgtttttcctttttgtgcagccctctttgcggtgattagtattgcgtggctgcggattttgtacaattatggaagatgttgcagattttgtacaattatggaaactgcggattccatccaaagctgcagtttttgtttggaggttacttcgagacagattgcctactaaagcaaacttaaataggcggcaggtggaaatacaggaccaaacttgcccattctgcagaagcacagtggaggatacaccacacctatttttccaatgcagcaaaatcatacctctttggtgggaaaccacgtcctgggtgaacatctccactgtttttccactgcaccaaaggcaacattttgcccaacatatgattgatggggtcaaaggaatttgtgttagtaggtggagggtctggtgggtggcacttacatggtctgtgtggcagatgagaaataacattatattctcaaatgggatcttcaatggaaacaaactgatggaggatgctatatttttgtttttgacatggctaagaaactatgagaaggattttgtaactaattataatcaatggtcatctaaccttatagaggcttttgctgttagataaggatagagctatagggtcttcatacatgtatatttctttttccagtttggttcccttcgagactgccctagtctgcccttgggaaccatcttactggtctctttgtatcggtacctctggtactaagtttcttatataaaattatatctttgttgataaaaaaaaaaagtattgcgtggctgctatgttgcccattgttgaagatcatcacaccatccacatccgcaaccaactcaaaacaccgccgcagcgacccttcgcatggccctggcatgtgaagttcacacacacgacgtgtgacgcatctttggctagcggcacattgatcttctctcccttcgcctcaaggcatctccaatggatctttttttttttttttttcgcgggtgaacagtgcccattgtcatcgtcgaagaccgccacactgtccacgtgcgcaaccaactcaaaacagcgccgcgtgcgaccccatgtagggcccctgtcccgtgaagttcacacacacgacacgtctttagcgaactgcctttagtttctatcgggttgaccacatttgtaacaagctcgattcatatgacatatgcttaagcttgagggggagtgttaagattatgttttgatatttttcctgatattatatttattattagaatatttgattttctattaatcaataattgattgatcttgtaatcaatgttgattcctttttccatattataaataacatgaggcgtagcatctctgattgttgacttctcggagcctcacacactacaacacttctcacagtgacagttcactcaacttccttgttagtcagaatccttcaccggtcataaccctccgtaggtagtccttttcgagaccttgacaatttgctttggttgctttcaggatcaataattgaccccacaaatcaacacgagacttttcatcgtgttttgtcctcacttacaagcttaactgtggagttcttaagtgatgagctatcgaaaagtagatgcatcttgatggtataggtagtatcaattaattcttttaaatcactctctgattataaataacatgaggtgtaacatccttgattgttgacttttcggagcctcacacactacaacacttctcatggtgacaattcacacaacttccttgttagtcagaatcctctaccggtcataaccctccgtaggtagctctttccgagaccttgacaatctgtttcggctgctttcaggatcaatgattgaccccacaaatcaacacaagacttttcatcttgttttgtcctcacttacaagcttaactgtggagttcttaagtgatgagctacggaaaagtagatgcatcttgatggtataggtagtatcaattaattcttttaaatcatccttaactatgtagtcctatatccacacaacctctagaatccctctcattctattgtgatttgtccagggtgttacatgcctaccatcttatgcctggttcgtccttgaaccacaccgtaccggaagagatatctgctctaataccatctgtaacacccctgattgtcgacttctcggccgctcacacactacgacacttcacacaatttctttgttgatcaaaaccctccataggtagtcctttccttgtgtggtctacattgacacacaacattacagtaaaacactgttataaactcttctgcattccttatatttaccttgtatgcaaagtgcattgttcttgtggaatgtggatagtacctagttgtgctgcttgttagatactgggcatggttttactaatctctagtgatttgaatctcatttgtaggtatactctgttgaagacaaggaattgcaatcttttgtgaccactcctgtgattaatatatatcattatgtttcaactgcaagtggggaaactagcttgtacctgaaaattgaggagattaaacgccaggtgcacttttgctatgggttttatgttttaagacaattagataaataaggtttactgatccctgtgcaattttatttgaatagtgcatagcaaaccttggtaggagtatagaagatcaccagaaaaggatgaatgcaaagaaacttctgaaccggatgcatgataatgtgattttcggtctgcagaatcttggcatttggggagcattgcaagtaaaactcttgtagtggattataagttttagttctataatcatttgactagaaatatattagtacaacacaataatgtttttagcagaatctataaataataatacagagaatttttatttttttttgtaatttgttccattttgtaagtcctcctacaggacctgcacacccaaagaaggaaaaacccaggaagaaaaataagcctagaataggctgtggaatttcttggttataatgttaagcttacataaattagacacagtagcaaacactctgcattgattcttgaagatgaatggtttagattggtgttttgtttcttaaagatgatgtcttggtagttggtaccaattcagtttttgctagtgatgtagatgtgatatttgaagataagggaatattatttggaaatcatttagacaagtcttctgaatacatcatttccttgggttttggtgtatttctaatttttcttttacgttttgttatagatctctgggcatctctgttttttctttttaatttttaattttgtccattcctgtggttttccatcatgtttcttgttttattgatatcgggaaatgattttataggttagaagggctgtcattgtcactatcttgatttttattctgtatccttttctaatatgtgttcaccttccaaggctagtcatattcttctgagtggtgatcgttctgagaggcatgagttagtggaggctgaaggaaattcaagtgatgactctctgtgtgataaatatcttgctcaggctgctgaactgtttacttcacaatgcatgataggtattttgacattgcctgatgttcttttaatcatgccacttctgttactaggttttctggctattatgtgcttccattttgcttgatgttaggctaacatttgtctagcaatgaatctgtctttttcattactgttaatttttacgatatgtttgaaatagtgtccttgtaggatagatgcttcatttatattgcaactaaacatactttttttgtaggcgacagggtaactgatttatcttctgtggaaatattaaaagagccatttttctcagcaaagcttttacgactcattgggatattatccaactttaggttgacaaaactatgctgtttaaaccattccttaaatacatgttttcatatatagcacatgtctcatcgatatttggttatgaaactaatatatttgggcaaattctgattacatgttccaacttcaggttgcaaaagaacatgaaatgtataatttttgtgaatagaattgtgacagcaagatccctgtcatacattctacagaagctcaagcttctaagacaatggaggagtgatttcctagtaggagtccatgctggactgaagagtatgtcacgaaagaccatgaacatcattgttgataagtttcgctctggagaggtattactattggatttctcattaatttttaaatacgttattgtgagaactgaaaagcctgctatatgctagttattggttcaataaatgaattaaactatactcctgtgtatgtgtctataagttgcttattctcatagaagattctgtgattttatctgatttgcaatagatgtattgagggaatgtaaaatgtctcttactttgctaaactatgaaatagctgggagctactggagagttttgtaaaaaatattttacctaacttctcttcatgttctttcaagcattattggtgttaaggtggtgaagggcatgtaacagaggataaagataaatgtgattatggcttaaatatgtatatatttcctagcttgacagagagttgagtgctagtttttttttatttttaaattggctaaatcaaatatattaatcagggcaccagaagtgccaatttaaagatacatcagtaatggtgcccaccaaatatcacccaccaatttaaagagttgagtgctagtaatgtcctacatggctcatgctgttaacagttgaatctactggttgcaaccaaagtgggtgaagaaggacttgacattcagacgtgttgcctcgtcatacgatttgatcttccagaaactgttgccagctttatacagtcaagaggtcgtgcacgtatgcctcagtcagaatatgcatttttggtggacaggtactcctactttctaatagatttcagaagtaatttaagaaaattcatccatttggttacctttgaaatcatcttgttgttgcagtggcaataagaaggaacttgacataattgatggctttgagaaagatgaataccgaatgaatatggaaattacttttcgaacatccaaggagacatacataatccctgaggaaagaatattcagagttgattcgtctggtgcttctgttagttctggatatagtatctcattgcttcaccagtattgttcaaagcttccacatgatgagtatgggcttataactgggccattttgattcaaattatatactcaaccaactagttccatgtaaataaagtacaaatcttgtgttttaaaatgtaataatctatctttacaggtactttgaccccaagccatgtttttattacttagatgattcaggggggatttcctgccatataacattgccttccaatgcaccaataaaccaaattttaggtacaccacagttgtctatggaggcttccaaaagagatgcttgcctgaaagcaatagaagaactgtataatttaggcactttaagtgattgtctcttgccaaaacaagatgatgcagagccagaggcgcaggtttcaggctcttctgatgaagatgaatgtgaaggtcaaactttagttgctttctgataagccattactttcattgcctttcactgggttgccaaaaatttactgtataaattgtattttgtaataaactgttgagcatatttacttgtcaattattaaggagagtgagtaatccagcatgttgccgtgctgatcattttcagaccttttaaattctacataatcccttgttggtaattatttttgtaacatacctgtttatggatttagtgttaatcccactgtcagtgtataaacttctacaccatcatccaatcatgtgttgccagatatgtggaagtttttttctcctctcacgtagttattgtcacaaacctttgtcatctcaacttatgtctctagggatgtaactatatcatatgttgtgttgtactatatttattttcctttttttgcagatgccatatcaagaggagaattacatgagatgctagttccttctgcctttggacagtcatggataaatgaggataacatcgtccgtctcaactcttactacataaaattttgtccctatccagaggatagggtctacaaagagtttggtcttttcatcatggttcggcttccaatggaggctgagaaattggaacttgatctccatcttgctcatggtcgatctgtgatgacaaaatttgtcccatttggagttgtagaatttgacaaagatgaggtaaatgatgtttgtgttttattttattttaagaattttaagttaatgcttggagtttcccatcctgcagattaagatggcagagaattttcaagaaatgttcctcaaaattattcttgatagattagaattcgtttctgagtttgtagacttgggtatgggtgctgaatctcacacaggcacatcaaccttctaccttttgcttccagttgtattgcaagaatatggaaatgccatgaaagtagactggaagactgtgaagagatgcctttgttcaccaattttcaggcatccagctgatactatggataaaaaagttttccctttagatattcacctgcaacttgccaatggttacagaagtgtaagagatgtcgagaatagtttagtgtatgccccacataagaagaacttttattttgtcacgaatgttaactaccaaaagaatggatatagtcctcataatgattcaggcacttcaagctatgtggattacttcattgaaaagtaggtatctgtttattattatgggttcatccttgtgttattttggttttgcatcctaattcttctatgttgatgaaggcattcatatttatgggggcttttttaaaattgctgattaactgattgaattggatatatgagaatgtgtatccatacaagttggaatatcatatattgtgcttataatatttgacaaaaatatgcatgcttgaatgtcaggttttccattcacctcaaatgtccagaacaaccacttctacatgttaaaccagtctccaatttgcacaacctgctacacaaccgaaagcatgaggatgcaggtattgtattggatatgttatttttagcattagagtctgacaggagttgtctttatgaaaaagaaaaatagagccaaagctccttacaaccagaaaatattttgaaaaccttggaatgtaaaacagaaactctaggaataaatgtgactgaaaaagagactccacaaagaaaatgtcagccttatggagaactccacttaaatcacgttctaccaaaattgtccctatgctccttcccactataacgatcccccctttatcatttttcacccattcagttaggattctctactattctctttgttcctactcagcatactcatcattcctctcatcttctcccccttgtaccataactaactactcttttggcccattgtccataatctgagctcccctagctgtttcttcatgagtaaacacaagatatgggctacagagcttaattaactaagacatgagaatttggttttcattacctaaactttttactagctagtagaatgacagaaacatgccagaaagatatgtggtagggtgggctcactgctattgatgtgcagcgaggaaggatttgctgctgagaaatggacaatgatatacagatatactatccaaaaattagttcttaagatcgatcctaattgattcttccatatatacatgatatgctaccataaataatctagatattctaatttctaacaatctgtttcctgtgagcatttctttatgattttgtgttagcaatttaaaaagtgtaatgtgcattgactactttcaaatttgtatcttgattttggatttattttgtattctgataatttttcagaatcttatctaaatgtttgtaacttttgaatgtcaatgacagaaccacaggagctggacgaatacttaatttatttgcctcctgagctttgtgaactaaaaataataggtttttcgaaggatattggcagttccatatctttgctaccttcaattatgcaccgtcttggaaacttgctggtggctattgaactaaagcacaggctatcttcttcctttccagaggcagctgaaattagtgcccttagagtaagggcttattaaattcaatgtattatttacattattttctagtagtgtattctttttcacatctaaccattgcagtgcttatatggtacagatgaattttgtttatagcaactaactattgtgaacaaattactaggttttagaagctctcactactgagaagtgtcaggagcgcttttcccttgaaagacttgaagtgcttggtgatgcttttcttaaatttgctgttgcacgtcatttttttctcatgcatgacagccttcatgaaggagaccttacaaaaaggcgctccaacgctgtgaataattccaatctgtttaagttggctatcaagcgcaatttgcaggtagagttataccaacacatccctgcttcatttcctaagtaagaaaatattattattattattgttattcatagtttttctgttagtttagggtttccgcagctgccacatttcatttcaaaacgaaatcacccgctgatgccttcaaagaatgttaatccctcattcagagcagaaggaaaaaagatatacactggaaataattttaataaatagctgattatatatatatatatatatatagagagagagagagagagagagagagggagggagggagggatcaacttatactaagagtaactcttttagagtagcactccatcctcaccattcattttcttggaatctaatggttttatcagttagattccaagaaaatgaatggtgagaatgaggagtaactctaaaagagttactcttggtgtaagttgatctctcatatatatatatatagacacacacactaaaattgtagtggcaatgaaaaacatatagtgcaggatttgagtgtgtctttaatttctagcccaaccctatcattttaggcgatagacacaggactctgtaccagggaaaccccattccctgcactgggacctactactgtgtctcgaaattgtcgagagctaaaatgaaaggttcaaatcctatttataaaattgattcgttcatttgacgtagggtttcctggatgatggtggataagttattttctatcacatactcctaataattaactacctccaatcgattaacagatccttcctaactaacttggatctcagttcccatcaaaataacacttggataacataaatccaaacccagtacaattcctaactgaggattaaagatactggagtttcccctagaactgaatagtagaaattaactgaaccatttagtaaggcttattaccttgataacattttttatctagatatcaggctttataatgggctaatgtatctattttaggtcattgtatatatattaggttgtattattttattctagtctggcccattcagcccattggccatgatgtatatataattctatcttgtaatctttctttttttatcaatagaaaaacactttctctcttcattttcgcagtgcatatttttatttcctgacttgagtcttatctctatctccttgctccctcttgcaggtctatatatgcgatcagacatttgatcccactcagttttatgcattaggccgtccttgcccaagactttgtagcaatgaaaccaaagaaagcatacacttctgtttaaattctgttaaggaacaaggaaaagtaactgaaacccaatgtaacaaaaatcatcattggttacataggaaaacaattgctgatgtggttgaagctctggttggagcatttctagttgacagtggctttaaagctgcaattgcttttctttcatggattggcattcaagttgattttgaagcttcacaagtggttgatatttgcatagcaagtgctagttatttacctctttcttctgaagtagacattccttctcttgaaggtaagctaggacatcacttttttcataagggcctgcttctccaggcatttgtacatccttcttacaataagcttggaggaggctgttatcaggcaagtgtaacttttcttttccctcccaatgttctgacttcatataagaattattttctttactttatagctctatgaattctagtgagacatttgatctttaatttttgaaatgtgataattctttgcagcgattggagtttcttggagatgctgtcttggattatttgattacttcatatgtattctcagcttatcccaaactaaagcctggtcaattgacagatttgagatcattgtctgttaacaacaaggcatttgcttgtctagcggtagatcgcagttttgataaatttcttttatgtgattcaagtggcctgtctgaggcaataaaaaagtatgttgactacattagaagacctgtatcagataacagcattaaagaagggccaaaatgtcccaaggtagatagtatgacctttatataaagttgctacacctggttgttgttgttgttattatgcatttacccatctaagatgaagttcctaaagcataatgtctgtattcatttcaaagtttgctttgggtattttacttggaataatgctactcccgcacgcgtaacctcacatctgtaaagtttccattattttatcatagctgccccctcaccccccaatttcattttttgaacacctacactttgattcagccatctatgcttgatttaaggtaatgtacacccactgtcccacaagatgtgtatcaagcattattcttttacttggatatgacaagagcaaataaatggaaactgaaagagaacccaagctcttgtgcaggcagaagacacacaaaacccatccaaatgattgtcaatatttttacgaaaaaacacaaaagcccagtacatgttgggcgggtagccctcacatggaccatatggcatcacagaaataagacagtatttgagaaccagaccttcatcacaagtaaagtgctggatgatgcacttctcctactatggtcatggctgagggccatggagaaagattttacactgcactacaatcagtggtcctctcagctgagagaaacctttgggtaaataggacaggagggtagttgctaggattctctgtagtagacgtatgtctggtgtaatcctaggtttgggcttagctggtccttaatatgaaccttaggaaagtattagagtccagctgtgtataccttcaacatatgtattttcagtacccctggtactctgcatataatataattatctatttttgctgagccaaaaaaaaaaaactgaacaaatttattattatattgagataagatgacaaatttactttctgctctatgatttctgttatggacatgagtaactcttctaggaacattaggagtctttttattgtccaattcaagcagctcataagttaattaagtttctgatatgtgcgcattgctttgttattttgcatcaaaaggtataacttgacatcatttgttgcttcaggcactgggtgacttagtggaatcttgtgttggtgccatccttcttgattcagggttcaatttgaacaaagtttggaagattatgacttcgttcttggactcaatcatgaaattctcatcaagcttgcagctcagtcctgttagggatttgcgagaactttgccaatctcataatatggagttggagtttctgccagtgccctcaaaattgactaaaaggttttcagttgaagctaaagtgagtgggaatggtgtatgtgaaacagcttcagcaactggtcaaaataaaaaagaggcttgcagaattgcttcactgctacttttttcaaagttcaaggtaaagcaattatgtttagttttattttttccatccttattttctcaactcaacaccttagaattagcatttctttattgtacagtgacaccacaggtgagtatattacttttgtgattcatgtaaacaagggtaataatcattttttaactttctgctaatgtggtgaaatcagttgtgcttataatctttaaatttccaaattctctagttaaggaaacaagtgttctagttttaagatgttccttgtttcttcatttggagatacttttgatctagttcagaataatgcaagagttgttggagctattgatagtaggaactcacacacaatggaacaatttataaagaggaagagagaagatttaggctttgcacaaaagatgcccacacatgcacactatgtctctgttattcacacctttctattttataacaactaataaagttagttagatataactaacttttataaccaaaaactaactattaaaaattacaattaaattatttaaattgcttcacaacattccccctcaatttaaacactctactacaccttagtcaaaacatcagcagttggtaaatctgttggacaatgcactgcttcgatcagtcctgaattcacctgctctcagaaaatgaaactttgcttctatgtgtttgcttcttccatgtgagactgggtttttggccaagttgatgacagacttgttgtctattaggagcttcaactctgatttctttcagcagtgagttaagccaaataactaggcatgcaacatatgccccagctatatattctgcttcacaagaggacaatactaccactgactgtttcttgacaccagaaaacttaaagatataaccagtggtacaccaatcagagtctgaatggccaatcagttctccctcttcctgttttgcttcattagtgaacaatactccaaagttttgagttcccttcaagtaccttagtactctcttagcagctgtcatatgaacttgcttaggtttatgcataaacctattgatcaaaccaactgcatagcatatatcaggcctgctattgcaaagatatctcaaggagccaacaagttgtttgaacagtgttgaatccactgcttcaccttcataactgcttacccatttagggttggtctctgctggtgtagcagttggattgcagtttgccatattaaactatttcaatacatcagcagtgtacttcctctgctgcatcatgatccctttttctgtagttatgaactctatccctaggaagttggtcaatttccgtaggtctgtcatctcaaattcaaatttcatcaacactttaaacctttcaatctcagttgagtcattccaagtcactagtagatcatcaacatagagacaaatgatcactagacttgagttctttcctgacttcacatagactccatattcaacagagcatttagcatactcatgctcaataaaaaatgagtcaatcctcttatttcagcatctgggtgcttgctttaagccgtacaaagccttattcaacttgtagacatacttctctttccctttttcctcaaaaccagggggttgtgttacaaatacttcttcaccaagtgggccatttagaaatgctgactttacatcaagatggtaaagggaccaattgtaacattgaatcttccttttatcgaatcccttctttccatctttgctgttggagaatcttgcagtacctttttgagaggtttctactctatcttcactcttgaatttctcctggtttgaattccaattgcacttatggaattttccctttcctttcttccatttctttttgtcactgctacctttcttggaggtttgggcctgcagagcttgttttgtaggtttcacacttcctctttcgatcaacctcagttcttgagcttgcaattcttcaattttcatgctttcaacatctttggactcttcgataacaactacaatgtgttcaaaacttggaatcaaggtcctcatgatcttctcacctcaactcttcatctgatcggcaagattcaatactctagtgaagtaatctgcaattctttcgctagcttccatttgctgtaattcctattgtcttctcagagattgaagtctcacctttctcaccttatctccacttatgtaacactttgcaaggatgtcccatgcctcctttgctgaagatgatgcttgaatcttctcaaaaatgttggaaactacacactgatggatcaagaacagtactttcccatcccttctgattgcttctttgtgctctgctatttgtgattcagtggaacctgcacctggttctttaatttcagtttcaacattttcaagcacattttaaaatctaaacaagactctcatctgcgctacccattgatcccaattcttaccatcaagtattggaaggtttcctgaaacaccattgttgcctgccattgtttctccttgttgtgatctttacttttctttcacagctacacgaatttacacttgaacctaggctctagataccaatttgttggagctattggtagcaggaactcacacacaatggaacaagttatggagaagaagagagaagatttaggctttttgcacaaaagatgcacactatgtctatgtcattcaccccattctattttataacaactaataaagttagttagatataactaacttttataacagaaaagtaactactaacaattacaattaaattgtttaaattggttcacaacaatagtacctctttttccataaatcagaagcatggtagtaacatcatattttttatgatgtggagttcttgtaagttgaattgctatactagatttggctcccttagtccaacagtttatggacaaatttcattataaattcattttcctttatattttccgtagagttgtctagtgcattatgtttgctttcttcagccaagttctgctctttatataagcccattagcccattcttgtgccaaaacacaattgtagttttttagtttttcaacagtcattttataggagctttattttaagataaataaataaaagggatgagagtggttcatatttactcgcatcagcatattactaatactgggaactagcccttaaatctgatatctccttgattttttctttgacatcatccctgtagagagaaatctgtatttgtgttatatcagtggcaagcactgtcaaaagaggtcttgttattaacaaggaaaagtgcaagtatctgtctagtaccaattattcaagctgcactatagctatatgcaataacaatcatcgtagaaattaagaactaacattaatatcccaacattcctcagtgaatttcttcttcaacatgcataattaaacacaaattccctaagcctagtcccgtattgttgttatataaaacatttggatagatgcattttatcttccctagctacaactccaggaactatattgtttgaattaacggtcatgggtgtggatgtgcaggctcaaggctggaaagcaaagtcaaaaactttggaagaagttctggaatcaacttctaaaatggaaccaaaacttattggctatgatgagactcccattgatgtaacagataccaataaacacatagtggttaatgcagacccatacaacaagtctaacccagaaattcgccctatgcaagagacagatgaaatatgctctccatgtgtgaaacctttcggccaacggcttcaatcttctgctaagggaaagcttagtcaaatatttgaaaatcgtgattgcagcagtgacttgtcagggacaggtagtataaaaatcatagtattttcattgattcggtgtctctgttaatcctaaacattgtttcatattttttgtacaaaggaacggcaagatcacgattgtatgaattatgtgcttcttattgttggaaacctccttcatttgaatgctgcaaggcagagggacctgaccacctgaaacagtgagtaactctatttttttgtttatttgatctttttggtaacatacacatctctacccagatttttatttttaatctttaatattccagtgtttagcaatatttttagcaatttagcctgtgatgtaactgggattagacattttccatctataactttcagactttcagtatcatcagcaactagttttgaataccttattattgatttttgggacattaaaaatgaaatgaaattttaaacatccttactaccaggtttcagctttggaatttcgctcaagatcttcatttcatcctctgaaattccaaagttgacaatagaagttcaaaactagctaccaatgatgatgagaatcacaactaagaaaagaaaaatatccctaaaaacttgtatatattaacatggactaaagtataacaacaagcattaaattttgtagaatggaggctgagcaaaaaaaaaaagaaaaatttgtagaatggaggggtgccctttaaggcctatgtattttaaacatctccatgaaagaaggggttgattttctcattcaaatcagttgcattttctgaatttttgacactggtgatgaatggatgatgataattatagttgaaatttgtaatctttttcatcaacatttagtatatatacaaaacttggttcgcttgcattccccgtcttgtttttttaacgactcttggctcgttcatttcagggtacatagaacttttggtgccttttttttaaaattttttttttcttgacatcagggattctatgttgacaccgccatttctgattattgttccatttttagattcacttgcaaggtgaccttagagatagaagaggcccagaatttgattttagagtttgttggggaacctctttcaaagaagaaagatgcagcagagagtgcggcagagggtgcattttggtatctacaacatgaaggttacttgcctagtagtggtaattgacatattgtagaacaattatcatgtcacataaatcccaaggcaattggtgtaggcaatgtcttgattattgagggtgtcgaatgtgttgttataggtaatcatataatctagaaggcaataatagtacaggtttagtaactcagggccagggagggttccctaatggtaaatctattgtaaaggtattattcatgtatgtattattgtagtgtcaaagttacatctaacattgtatgtaaaccatccctcgattataacagtgaattttctatttactacgtttgaaatgtaaatataagctcgcgagacatttgaccattatta

SEQ ID NO: 227 - DNA, 36332 bp, Glycine max
  source 1..36332: mol_type = genomic DNA
ataattttcctaagccttgtaatcttttgttaatcacttttaagacatcaaaactagtttaatgtactgttgtaagatataaagtttaggtgtagccactatcttaacttgaacttaatttttaataagtttggtagctcaaattttttactagctcatgaatctttgcaaatgcttccaaatcttgatcattttgtctggtacaaggtcattttagcacttgcaagtcatggacagagttccaaatacaaggggtcctcttttaaaaaagtttaggacattaaaacttatgtatttttttgtgtgtgtcttagatgttttataggttaaaaaagtacagaaaataataaaaggttgagaaaagtttaccaaaaagcttgaaacatgtgccttagtgtaaaagaaccgttgtgagtagcaatggatgtctacattcaaatttttaccattttggtaataaattttagactttgaataaaaagaaaaaaaagtgtgtttagcaattttggtgaaataatttaatttaatataaattaatgtgctaatgatcaaactagaatgttactaacatgtgattacttcacggtatttcagtaagctgtagaagccttatcaaaggcgtgcattcaacattaggtaaaattataacatttcaatcaacaatataaaatatagtaatccaacatcttaaggaagtttaactataattcttaatgaccagtcattattaatttcatcatatacttgactatctattcccaatcacaagctaatgttacattgtctatttcataacatagtctaagttttagttgaattaactactaagttttcactaaaaaaatacataaatttatgataaaataggtggtacattaaaaatgttaaaatatgttataacatcatttaattttaatttattatgcatgaaaaatttgttaacttttattataattatcttaaaaattatataaaataatttataattgattcacaatgtaaataattttatattatcaatgtaacatattaaattcttaatctatttaatcaaaacttataattatgaaaaaatcatttaaatagaaattacatgaaatcaaggtgttgccattgtggtgctcccaatagtatatacatacacaaaatctaatctttattttctctttgatagacataaaaaagtttgattgatgataataaaatagatgagtgagaataaataagaaataaaataaaattttaaaatatttgattgaagataaataaagaaaaaacgagtaaaaacaaataaaaataatacaactaagtcccacaatttttaaaaatgttttcaccctattcatatcttaccaaacaaacaaacttatttcgatttctctccctctttcctatgtttcatctatcaaaaatcaaacaaaggctaaggataatataattttttttatgtcctgatatataaattttatttctacataaaaaaaaaatataaaattgatttctaaaaagccattttgtttggaaaatactagtaacaaaaaacgacatgggggagtgttgggaatgaagtgatgcgaaaacgtgcgtggaaacaaaacaaagaacaaagactttcagtcattcagtctttagtgagcgtgttcactaaggtaactcttcactctcttctccgttgactccataatcaacgttttggttgggaacagaagtgaatgaagtgactacaaacaaagctctctctctgttattattattattattcattttctcttttcacactcctttgtcctttgaacccacccgtgaactctccaaccgtcgtcgttttgatttcacccactctcatacctccaaactctcttttcctcggctaatgccggacggagaatcctctgccgtcgccggcggccaagtttccatggaaccctctttaagcctctccgatcaactacagtccctgagtctttcccaagtaaaaaatcatgatgactcggtcaagaaagatccccggaagattgcaagaaggtaagtaacttttgctacccctttgttcttttgattattttcttcactgagtcacgtttatttttcaaatgggtgggtggagtttggctttttttattttatttttttattgttattttttgcacgtgggcttggtcattattgcttggcgttgtttgctgttgtagttagttagttattttttttgtttggcttttgagaattggagttgaagaaaacgcctgtttcaagattctgcttaaaatgtgactagttgaattgcactagcaagctttgttgtgtatgcaagattgtacttcttgcgtctgtgaaattttcaaccgagtgttttgttatttatatgttttattccagaaaatgtttttgtagttcaagaaaatgttcctaatttatggtgatcagatgtctgaaatgtgatgccgactatgcttatcttttttattcttcacttgtcttctggaactccaataatcttatgaatgttttggtcctttaaaggtatcagttggagttgtgcaaaaaagctatggaggaaaatataattgtgtatttagggacagggtgtgggaagacccacattgctgtgcttcttatgcatgagatgggtgatttgattcggaaaccacagaagaacatatgtgtctttcttgctcccactgtggctttagtccatcaggtgagctgctgtacatattgttgcattcaatgttgttattgtacaaaagtatttttttgggaagtacaatattttttttttctgggcaaattagaaatataatggaacaaatatctttttcctcccttttatttttgggtgctctgtactttggccatttcaggttgggtaattttgtgttgcaggtttacagtctgtaaggccagtgagaatggctttctgggataaataggcctagcaaggaagtattctgttgtattataactgaacatgaaaattttaatgacagatgacctttatacctttgattataatcattgcaattgggtcagtctcaatttcccgccaatctttttgaataaaacatttcttgaatctagaattagagatcttagtgatctacttgttatgtcaagcatggttgttttatgtgtgaatctgatgaattaatttgttctcgtgtttaataatgtcccaccaaactttagttttaactgatttcactatgttggtcaattccatcatgtgttttctgaagcctattttttatttatctatagcaagcaaaggttatagcagactctactgattttaaggttgggacatactgtggaagttccaagcgcttgaaacatcatcaagactgggagcaggagatgggacaatatgaggtgataatgctagttaaatcatgttgaaattaattatgtttttctctaaattattttattttatatccagacttgttactgttacagaaattttaagtaaaagctgttgaaagaaagttggtttcatcactgaaatttaatttggcaaaaaattcaaattagctcctgctgttttgaaatcttaaaatctgcttacttaaattttaattccatgttgttttttgcttctaaaatttctgtgttcttgtttttttcccttcaggttcttgttatgaccccacaaatattacatcataacttatcccattgcttcatcacaatggagatgattgcacttttgatatttgacgaatgtcatcatgctcaagtcaaaagcaaccatgcttatgcagtaatcatgaaagtatgttgcactcttgctcaactttaaagattcaaaatggagctacacaattttccacataaatttttccattttcatagcttttatttttgacaatctttaatttggcattttttcaggtcttctacaaaagtaattccacaaaggttccccgtatatttggcatgactgcttcccctgttgtaggaaaaggtaaaataatgcttatcttaaaaaaattgagtactaacaagagccaagatatttgccttcctcaattatcttccccttgttggtagcagttataatgtggatgtttgtgaaagcttttattgagaaaaataattgcttgtttttcaaaagttctcttggaaagggataaagtaaattttttttttttttactccaaataagctatttcaaacactcgttctatcaaaaaaaggttcaaggtgggagtgggggaagggaatttgtcacacagaagaaggtcaatgggttgtgtggtctattaatccatttttgtacatggatggaaaaaagtatgaaagatctggacttaagaagtcagtttgttaagttcaccaaaagacttaccctaccattaacaagcaatttttttttatatagtttgttgtgatatatcatgcaaggcactattgttgtgcctaggtagaatgtgtaaatgatatggtgtacctttatatgtgtatacattctctttatcagaataaaaagatcttaaatttcagcaaaggggctgaaagagactgactgtataggatgtggtccacatatagtttgactggaaaccattggttaactttgaaaggttcaaatgtgtcaagaaaaagaaaatcttgtgatgtgagggacctttttcttgaatatgggacagggagtgaagggacaaaccaaggtcacagacatttaatataaatttttcaattattgacaagaattttttttaatgaaaattttaacatgtcattttagttttcaatactttgacctttgtttaatttttttttctctaggactaggtccatctaatcctgcgaaatattattgaaataatatacacgtgtgtgcagttttgatggttggctttctgtttatacatatatgtacatatttttttattttgtatttgaaaaatattaactgttacctgctttacttttgggaatgttgatgttccatcatataaatgttttgttgttcttatatcccatttctgtctgttcttcaagagtgttaccctaaaatttgcctacattgttaataatatattctttctttcctttttatattttatgcatatttctattagcataattgctgaatactgatagtgtagtttattccaaatatgtaaaaccctcttcataatttctgaatttgctggttctttcaattttcaggtgcttctagtgaagcaaatttagcaaaaagcatcaacagtcttgaacatatacttgatgccaaggtacagtttatttagtacaatatgtcaaaattcttaaatttgtgaacaatatctgttgtttgtgtaaaagattttttgtcaaacttttgctgtcctttcctgtgcaagaaagcaaatgttcttcccattagctattgactagaaaccattgatataatggttgcagctgtgtattggttgagctccatataaagatatttgtgtctgaactcttctgaattccttatgtttaccttatatgcgaactgcatggttcttgtggatagttacctagttgttctgcttgttagatgctgggcatggttactaatctgtaatgatttgaatctcatttgtaggtatactctgttgaagacaaggaattgcaatcttttgtgaccactcctgtgattaatatatatcattatgtttcaactgcaagtggggaaactagcttgcacttgaaaattgaggagattaaacgccaggtgcacttttgctatgggttttaagatgattagataaataaggtttactgatccctgtgtaattttatttgaatagtgcatagcaacccttggtaggagtatagaagatcaccagaaacggatgaatacaaagaaacttctgaaccggatgcatgataatgtgattttcggtctgcagaatcttggcatttggggagcattgcaagtaagactcttgtagtgtattataagttttagttctctaatcatttgactagaaatatattaatataagtcaataatgtttttagcagaatctataaataataatacagagaaaatttttgttgttatttgttccattttgttggtcctcctacggggcccgcacacccaaagaagaaaaaacctaggaagaaaaataagcctagaataggctgtggaatttcttggttataatgttaagcttacataaattagacacagtagcagacactctacatcgattcatgaagatgaatggtttagaatggtgttttgtttcttgaagatgatgtcttggtagttggtaccaattcagtttttgctagtgaggtagatgggatatttgaagataaggggatgttatttggaattcatttagacaagtcttctgaatacatgttttccttgggttttggtgtatttatattttttcttgtgttttgttatatatctctgacatctctgttttttctttttaatttttattttgtccattcctgtggttttccatcatgcttcttgttttattgatatcgggaaatgattttataggttagaaggactgtcactgtcactatcttggtttttattctttttccttttctaatatatgtgttcaccttccaaggctagtcatattcttctgagtggtgatcattctgagaggcatgaattagtggaggcagatggaaattcaagtgatgactctctgtgtgataaatatcttgctcaggctgctgaactatttacttcacaatgcatgataggtattttgacattatctgatattcttttaatcatgccactgctgttactaggttttctggctgttatgtgcttccattttgcttgatgtgttaggctaacatttgtctagcaatgaatcagtctttttcattattgttaatttttatgatatgtttaaaacagagttcttgtaggatagatgcttcatttatattgcaactaaacatactttttttgtaggcgacagggtaactgatttatcttctgtggaaatattaaaagagccatttttctcagcaaagcttttacgactcattgggatactatccaactttaggttggcaaaactatgctgtttaaaccactcctttaatacatgttttcatatagcacaagtctcgttgatatttggttatgaaactaatatatttgggcaaattctgattacatgttccaactcaggttgcaaaagaacatgaaatgtataatttttgtgaatagaattgtgacagcaagatccctgtcatacatactacagaagctcaagcttctaagacaatggaggagtgattttctagtaggagtccatgctggactgaagagtatgtcacgaaagaccatgaacatcattgttgataaatttcgttctggagaggtattactattggatttctcattaatttttaaatgaattaaactatactcctgtatatgtgtgtataagttgctaattctcatagaagattctctgattttacctgattggcaatagatatattgagggaatgtaaaatgtctcttacattgcaaaactatgaaatagctgggacctactggagagttttgtaaaaaatattttacctaacttctcttcatgttctttaaatatgtatatatttcctagcttgttagagagttgatcgctagtaatgtgcctgcatggtcatgctgttaacagttgaatctactggttgcaaccaaagtgggtgaagaaggacttgacattcagacatgttgtctcgtcatacgatttgatcttccagaaactgttgccagcttcatacagtcaagaggtcgtgcacgtatgcctcagtcagaatatgcatttttggtggacaggtactactttctaatagatttcagaagtaatttaagcaaatccatccatttggttagttttgtaatcatcttgttgttgcagtggcaataagaaggaaattgacgtaattgatggtttcaaggaagatgaataccgaatgaatatggaagttacttttcgaacatccaaggagacatacatcatccctgaggaaagaatattcagaattgattcgtctggtgcttctgttagttctggatatagtatctcattgcttcaccaatattgttcaaagcttccacacgatgagtatgagcttatttaaactagaccattttgatccaaattatatactctgtgagattatgtcttgatattattcctgctgttgtatttattattagaatattctttttcctgttaattagtaattgattgatcttgtaatcaatactgattcatgtttcatattataaataacatgaggtgtggtctacattgccacttccattagtttcttcgtaggaggggaatgaatatcctctcacacaagattttcacataatcgtatcatatgaaaaaattgtctttcttaattttcacatagactaatatagattttgataatatccctcctattcaatgtatatgaagatagagaaataggtacagagagagagagatgagtagagagagaaacaatggggggggggtgagtgtcaggagtggcggtgaggcaagagtgagaggtacagcgagcttccatgcggacccacaacggacatcagcacacaaggatggacagcaacaaggttacagtcgagaaaattggcgggacaagagtgacatatcaacattctacttcacacgatttacagaggacatcacagagaaggaactatggtatcatttcaagaggtggggtgatgtgaaacaagaacgggaggagatttggatttgcaagattcaaaggagtggaggatgcgcacggtttagcaaagaaaatggaccagatggtcattggcggtctgaaactgtacgtgaacgtacccaagtatgggagagacacgaggaggatggcaccggcacaacccaaaacgcagtggcactaacttggaccatttggaagcatcgaaatggggtggtttttgctaatcaaactttcgaaggaagtaaagtgatggaagatgcgatttttctactatggacatggcttaaacttttggagaagggtttcaccctgcatttcaatcattggtcctctcatctcacagcagcgttttgtaattagggaaaaaaggtagttgtaatattataagtatttgtgctgtgtagtagtgtctttcctcagggtcagctggttcttattgcatgtatcttggcattctgaaccagctattaattcaatcctcttatgtatctatagtacctctggtactcatttttataaatgatacttacttttgctgagcaaaaaaaaaaaaatgttagatggaatctgttttcagacgattgcttggatgtcttggagccagtgctgcactcctaagcatatgggaggattggggatcagagatattcaaagtctcaacaaggctttgctgttcaaatggaagtggatgatgttccaccaaccagaccagctttggactagaatcctgaactctaagtataatggctggaggggattggagcatggtcctagaaagcagtatttctctacttggtgggctgacttaagggccatctctcaacatcagaatgtgatcaatgctgataatcaaattaggtggaagctggggagaggcgacaaattcctgttttgggaagatccttggggcgatgaaggagttcctctcaaggaccaattccctgaattattcactatttcttcccaaagggatttaagagtggcagaggtgggatcttggactgagagtaggtgggtctggaatatggtttggagaagacacttgtttgataacgaggtgcagctagcctctaaattcattgatcacatccatcaaatcagattaattaacaatctcaatgacacctggatttggagagctgaatccactggggttttcacatctaaatctggttatcaagttattaaagctgatagggatgatgaaggtcagtacctgggattcaagaaactctgggagattaaactccctcctaaagccctctcctttgtttggaggttactatgggatagacttcccacgaaggacaacttgattaagaggcaaattcaggtggataatgatttatgccccttctgtcatagtcaacctgaaactgcatcccacttatttttcacttgtggcaaaactatgcctatatggtgggaattcctatcttggataaaggaagaaaaggtgtttcactgcagacctttggataattttctccagcacttctcctcagcagtttcaaaggatgctaacataagaaggacaatgtggtggatagcagttacaagctcaatttggaggctcagaaatgatataattttccagaatcaaacctttgatatcactagactgacagatagcactctgttcctcttatggacctggttgaggggttgggaaaggaatttccagattccttattatagttggtcttcaaatatatctatagcttttagttaaagcttctgttagtagggatttcatctgtgtagggtgttgtatctcctgaattttcaggacccttttctgtattatgtagtacctctagtacttgttattacatattacatattatcttcgctttccaaaaaaaaaagacaattaaccaacaacagaaagaaatgctgatggggaggttttgggaggaggaagtaaaagaggccatgtgggactgtgggagtgagaaaagtccaggtccagatggtctcaatttcaagttcatcaagaaattttgggtcaccatcaagcccgatgtccttcgatttttggatgaattctatgttaaggaatgcttcccaaagggatgcaatgcatcctttatagcattaatcccaaagatggctgatccacaaggattgaatgattatagacctatttcactcataggctgtgtctacaagatcgtgagtaaggttctggccaacagattgaagaaagtgatggcttccattatagatgaacgccagtctgcatttataggtggtaggcacctgttgcacaatgtcattatagcaaatgaagtggtggaggaagctaagaggagtcataaaccatgccttgtgttcaaagttgattatgaaaaggcatacgattcagtctcatggaaatttttgaaatacatgatgagaaggatggagttttgtcccaaatggatacaatggattaaggggtgtttatcatctgcctctgtttcgattttggtgaatgggagtccctcggctgaatttacccctcaaagaggccttaggcaaggcaatccactagtgccccttctttttaatattgttgctgagggtctaaatggtttgatgagacaagctgtggagaaaaacatatttagagggtatccagtgggtagccacagagtgagcatcagcctgttacaatacgcggatgacaattttttttggggaggcatcaatggagaacactaaggcaatcaaatcaattttgaggacctttgaacttgtttcaggcctcaaaattaattttgcaaagagcaactttggtgcaattggtatgccggaatcgtggaagcaaaatgaagctgatttcttgaattgtaatctgctgtccattccttttgtgtacttggggatccccattggggataacccgaggagatgtcagttgtgggatcctataattaaaaagtgtaagaagaaattagctaagtgcaagcagagacatatcctttggggggagagttacactcatacattcagtcctaacatctatacctatttattttctttcatttttcaggattcctagaagggtggtggaaagattggtgcgtattcagcgaagattcctttggggtggtggacctgaacacaacaagattgcttaggtcaaatgggaaactgtgtgtctcccaaaagacaaaggggggctaagaattaaggacatcaacagcttcaaccttgcattgctggccaaatggaaatggagcttgttccaaaatcacacaggcctatgggctagagtgttggagtcgaagtatggtgggtggaggggtttagatgaagcatcacgtgattctaatgagtccatatggtggagggatctgaaattggcactccaccatccgcaaactaagaatgcttttcataatggtttggtgtggaagttggggtgtggcgaccgaatcaagttttgggaggatggatggcttcatgatgggacaacattacttgccaaataccctaggctatatcttaattcctgtcaacagcaacattcagcaaatgggagctcataccgacacaggttgggaatgggaccttaaatggaggaggcatttgtttgacagtgaggtatctatggctggcagttttctgggtgaggtggcaggcatacaggttcagattaattgcagggatgattgggtctggttaagtcaccaatattcagcaaaatcagcctatgatatgctgaggggggatatagtacagggagatgatgttgtagattttgtggaattgtggaagctaaggatcccaaccagaattgcagtttttgtatggaggttacttcgagatagattgccaactaaagttaatctgtgcaggcggcaggtggcaattaatgaatcaagctgcccattctgtgggagcgcggaggaggacgcggcgcattttttctttcactgcagtaaaattttacctctttggtgggaatctatgtcttgggtgagcgtatctagtgtatttccacagcacccaaggcatcattttgcccaacatatgactgccggggtggaaggaattcgggcaactagatggaggtcttggtgggcggctcttacatggttatatggcagctgaggaacaacattatattctcaagtgggactttcaacggaaacaaactgatggaggactccctatttctactttggacgtggctcagaaactatgagaaagattctatatctcactacaatcagtggtcatctaaccttagagaggcttttgtttttagacaaggaaagcagtcatagtgtattgataattgtataaccaagctgtctaatgtggttcccagcaagactgctgtcaagtgtctagtctggcttgggaaccatttatctggatttttgttgtaatcacggtacctctggtactcagattcatttctcatatatatatatatatatatatatatatatatatttatttatttatctttgctgaccaaaaaaaatagtaaaacactgttatatactcaaccaactagttccatgtaaataaagtacaaatcttgtgttttaaaatgtaataatctatctttacaggtactttgaccccaagccaagttttcattacttagatgattcagggggaatttcctgccacataacattgccttccaatgcaccaataaaccaaattttgggtacaccacagttatctatggaggcttccaaaagagaagcttgcctgaaagcaatagaagaactgtataatttgggcgctttaagtgattgtctcttgccaaaacaagatgatgcagagcctgaggtgcaggtttcaggctcttctgatgaagatgaatgtgaaggtcaaacttcagttgctttctgataagccattactttcattgtctttcactgggttgccaaaaattactgttcaaattgtattttgcaataaactgttgagcatatttacttgtcaataactatattaaggagagcgactattccagcatgttgccatgctgatcattttcagacctttcaaatactacataatccattgttggtaattatttttgtaacatacctgtctatggatttagtgttaatcccattgtcagtgtataaacttctacaccatcattcaatcatgtgttgccagatcattagaaggttttttctcctctcatgtagttattgtctcaaactcttttgtgatgatacaataacacatgattggaagagagtgtaaaagttttactccaaaatgaatcaaatcaaaattttcttatgtgttgataatctttaatgggaagctttttatttgttttcagatgtagtaccgttactatgttgattactatcaacttatgtctctagggatgcgactatatcatatgttgtgttgtactatatttattttccttttttagcagatgccatatcaagaggaaaattacatgagatgctagttccttctgcctttggacagtcatggataaatgaggataacattgtccgtctcaactcttactacataaaattttgtccctatccagaggacagggtctacaaagagtttggtctattcatgatgacctgtcttccgatggaggctgagaaattggaacttgatctccatcttgctcatggtcgatctgtgatgacaatgtttgtcccatttggagttgtagaatttaacaaagatgaggtaagtggtgtgtgtatgtgtgtgctttattttattttaagaattttgttaattaatgcttggagttttccatcctgcagattaagatggcagagaattttcaagaaatgttcctcaaaattattcttgatagattagaattcatttccgagtttgtagacttgggtatgagtgctgaatctcactcaggcacatcaaccttctaccttttgcttccagttgtattgcaagaatatggaaatgccatggaagtagattggaagatagtgaagagatgcctttgttcaccaattttcaggcatccagctgatactatggataaaaaagttttccctttagatattcacctgcaacttgccaatggttacagaagtgtaagaaatgtcgagaatagtttagtgtatgccccacataagaagaacttttattttgtcacgaatgttaactatgaaaagaatggatatagtcctcataatgattcaggcacttcaagctatgtggattacttcattgaaaagtaggtatctgtttattattatgggttcattcttgtgttattttggttttgcatccctaattcttctatgtcgatgaaggcatttatatttatgggggcttttgtaaaattgctgattaactgatggaattggatatctgagaatgttggaatatcatatattgtgcttataatatttgacaaaaatatgcatgcttgaatgccaggttttccattcacctcaaatgtccgaagcaaccacttctgcatgtgaaaccggtctccaatttgcacaacctgttacacaacagaaagcgtgaggatgcaggtattgtattggatatgttatttttagcgttagagtctgacaggaacagtgttgattaaaaagaaaaatagagccaaagctccttacaaccagaaaatattttgaaagccttggaatgtaaaacagcaactccaggaataaatgtgactgaaaaagagactccacaaagaaaatctcagccttaggaatggagaaccccacttaaaccatgttctaccaaaattgtccctatgttccttcccactatcacgatcccccttagtcattttgcgcccattcagttaggattctctactattctctttgtttcagctcagcatactcatcattcctttcatctccccccttggaccataactaactcctcttttgccccattatccataatctgaggcccccttgatgtttcttcttgagtaaacacaagatatgggcaatagagcttaatcaactaagacatgagaatttagtttttgttacctaaaaccttttacgagctagtggaatgacaaaaacatgctaggaagagatgtggtagggtgggctaatgcgtaaaatatgttaggttcgcacaagaacaagtgtaccctacgcaataataacagtggactcgaaggtccgaatatcaaccccaaagaaccaattgtattcccaattagttaagtttattaaattaataatagagatgattgaaaagaggatttaaatattttcatgattttagtttttataagaaaacaaataaacaaatataaagatagtattagtgtattaagtaagttttactttgtgatttagttaagggggagtatgaggctcttcttaacaataaaacatgggatcttattcctcttcccaaagacagacaaagcgtgggttgtaggtgggtcttcagaattaagtgggctgtaagtgggtcttcagaattaaggagaatgctgatgggactattaacaggttcaaggctaggttagtggctaaaggatttcatcaggttgttggttgtgactttaatgaagccttttctcctgtgataaaacctgttacaatcaggctaattatccctcttgctctcactaataaatgggatttgttccagctagatgtcaacaatgcctttttaaatggccatcttgaacagactatctacatgcaggaaccacaaggcttcgaaagttcagataaaaccttggtttgcaagctacaaaaagctttgtatggcctcaaacaagctccaagacagtggttggataggctcaaaggaactcttttacagcttgggtttgtggccagcaagtgcgatccttcgttgtctgtttattaagacaaagggcacattatctacattcttgtttatgtagatgatattattattactggtacctccaatgtagtaattcagcaactcaccactaagctgcattccaatttttctcttaaacaattgggaaaacttgactattttcttggtattgaaatcaaatcactggctgatgggactattctatggactcaaagcaaatatacaagagatttgcttcagaaaaccaaaatggcataagcacaacctatttcttcccctatgattgctaattgcaagttaaccaaagctgactcggatttattcggtgatccatctctctatcgatctgttgttggtgctcttcaatacacaaccattacaaaacctgagttaagctatgttgtgaacaaggtctatcagttcatggctaatcatatggactctcactggacaactgttaaatgcattctaaggcacctcaaaggctctattcatcatggtctgcatttgaaggctgctccttccttagaggtggcagacctggtggattgctttgacatggtgtatttggcagcataggaataggatggtcttccaaaatgaaagtttcaacagtcataaagtgatggagcatgctctattttattgctgaacctggcttaaaaatctggagaaaggatttgatatcctgtttcacttatggttcagtaacattagggatagttttttgtgttgaggggggatagtttatataatacaagttaggctggatgggtacctagcggttagctagatctttggtttcctaattcaagttggttagcatgtattaggtcactacagttctgcaccttgcaagtgctaggatgtatatacaactatactgcttgtactatttttaatattctatataatatatatatacttttgctgataaaaaaaaaggctgctcttcctctcagccttttactatcaaagccctgtgtgatgctgattgggcctcggatctagatgatagaaggtctacctttggtgcagtgatttattttggtcctaatttggtctcatagtggtccaagaaacaacaaattgtggctagatcttccactaaagttgaatacaggagctcgactcaagccacgactgaagttacatggattcaaactctcttaacaaagttattgttctttttcagaccccagagatttactatgacaaccaaagtgcagctatatcactcataatctagtttttcattcccggactaagcacatgaaaattgacatctttttttgtcaaggagaaagtcttagctaaagagctcaaagtgtatcatattcctgctatagatcaatgggctgattccctcactaagcctttatcaccaactcgatttctttttcttaggtccaaactcaatgttgttgatttctgattctcaaccccattgagtttaaggggagggggggggggggtattagtgtattaagtaagttttactttgtgtaaccagaagacttaatagaaaggccttggccattaccaatgtatatttggtctggccttcaaatggaccaagctgctacatgttttgagactctccagttacgtagaacgatgcacccgaatcaggtatccaagtagtagagttaggatcttgatttttagaattaaccagcattgcactaggttaggagtctttgtgagaattagttccctgattttgttctgaaccgaaggtgtttgatgaattgctttgaaatactggttccatcagagtgagagacgcatttggctcaaaatcagaatcatagcgaaaatgacacatcgttgctgtgtgaccaaatttgaagcaaacttggcactgaaaatttgcataacgaccggggcctttaccgccaccacggcgacctccattgccgcagtcagaatcattgcctccatgactgtagcctccgccgtgattgaagccaccacgatttccaaaataattggatcaattttgtgaattgaaattattcgaggatgaattgtaagaatttgaagatgaattgtaaccttgagcaacattaatcgaaggtgaattagcaaagcgcttctgaaactttttcatgtatgtctcatgtgcgagcaacagtgccactacttctctaatcggaagtgattccaacttacttttgatcattgagatcactggaccgtactcctctggtaggccttcaagaatcacgtcaaggtgttcacgcagaaaaataggatctccacacgatccaagcgcaccgactatgcatttgatgcgcaaaagaaactcacacattgttttctgttcagacattgtagttctgagttctattcgaagtatcctagctttcgcacgtgtttgcttttgaaaatactcatggatctgctcccaaagctgatatgaatgaacgcatctgataattcgagatatgattgaaacttaaagagtcgattggagccacgacaagagaatctgatcttattgttcccaattggtgtatgctggattttcatttccagcttcacaatctgcctctgtgagaaagcgcatcgggatctaaggacttgccacgaaacgctgaagtctatgagccttgatgacagattctacttgttgcctccatagcagggagttagaatcatctaacttctgagaaatcggatgaaaagaaggttcggaagcaaaattctgatttgtcaccatggatagaccttaagctctggataccatcatagagtttgagagagagaaaaagaagaaagatgaaagatattattattgatttagaaagaaaaggtcagttacaaattaattttgtttctctatttatggagaaaacaaatatggttacacataacttgactaaggcagttaactaaccaaagttagttactgctctaatagaaataattgttctaacagaatcacaagtgttctaactgaatcataattgctctaacagaataacaactgctctaactgaatcacaaagtaaaacttacttaataccctaatagagaggtttaagtaacgataagaatgatcaggagttatgactgactgataccaattttctcttaatcctagtcttaatgaaattcccccagttaattatcgattttcaaaatcaactaaaacctatgatcaagattagaagatgtttttttgccttaaatcaataccccaatgatcatggatctatcaatttaatccaaatgattaaatcaattttagggatgattaattaaagattaactaatctattggaattacccaaatagtttggatcatgcaatttggtataaaacattatctaccaattacatgcagaagatcattactatgcaatcgattgagtattaaaatgacccgttccaaataaacattaaaatgaggaagataattaattaacataaaacaatgaagaatttcatttagattaaggagaggagtacaaatggatagctacatcattactctcgaactaaggggactacccatttatgatcagagcaaaactaaagaaatcttagagagagagaaaacatcactaacaaaattgaggtgaagtgagatattattcaacccaaacagaaaccgagtataatacagtttatatagcagttacgatactgtaactgtcaactaacttgagttagttagtgcaactgctgaacagttgtcctaactaattgtcaactaacatagctgtaactgcctaactaatgtaaaccaactatagttagactaacagagtaacataactgtgtaacagcatgactaaatgaaaagaaagagttacactgagtaagtatactcctataaaaactagcaattctatatagagtaaacatagacatacctataggcaggaacaatgatcacgagatccgttctaacggtgttgtccacactcttcagctttcaaaaaccctcaaggttctctcaaattcgtaaaaagataagaataaaattgaatgcctttatttataagtcagagacctctatatatagcttcctaaagataaatacacgaaaatgtgcattacgaccatggtgaatccacctcaccacaaccgtcgtcgaaagtaacactgaagccttgggttatggattgactacgactctcttggttgaccaccgccgtggtgaggtcactcgttatcaaatccttgatgctattctgaaagggctgttatcatttgactatagctgtgttgatgaccatggccgtggtgaatggatcacatccattatcaagtgcagagtcttcaaatcttcataaatttgtgtaatttctaactctttcactcaattgagtgattgtacttttgcaatacaaaactagtatccaaatgtgagttttactaaaaaaaatgcatacaaaatgacacaaaaaatcacataaaataccacccataaagttggtttatcatgggcttactgctattgacgtgcaatgaggaaggatttgctgctgagaagtggacaatgatatacattacagatatacaatccaaaattagttcttaagattgatcctaattgattcttccatatatacatgatatgctaccataaataatctagatattataattttgatttctgacaatttgtgtcctgtgagcatttctttatgattttgtgttagcaatttaaaaagtgtactgtgcattgactactttcaaatttgtatcttgattttgaatttatcttgtattctgatcatttttcagaatcttatctaatgtatgtaacttttgaatgtcaatgacagaaccacaggagctggacgaatacttaatttatttgcctcctgagctttgtgaactaaaagtaataggtttttcgaaggatattggcagttccatatctttgctgccctcaattatgcatcgtcttggaaacttgctggtggctattgaactaaagcacatgctatcttcttcctttccagaagcagctgaaattagtgccattagagtaaggccttattaaattcaatgtattatttacattattttcaagtagtgtattcttattcacatctaaccattgcagtgcttatatgggacagatgaatcttgtatacagctactaacaattgtgaacaaattactaggttttagaggctctcaccactgagaagtgtcaggagcgcttttcccttgaaagacttgaagtgcttggtgatgctttccttaaatttgctgttgcacgtcatttttttctcatgcatgacagccttcatgaaggagaccttacaaaaaggcgttccaatgctgtaaataattccaatttgtttaagttggctattaagcgcaatttgcaggtagagttatactagcacatccctgcttcatttactaagaaagtataattattcttatttattgattttctgttagactagggtttccacagcccccacattccatttcaaaacaaaatcacctgttgatgctttcttagaacgttgatctctcattaagaccatgagaaaaaaagatatacgtgggaaataattttaataaatacctaattaattaatatatatactaaaattatattggcaatgaaaaacatatagtgccggatttgagtctgtctttaatttctagctcacccacccttatcgttttaggagatagatagacacaggactctaccaggaatcccccatttcctgctctgggacctactactgtgtctcaaaattgttgagccaaaatgagaggttcaaatcctatttatgaagttaattcatgcatttgatgtaaggtttcctggatggattaaatggtggataagttcttttctatcacataaactcctaataattaactacctacaatcctttaacagatccttcctgactaacttggatctcagttcccatcaaaataacacttggataacataaatccaaaccctatacaattcctaaccgaggattaaagatactggagttttccctagaactgaataatagaaattaactgaaccatttagtagggcttattaccttgataagatttttctatcaatatcaggctttagaatgggttaatgtatatattttaggtctttgtatatatattaggttgtgttattttattctagtctggctcattcaacccataggccatgattatatattattctatcttgtaatcttttattttttatcaatagcaaaacactttctctcttcattttcacagtgcatatttttatttactgacttgagtcttatctctatctcctcgctccctcttgcaggtctatatatgcgatcagacatttgatcccactcagttttatgcattgggccgtccttgcccaagagtttgtagcaatgaaaccgaagaaagcatacacttttgtttaaattctgttatgcaacaaggaaaagcaactgaaacccgatgtagcaaaaatcatcattggttacataggaaaacaattgctgatgtggttgaagctctggttggagcattcctagttgacagtggctttaaagctgcaattgcctttctttcatggattggcatacaagttgattttgaagcttcacaagtggttgatatctgcatagcaagtgctagctattcccctctttcttctgaagtagacattccttctcttgaaggtaagctaggacatcacttttttcataaaggcctgcttctccaggcatttgtacatccttcttacaataagcttggaggaggctgttatcaggcaagtgtaacttttcttttccctcccagtgttctgacttcatataagaattatttcctttactttatagatctatgaatcctagtgagacatttgatctttaatttttaaaatgtgataattctttgcagcgattggagtttcttggagatgctgtcttggattatttgattacttcatatctattctcagcttatcccaaactaaagcctggtcaattgacagatttgagatcattgtctgttaacaacaaggcatttgcttgtctagcggtagatcgcagttttgataattttcttttatgtgattcaagtggcctgtctgaggcaataaaaaagtatgtggactatgttagaagacctgtgtcagataatggcattaaagaagggccaaaatgtcccaaggtagatagtatgacctttatataaagttgctacacctggttgttgttgttgttgttatgcatttactcatctaagatgaagttcctaaagcattatgtctgtattcatttcaaagtttgctttaggtattttacttggaataatgctactcccacacacgacacctcacatctgtaaagtttccattatttgatcatagctcacctacactttgattctgccatctatgcttgatgtaaattgatgtgcacccactgtcccacaagatgtgtaccaagcattattcttttacttggaaatgacaagagcaaataaatggaatactaaaagagaacccaagcccttgtgtaggaagaagacacagaaaacccatccaaatgattgccaatatttttgcaaaaaagcacaaaataagccagtacatgttgggtgggaaagcctgacgcgtgacagtcaactgaacaaattatttattatattgagataagatgacaaatttaccttctgctctatgatttgtgttatggacatgagtaactcttctaggaacattacgagtcttttgtttgtccaattcaagcagctcataagttaattaagtttctgataggtgtgcattgctttgttattttgcatcaaaaggtatatggggtataaattgacatcattggtttcttcaggcactgggtgacttagtggaatcttgtgttggtgccatccttcttgattcagggttcaatttgaacaaagtttggaagattatgacttcattcttggacccaatcatgaaattctcatcaagcttgcagctcagtcctgttagggatttgcgagaactttgccaatctcataatttggagttggagtttctgccagtgccctcaaaattgactaaaaggttttcagttgaagctaaagtgagtgggaatggtgtatgtgaaacagcttcagcaactggccaaaataaaaaagaggcttgcagaattgcttcacagctactttttttaaagttcaaggtaaagcaatcatgttaagttttattttttccatccttattttctcaactcaacaccttaggattagcatttctttattgtacggtgacaccacaggtgagtatattacttttgtgattcatgtaaacaagggtaataatcatattttaactttttctgctgatgtggtgaaatcagttgtgcttatattccttaaatttctaaatactctagttgttaatgaaacaagtgttctagtttaagatgttccttgtttcttcatttggagctacttttgatcaagttcagaataatgcaatagtacctctttttcccgaaatgagaagcttggtagtaacgtcatattttttttactgtggagttcttgtaagttgaattgctatactagatagattggctcacttagtccaacagattatggacaaatttcattattatatattcattttcctttatattttccgtagagctgtctagtgtattatgtttgctttcttctgccaagttctattctttatataactttagtttgggccaatcgaaaatagtactacctccaatcctatatataagaaacaactgtctaatttatcaagatcagtaaacgtggttagattggttaacttgtcataaattttaattttattccaaaatggtacattaaatgatttaagagataattattttttaaaagataatttttcaacctatgagtataccttgcgttaagaagagagtgagagaagcaaagctattttgaatatgtctttctgggttttatcttccacccagtcaaaatgattacatggataataaataactattcttgttttcaagagaacaattaaaatatcacaattttctaagatacattgaacccaactaactattaactaagctacttgaaaggaaattatcattaaatgctcctcttttcaacactccccccaagctggagaatagattttatccattcccagcttgtataatattctatcaaaatttggagtgtgcaatcctttagtgagaatatctacaagttgaccttgtgaaggcacatatggagtgcaaatcaaaccactatccaacttttccttgataaaatgtctatccacttcaatgtgttttattcgatcatgttgtacaagattatgggctatgctaattgctgacttattatcactgtagagcttcataggtccgtcccatttaatcttcgagtcttctaagatgatttttaaccaaagcaattcacaaataccttgtgccatagcccaaaattcagcttcagctctagattgtgctacaacatcttgttttttactctccaagttaccaagtttcctcctagaaaggtacaatatttggaagtggatttactatcagctattgatccttcattgttagcattcgtataagcttcaagtattgtattcccatttcttttgtacaaaattcctcttcctggtggtgtcccctcaaggtaatgaagaattctataggtaacttgtaagtgaacttctcttggacaatgcataaattggctcaccaaactaacagcaaaagtaatatcaggccttgggtgagacaagtaaatcaattttccaactagacgttgatacatctccttatccgcttctgcaatgtcatcttcattacccaatttaaggtttgaatccatgggagtacttagagatttacaagctgtcatgcatgtctccttcggctaatctgtgacatatttttgttggaatatgaaaatacctttcttggagtgggacacttcaattcccgaaaaatatttcagcctcccaagagttttcatctcaaactcctttgctagatgctgacttaagagtagttgttccttccaatcatcactagtaacaatgatatcatccacaaatactaacaatacagtcactccccctgaggttgagtgtttgatgaataaagtgcggtctccttggctttgtttgtatcctaaggctgtcatgaccttagtgaatctcccaaaccatgtctgaggggattgtttcaacccatataaagtctttcttgactggaaaatagaattggcagcatcttcatatccaggtggaacctccatatagatttcctcctcaagctccccttgcaagaaaacattctttacatcaaactgttgtaatttccagccataatttgcagcaagagataatattactcgaactgtattcatctttgcaacaggagcaaaagtctctgagtaatctatcccataggtttgtgtgaaatccttagcgaccaatctcgccttgtacctctcaatcgacccatctaccctatattttattatatacacccacttgcaacccactggtttctttcctattggcaaagaaaccaactcccatgtcttgttcttctgcaatgcctccatttctgtatccatggcctgcttccaatttttatcaggtaatgcctcaaaaacattagtgggaattgagatagagtttaggtttgcaagaaaggttttataggttggagagattttatgaaatgaattgtaatttgagagaggatagaaaggctttttggtacatgttctggttccttttctaaaggcaatgggaagataaaggtcgtcattatgttctgaaatttccatttcatttggagaagctaaaatattatcattcaagattggaaaatcaaagttagttacctgatctaaaggagttggattggcctcttgggcaagttttgatttagaaatggcctttgatcttcttgtgtaaaccagattcttcccaaaccttgtatcattttcaagtctggtgggtgcatccttgttggattcattttgggctaatgtttcttgcttaggtttttgtgtaagatcacaattccttgtcctggaatacacaacaatggtcataaaaaacaataatacaagatatgtcatttgtatgtttctgaacagagacaagatttgtggacaattttgggacatgcaaaacattttttaggttttgaagggatttatttggatgtttcctataccggctatagttacaagagtgccatcaacaataattattttcttattgctaggacatggagaataggtggagaagatcatatggtcagtggctctagaatctaaaacccaaagggatggaaggattttttagacattaatttcaaatgaaagaggaagtatacctgaatatgccaatgtacaagtacttgatggtttttcaaggttgctaaaaaaggctctcattctttctatttttcaagcagcaggaaaaattattggaaaactgagtcgccggaattctaacagtcgctggaaaagtctccggaattttggcagttatcggaaaagtttgacagcttcaagagcccagtcaaacttgctaaataaccaaccctttttgtgcagaagcagagcacccctagatcaggagctctgatattattcgagaaaatgagagaaagaaagagagaaaacgagagagaaaggaaaatgatattattgtgatctgaaaagttagttagaattagttacaacagaggtatatatagacctctgaccctctgaactatcactaacagactctgacttcctaatactagtgaggtgttgttagcaaaagctaatagaccttacaaacatataatctgatgtctaacactagaggggtgctgttagcaaaagctaacggcccttacaatcattctataaaactgttttcacagttatacaagtacttactctaataccccccccccccccccccctcaaactcaaggagaagagttttgagaagaaacactcttcacattgaatttgtccctgagaacttcaaatcttgctgcagaaagaggcttggtcagtacatcagcccactggtccagagctggaatatgcacaatggaaagttgcttggccagaatcttttctcttacgaagaagacatcaattttcatgtgttttgtacgaatgtgaaacacaggattgtgagcaataggcacggttctctgattatcacaaaagattataggagtagtgaatggaacttgaaactctgttaggagagcatgaatccatgttaacttagtggaagtttgagttaaaatgcgatactcagcttcaatactagacctgacagcgaccttttgtttgcgagaccaccaagatattaagtttggaccaagaaatatggcagcccctgaggtggaacgcctgtcatccacattggatgcccagtcagcatcacaacagaacacgcgaagagccaagggcttggtaacagaagtaggctaaagaagtagtccatgaaacaaagtacccttgagatacctcaagattcttttcagcaccgcctagtgagagtttagagatgcagccataaattgacaaactttattgacaacaaagttgatttcaggcctagtaagagtagcatattgtaagacaccaactatagacctgtatagagttgaatcatgaaagatatcaacaccatgtcgagataacttgcaattagagaccatgggggaagaaatagaataagctttagttatgtgagttttgtggagtaaatcatgaatatatttactccgagtcatcaatatggagttattgggtagatacttgatctctagacccaaaaaataatccaaatgaccaagttgcttgagagagaatgcaatgtgtagtttggttgtgagctgctgaattagagaagcagtgctacccgtgatgatgatatcgtccacatatagactaaaagatagacaatatgcatttgttgctcgtagatgaaaagggaagaatcacatttgctcccaacaaatccaaactgcagcagagtaaatttcagtctatcaaaccattgccttggggcctatttcaagccatagagagctttgttgaacttgcagactagggacctatctgtaacttcaaaaccaaggggttgtgtcataaatacagattcttcaagaagcccatttagaaaagtcttattcgcatcaagctgaaacaacttccacccatgtgacagagcaagggtgagaacaatatgaatggtgacaggcttgaccacaggagaaatgaaaatcaaagccatgaatttgatgaaatcccttgactaccaaccttgctttgaacctattgatggaaccatcaacattttcctttactttgaaaatccacttacacccaatagcttgtccattggaaggtaagggtcccaagttttgtttttcaacaaagcaccatactcttgttgcatggcagcaagccaatctggatttttcaaggcttgtttcacagttttgggttcagaatgggtaagaaataaaaaaggatgtagtctaggattgtgaattccagacttgaaccttatttgcataaagtgtgtattatctggtatagaattaggtgctgaaacagactcagaagaggatgcactaggggtactggattttgaagtttgaggatgaacagaggtaggctcagaggaagtggatgatggacaaggcacagaaaaagaggttgtgggggaatgagttggaataggggaaaaaccaaagggaacaagaggtatagaaggagaatgaaagggagacaattgagaggattgaggggtaggaataacacaaggtggagataggttgggattaaggctgaagtaggaatcaagattcttaatggggttagaagatgaaggaaacatgtcagaataagggaaccttaattcattaaacagaacatctttggaaatattgattctgccaaatgaagacaaacatttgtaacctttgtgggaggaggaataccccaaaaataaacactcctgagatcgaaaatttagtttgtgtgtatggtaaggcctcaacaaggaaaacaggcacaaccaaaggttttaaggaaatgaaaatcaggatccttgttaaaaagagtaacaaaaggaatgacaaagttgagggaagcagtgggaactatgttaattagatagacaacagtagtaaaggcataatcccaaaattgtaagggtaaagaagcatgatgcaacaatgtaaggcccaaatcaactatatgtctgtgctttctttcaatcacaccattttgatgatgagtgtggggacaaatgagtctgtgggagatgtcataggaggttaagagagtagagaaaagtttgtattcacccccaatcaaattgaatactcttgattttgcagttcaaccatagatttggaagcttgaaaaacagaaagagtttcagccttaaactttgataggaaatattcaggtgtacttggcaaaagcatcaataaaggagacataatatttataaccagcatatgaagtcaaatgagaaggtccccacaaatctgtgaaaataagctccaaaggagagtaaacagaaacaaaagtgtgagatggtaatctatgagatttttccatacagcaggaagaccaaaaacctaagaaatttttatttgatggagaaattttacaatgattgaagacaagtttcattacatgaccattagggtgacctaatctaacatggtagaggctagcagtactagaagaagaaacaacataattagaaactacactagagttattattaacagtagcagttggatagacaagtcagtatctgaaattgaggttgaggtagacaacaatagaggagagttgtcttgaagcttgagattatgaaatgagtaaagaccatcagtaccaacaactccttgaagaaggactttattggtctcctgagatttcacaagaacaagtgaggatgaaattcaaagaaaacaaagttatctttagcaaattgactcacacttaacaaattttttgaaattgaaggaacatgtaataacttgtgaagtttaaatgttatgtgagcatcattggaggacacaaaagaagaggaaccaacactggagatactcaaaccttcaccattgcctatgaaaatttgatcaggtctatcaaagtgagtgaattggttgatattctgtgattcaccagtcacatgaaagctggctccaaagtctggaatccaggtagagccatcaggaccattcccacaagaggaggaatttgtgagcatagcactgggttgattggaggttggaacaacagccttggaattaggactaatccaggtattggaagttctgattgaaccagtggagttgggaattggttgaagtgtggtaggatcaaagaaggtgagtgattcatgaggctaaaaactcatattagacctaaagtggcaaacattggcaatgtgtccatacataaggcaaatttaacactgaaagttggcaaatcgaccaccatcacgacctctgtcggagccaccaccaccacgttcgacaccgcgatctggaaaatcaccacgacaaccgccacgaccatacgaacttcgagaaccagcaggatcaccggatttataagaattttggtgcgaatagccttgagtgtaattcaaggacggagaacttagcaccttgttagacttttggcaagcgtaccaatgttgttgcaggttacagatttataaaaagagattgtctccacaaggagatgagttactcaattccgccgaataaaagtaaacagttcaatagttatgtacaaatttaatcgagatatcatggatttgtctaactaatgaaaaataattgacgtaacagaatgacggaaataacagaatttagtgcgtcagaaatacgtaaaattatggaaacaataataatgaatctaattaatttaagaaaaatgtaggattggatttcatcgttctaataagattaacatatatgaatcattttctaacattactaatgaatacattaaattatcccaaatcaatccctcacactcatgaatcctaagaatatttactgaatatcgatccctctcactcaagagtcctaaaaatatttaccaaatattgatccctcgcatatgaagtaaataacccagcattacaatcataatctcgtgctatttgcaatcaaaacgtaatgctctattcctagcaatgtaacgtaaagataaattcattaagttcaaattctaagtattttccggtcaaacttaaaatccaattttatgaaattagtgatcaaatagaatcaagcattacgaacaaaatgaaattaccaataatgagtagaaaagattcatacatatataaaatatcaaaaaagatacataagggtacgaagattacatccaatcttttggagaaactagctgatcattgcgtagagcacaagatcaacaagagaaatgacgccagcaagttcatcatcatagcctttaattttacgcaaatactcatagattgatttaccgtcaagcaaaaccgcgcgcatcgcaattcgaagctgtcgagcatgagatttcttatgaagattgaagtactcatgaatcatctcccaaacttgataggagtgattcgagtcaagaatgcgcgatagaacgggtttcgagagagtagattaaagcaaaacaaggagcgtttggtcctaaacttcccaagcttcataatcaagattcatgcaatcaacaatgcgatcatccttcgtgagataacaaggcagaacgacgggattgacgatgaaacactacaatttatgcgacttgataaccggttctacatgttgccagtggagatagtttgagtcatcaagcttcttggtgatagagtttggaacgactgagaaacgagattcaaaggagcggaagctatggatgcacggatctggaacttcagaaggaacaataactacaaaaaaatggctctagataccatattcgagaaagaaagagagaaaactagagagaaaggaaactggtattattgtgatctaaaaacttaattagagttagttacaacaaaggtatatatagacttctgaccctctgaactaacactaacagactctgacttcctaatactagtgaggtgctgttagcaaaagctaacggcccttacaaacatataatctgttgtctaacactagaggggtgctgttagctaacagcccttacaattattctagaaaactattttcacagttatacaagtacatactctaatagataccatgttaagaagagaatgagagaagcaaaactattttgaatatgtctttttgggttttatcttccacccagcagattgatttatttataatcagaatgattacatggataataaataactaattctgttttcaagagaacaattaaaatatcacaacttcctaagatacattaaacccaactaactattaactaagctacttgaaaggaaattatcattaaatgctcctctttccaacaccttgttttgttgatagttcataaatgcacccactttcatgggaaaatgagtatatatcattgatagacctcacagttaattaggagtaaaaaggaaatttaacaataaagtagttttatgtttcttataattaagaccaagaaaatgttgtcttttgttacttatatagaggatcggaggtagtatcttttaaaacccattctcgtgccaaaacacaattgtagttttttagtttttcaaccgtcattttataagagctttcttttaaaataaataaataaataaaagggatgaaagtggttcatattcacccgcatcagcatattactaatactgggaactagcccttaaatatgatatctccttgatttttttctttgacatcatccctgtagagagaaatctgtatttgtgttatatcagtggcaaggcactgtacagagaggtcttgttattaacaaggaagagtgcaagtatctgtctagtacaattattgaagctgtagtatagctatatgcaatgacaattaatgcagaacttaagaactaacattaatatctcaattctcaacattccttggtgaatttcttcttcaacatgcataattaaacacaaattccctaagcctagtactgtattgttgtacaaaacacttggctagatgcattttatcttccctagctacaactccaggaactatattgtttgaatttaacagtcatgggtgtggatgtgcaggctcaaggttggaaagctaagtcaaaaaccctggaagaagttctggaatcaacttctaaaatggaaccaaaacttattggctatgatgaaactcccattgatgtaacagataccaatactgccaagcacatagtggttaatgctgacccgtacaacaactctaacccagaaatttgccctatgcaactgacagatgaaatatgctctccatgtgtgaaacctttcggccaacggcttcaatcttctgctaagggaaagcttagtcaaatatttgaaaatcgtgattgtggcagtgactcgtctgggacaggtagtataaaaatcatagtatttttgtcgatactgcgtctctgttaatcctgaatattgtttcatattttttgtacaaaggaacagcaagatcacgattgtatgaattatgtgctgcgtattgctggaaacctccttcatttgaatgctgcaagaaagagggaccagaccacctgaaacagtgagttactttaaaaataaaatgaagttttaaacatccgtactatcaggtttcagctttggaatttcactcaggatcttcatttcatcctctgaaaatccaaagttaacaatagaagttcaaaactagctatcaatgataatgagaatcacagccaaaagaaaagaaaaatatccctaaaaacttgtttatattaacatggactaaagtataaacaacaaacattcaaattttgtagactggagtggtgtccttaaagggctgtgtaatttaagcatctccatgaaaaaacgggtggattttctcattcaaatcaattacatttctgaatttttgacactggtgatgaatggatgatgataattatagttgaaatttgtaatctttttcatcaatatttagtatatatataaaacttggttcacttgcattccgtgtgttgttttcttaacgactctaggttccttcgtttcagggtacatagaactttcacttgcatttgtttattgttccatttttagatttacttgcaaggtgaccttagagatagaagaggcccagaatttgattttagagtttgttggggaacctctgtcaaagaagaaagatgcagcagagagtgcggcagagggtgcattatggtatctacaacatgaaggtttcttgcctagtattggtaattgacatattgcacaacaattatcatgtcacataaatctgaggcaatgtcttagggtgtcatttgaaatttctggatgcaccctcattgttattgataatcatataaatctagaagacaataatagataatacaggtttagtaacccagggccagagggttccctaatggtaatctattgtaaagcattatttatgtatgtattattgtagtgtcaaagttacatttatttgtaatgaccctcgattgtaacagtgaattttctatttactacgtttgaaatataaatataagctcccgaaacatttgaatggtaa

SEQ ID NO: 228 - DNA, 36332 bp, Glycine max; identical to SEQ ID NO: 227
  source 1..36332: mol_type = genomic DNA

SEQ ID NO: 229 - DNA, 36247 bp, Glycine max
  source 1..36247: mol_type = genomic DNA
ttaggtgtagccactatcttaacttgaacttaatttttaataagtttggtagctcaaattttttactagctcatgaatctttgcaaatgcttccaaatcttgatcattttgtctggtacaaggtcattttagcacttgcaagtcatggacagagttccaaatacaaggggtcctcttttaaaaaagtttaggacattaaaacttatgtatttttttgtgtgtgtcttagatgttttataggttaaaaaagtacagaaaataataaaaggttgagaaaagtttaccaaaaagcttgaaacatgtgccttagtgtaaaagaaccgttgtgagtagcaatggatgtctacattcaaatttttaccattttggtaataaattttagactttgaataaaaagaaaaaaaagtgtgtttagcaattttggtgaaataatttaatttaatataaattaatgtgctaatgatcaaactagaatgttactaacatgtgattacttcacggtatttcagtaagctgtagaagccttatcaaaggcgtgcattcaacattaggtaaaattataacatttcaatcaacaatataaaatatagtaatccaacatcttaaggaagtttaactataattcttaatgaccagtcattattaatttcatcatatacttgactatctattcccaatcacaagctaatgttacattgtctatttcataacatagtctaagttttagttgaattaactactaagttttcactaaaaaaatacataaatttatgataaaataggtggtacattaaaaatgttaaaatatgttataacatcatttaattttaatttattatgcatgaaaaatttgttaacttttattataattatcttaaaaattatataaaataatttataattgattcacaatgtaaataattttatattatcaatgtaacatattaaattcttaatctatttaatcaaaacttataattatgaaaaaatcatttaaatagaaattacatgaaatcaaggtgttgccattgtggtgctcccaatagtatatacatacacaaaatctaatctttattttctctttgatagacataaaaaagtttgattgatgataataaaatagatgagtgagaataaataagaaataaaataaaattttaaaatatttgattgaagataaataaagaaaaaacgagtaaaaacaaataaaaataatacaactaagtcccacaatttttaaaaatgttttcaccctattcatatcttaccaaacaaacaaacttatttcgatttctctccctctttcctatgtttcatctatcaaaaatcaaacaaaggctaaggataatataattttttttatgtcctgatatataaattttatttctacataaaaaaaaaatataaaattgatttctaaaaagccattttgtttggaaaatactagtaacaaaaaacgacatgggggagtgttgggaatgaagtgatgcgaaaacgtgcgtggaaacaaaacaaagaacaaagactttcagtcattcagtctttagtgagcgtgttcactaaggtaactcttcactctcttctccgttgactccataatcaacgttttggttgggaacagaagtgaatgaagtgactacaaacaaagctctctctctgttattattattattattcattttctcttttcacactcctttgtcctttgaacccacccgtgaactctccaaccgtcgtcgttttgatttcacccactctcatacctccaaactctcttttcctcggctaatgccggacggagaatcctctgccgtcgccggcggccaagtttccatggaaccctctttaagcctctccgatcaactacagtccctgagtctttcccaagtaaaaaatcatgatgactcggtcaagaaagatccccggaagattgcaagaaggtaagtaacttttgctacccctttgttcttttgattattttcttcactgagtcacgtttatttttcaaatgggtgggtggagtttggctttttttattttatttttttattgttattttttgcacgtgggcttggtcattattgcttggcgttgtttgctgttgtagttagttagttattttttttgtttggcttttgagaattggagttgaagaaaacgcctgtttcaagattctgcttaaaatgtgactagttgaattgcactagcaagctttgttgtgtatgcaagattgtacttcttgcgtctgtgaaattttcaaccgagtgttttgttatttatatgttttattccagaaaatgtttttgtagttcaagaaaatgttcctaatttatggtgatcagatgtctgaaatgtgatgccgactatgcttatcttttttattcttcacttgtcttctggaactccaataatcttatgaatgttttggtcctttaaaggtatcagttggagttgtgcaaaaaagctatggaggaaaatataattgtgtatttagggacagggtgtgggaagacccacattgctgtgcttcttatgcatgagatgggtgatttgattcggaaaccacagaagaacatatgtgtctttcttgctcccactgtggctttagtccatcaggtgagctgctgtacatattgttgcattcaatgttgttattgtacaaaagtatttttttgggaagtacaatattttttttttctgggcaaattagaaatataatggaacaaatatctttttcctcccttttatttttgggtgctctgtactttggccatttcaggttgggtaattttgtgttgcaggtttacagtctgtaaggccagtgagaatggctttctgggataaataggcctagcaaggaagtattctgttgtattataactgaacatgaaaattttaatgacagatgacctttatacctttgattataatcattgcaattgggtcagtctcaatttcccgccaatctttttgaataaaacatttcttgaatctagaattagagatcttagtgatctacttgttatgtcaagcatggttgttttatgtgtgaatctgatgaattaatttgttctcgtgtttaataatgtcccaccaaactttagttttaactgatttcactatgttggtcaattccatcatgtgttttctgaagcctattttttatttatctatagcaagcaaaggttatagcagactctactgattttaaggttgggacatactgtggaagttccaagcgcttgaaacatcatcaagactgggagcaggagatgggacaatatgaggtgataatgctagttaaatcatgttgaaattaattatgtttttctctaaattattttattttatatccagacttgttactgttacagaaattttaagtaaaagctgttgaaagaaagttggtttcatcactgaaatttaatttggcaaaaaattcaaattagctcctgctgttttgaaatcttaaaatctgcttacttaaattttaattccatgttgttttttgcttctaaaatttctgtgttcttgtttttttcccttcaggttcttgttatgaccccacaaatattacatcataacttatcccattgcttcatcacaatggagatgattgcacttttgatatttgacgaatgtcatcatgctcaagtcaaaagcaaccatgcttatgcagtaatcatgaaagtatgttgcactcttgctcaactttaaagattcaaaatggagctacacaattttccacataaatttttccattttcatagcttttatttttgacaatctttaatttggcattttttcaggtcttctacaaaagtaattccacaaaggttccccgtatatttggcatgactgcttcccctgttgtaggaaaaggtaaaataatgcttatcttaaaaaaattgagtactaacaagagccaagatatttgccttcctcaattatcttccccttgttggtagcagttataatgtggatgtttgtgaaagcttttattgagaaaaataattgcttgtttttcaaaagttctcttggaaagggataaagtaaattttttttttttttactccaaataagctatttcaaacactcgttctatcaaaaaaaggttcaaggtgggagtgggggaagggaatttgtcacacagaagaaggtcaatgggttgtgtggtctattaatccatttttgtacatggatggaaaaaagtatgaaagatctggacttaagaagtcagtttgttaagttcaccaaaagacttaccctaccattaacaagcaatttttttttatatagtttgttgtgatatatcatgcaaggcactattgttgtgcctaggtagaatgtgtaaatgatatggtgtacctttatatgtgtatacattctctttatcagaataaaaagatcttaaatttcagcaaaggggctgaaagagactgactgtataggatgtggtccacatatagtttgactggaaaccattggttaactttgaaaggttcaaatgtgtcaagaaaaagaaaatcttgtgatgtgagggacctttttcttgaatatgggacagggagtgaagggacaaaccaaggtcacagacatttaatataaatttttcaattattgacaagaattttttttaatgaaaattttaacatgtcattttagttttcaatactttgacctttgtttaatttttttttctctaggactaggtccatctaatcctgcgaaatattattgaaataatatacacgtgtgtgcagttttgatggttggctttctgtttatacatatatgtacatatttttttattttgtatttgaaaaatattaactgttacctgctttacttttgggaatgttgatgttccatcatataaatgttttgttgttcttatatcccatttctgtctgttcttcaagagtgttaccctaaaatttgcctacattgttaataatatattctttctttcctttttatattttatgcatatttctattagcataattgctgaatactgatagtgtagtttattccaaatatgtaaaaccctcttcataatttctgaatttgctggttctttcaattttcaggtgcttctagtgaagcaaatttagcaaaaagcatcaacagtcttgaacatatacttgatgccaaggtacagtttatttagtacaatatgtcaaaattcttaaatttgtgaacaatatctgttgtttgtgtaaaagattttttgtcaaacttttgctgtcctttcctgtgcaagaaagcaaatgttcttcccattagctattgactagaaaccattgatataatggttgcagctgtgtattggttgagctccatataaagatatttgtgtctgaactcttctgaattccttatgtttaccttatatgcgaactgcatggttcttgtggatagttacctagttgttctgcttgttagatgctgggcatggttactaatctgtaatgatttgaatctcatttgtaggtatactctgttgaagacaaggaattgcaatcttttgtgaccactcctgtgattaatatatatcattatgtttcaactgcaagtggggaaactagcttgcacttgaaaattgaggagattaaacgccaggtgcacttttgctatgggttttaagatgattagataaataaggtttactgatccctgtgtaattttatttgaatagtgcatagcaacccttggtaggagtatagaagatcaccagaaacggatgaatacaaagaaacttctgaaccggatgcatgataatgtgattttcggtctgcagaatcttggcatttggggagcattgcaagtaagactcttgtagtgtattataagttttagttctctaatcatttgactagaaatatattaatataagtcaataatgtttttagcagaatctataaataataatacagagaaaatttttgttgttatttgttccattttgttggtcctcctacggggcccgcacacccaaagaagaaaaaacctaggaagaaaaataagcctagaataggctgtggaatttcttggttataatgttaagcttacataaattagacacagtagcagacactctacatcgattcatgaagatgaatggtttagaatggtgttttgtttcttgaagatgatgtcttggtagttggtaccaattcagtttttgctagtgaggtagatgggatatttgaagataaggggatgttatttggaattcatttagacaagtcttctgaatacatgttttccttgggttttggtgtatttatattttttcttgtgttttgttatatatctctgacatctctgttttttctttttaatttttattttgtccattcctgtggttttccatcatgcttcttgttttattgatatcgggaaatgattttataggttagaaggactgtcactgtcactatcttggtttttattctttttccttttctaatatatgtgttcaccttccaaggctagtcatattcttctgagtggtgatcattctgagaggcatgaattagtggaggcagatggaaattcaagtgatgactctctgtgtgataaatatcttgctcaggctgctgaactatttacttcacaatgcatgataggtattttgacattatctgatattcttttaatcatgccactgctgttactaggttttctggctgttatgtgcttccattttgcttgatgtgttaggctaacatttgtctagcaatgaatcagtctttttcattattgttaatttttatgatatgtttaaaacagagttcttgtaggatagatgcttcatttatattgcaactaaacatactttttttgtaggcgacagggtaactgatttatcttctgtggaaatattaaaagagccatttttctcagcaaagcttttacgactcattgggatactatccaactttaggttggcaaaactatgctgtttaaaccactcctttaatacatgttttcatatagcacaagtctcgttgatatttggttatgaaactaatatatttgggcaaattctgattacatgttccaactcaggttgcaaaagaacatgaaatgtataatttttgtgaatagaattgtgacagcaagatccctgtcatacatactacagaagctcaagcttctaagacaatggaggagtgattttctagtaggagtccatgctggactgaagagtatgtcacgaaagaccatgaacatcattgttgataaatttcgttctggagaggtattactattggatttctcattaatttttaaatgaattaaactatactcctgtatatgtgtgtataagttgctaattctcatagaagattctctgattttacctgattggcaatagatatattgagggaatgtaaaatgtctcttacattgcaaaactatgaaatagctgggacctactggagagttttgtaaaaaatattttacctaacttctcttcatgttctttaaatatgtatatatttcctagcttgttagagagttgatcgctagtaatgtgcctgcatggtcatgctgttaacagttgaatctactggttgcaaccaaagtgggtgaagaaggacttgacattcagacatgttgtctcgtcatacgatttgatcttccagaaactgttgccagcttcatacagtcaagaggtcgtgcacgtatgcctcagtcagaatatgcatttttggtggacaggtactactttctaatagatttcagaagtaatttaagcaaatccatccatttggttagttttgtaatcatcttgttgttgcagtggcaataagaaggaaattgacgtaattgatggtttcaaggaagatgaataccgaatgaatatggaagttacttttcgaacatccaaggagacatacatcatccctgaggaaagaatattcagaattgattcgtctggtgcttctgttagttctggatatagtatctcattgcttcaccaatattgttcaaagcttccacacgatgagtatgagcttatttaaactagaccattttgatccaaattatatactctgtgagattatgtcttgatattattcctgctgttgtatttattattagaatattctttttcctgttaattagtaattgattgatcttgtaatcaatactgattcatgtttcatattataaataacatgaggtgtggtctacattgccacttccattagtttcttcgtaggaggggaatgaatatcctctcacacaagattttcacataatcgtatcatatgaaaaaattgtctttcttaattttcacatagactaatatagattttgataatatccctcctattcaatgtatatgaagatagagaaataggtacagagagagagagatgagtagagagagaaacaatggggggggggtgagtgtcaggagtggcggtgaggcaagagtgagaggtacagcgagcttccatgcggacccacaacggacatcagcacacaaggatggacagcaacaaggttacagtcgagaaaattggcgggacaagagtgacatatcaacattctacttcacacgatttacagaggacatcacagagaaggaactatggtatcatttcaagaggtggggtgatgtgaaacaagaacgggaggagatttggatttgcaagattcaaaggagtggaggatgcgcacggtttagcaaagaaaatggaccagatggtcattggcggtctgaaactgtacgtgaacgtacccaagtatgggagagacacgaggaggatggcaccggcacaacccaaaacgcagtggcactaacttggaccatttggaagcatcgaaatggggtggtttttgctaatcaaactttcgaaggaagtaaagtgatggaagatgcgatttttctactatggacatggcttaaacttttggagaagggtttcaccctgcatttcaatcattggtcctctcatctcacagcagcgttttgtaattagggaaaaaaggtagttgtaatattataagtatttgtgctgtgtagtagtgtctttcctcagggtcagctggttcttattgcatgtatcttggcattctgaaccagctattaattcaatcctcttatgtatctatagtacctctggtactcatttttataaatgatacttacttttgctgagcaaaaaaaaaaaaatgttagatggaatctgttttcagacgattgcttggatgtcttggagccagtgctgcactcctaagcatatgggaggattggggatcagagatattcaaagtctcaacaaggctttgctgttcaaatggaagtggatgatgttccaccaaccagaccagctttggactagaatcctgaactctaagtataatggctggaggggattggagcatggtcctagaaagcagtatttctctacttggtgggctgacttaagggccatctctcaacatcagaatgtgatcaatgctgataatcaaattaggtggaagctggggagaggcgacaaattcctgttttgggaagatccttggggcgatgaaggagttcctctcaaggaccaattccctgaattattcactatttcttcccaaagggatttaagagtggcagaggtgggatcttggactgagagtaggtgggtctggaatatggtttggagaagacacttgtttgataacgaggtgcagctagcctctaaattcattgatcacatccatcaaatcagattaattaacaatctcaatgacacctggatttggagagctgaatccactggggttttcacatctaaatctggttatcaagttattaaagctgatagggatgatgaaggtcagtacctgggattcaagaaactctgggagattaaactccctcctaaagccctctcctttgtttggaggttactatgggatagacttcccacgaaggacaacttgattaagaggcaaattcaggtggataatgatttatgccccttctgtcatagtcaacctgaaactgcatcccacttatttttcacttgtggcaaaactatgcctatatggtgggaattcctatcttggataaaggaagaaaaggtgtttcactgcagacctttggataattttctccagcacttctcctcagcagtttcaaaggatgctaacataagaaggacaatgtggtggatagcagttacaagctcaatttggaggctcagaaatgatataattttccagaatcaaacctttgatatcactagactgacagatagcactctgttcctcttatggacctggttgaggggttgggaaaggaatttccagattccttattatagttggtcttcaaatatatctatagcttttagttaaagcttctgttagtagggatttcatctgtgtagggtgttgtatctcctgaattttcaggacccttttctgtattatgtagtacctctagtacttgttattacatattacatattatcttcgctttccaaaaaaaaaagacaattaaccaacaacagaaagaaatgctgatggggaggttttgggaggaggaagtaaaagaggccatgtgggactgtgggagtgagaaaagtccaggtccagatggtctcaatttcaagttcatcaagaaattttgggtcaccatcaagcccgatgtccttcgatttttggatgaattctatgttaaggaatgcttcccaaagggatgcaatgcatcctttatagcattaatcccaaagatggctgatccacaaggattgaatgattatagacctatttcactcataggctgtgtctacaagatcgtgagtaaggttctggccaacagattgaagaaagtgatggcttccattatagatgaacgccagtctgcatttataggtggtaggcacctgttgcacaatgtcattatagcaaatgaagtggtggaggaagctaagaggagtcataaaccatgccttgtgttcaaagttgattatgaaaaggcatacgattcagtctcatggaaatttttgaaatacatgatgagaaggatggagttttgtcccaaatggatacaatggattaaggggtgtttatcatctgcctctgtttcgattttggtgaatgggagtccctcggctgaatttacccctcaaagaggccttaggcaaggcaatccactagtgccccttctttttaatattgttgctgagggtctaaatggtttgatgagacaagctgtggagaaaaacatatttagagggtatccagtgggtagccacagagtgagcatcagcctgttacaatacgcggatgacaattttttttggggaggcatcaatggagaacactaaggcaatcaaatcaattttgaggacctttgaacttgtttcaggcctcaaaattaattttgcaaagagcaactttggtgcaattggtatgccggaatcgtggaagcaaaatgaagctgatttcttgaattgtaatctgctgtccattccttttgtgtacttggggatccccattggggataacccgaggagatgtcagttgtgggatcctataattaaaaagtgtaagaagaaattagctaagtgcaagcagagacatatcctttggggggagagttacactcatacattcagtcctaacatctatacctatttattttctttcatttttcaggattcctagaagggtggtggaaagattggtgcgtattcagcgaagattcctttggggtggtggacctgaacacaacaagattgcttaggtcaaatgggaaactgtgtgtctcccaaaagacaaaggggggctaagaattaaggacatcaacagcttcaaccttgcattgctggccaaatggaaatggagcttgttccaaaatcacacaggcctatgggctagagtgttggagtcgaagtatggtgggtggaggggtttagatgaagcatcacgtgattctaatgagtccatatggtggagggatctgaaattggcactccaccatccgcaaactaagaatgcttttcataatggtttggtgtggaagttggggtgtggcgaccgaatcaagttttgggaggatggatggcttcatgatgggacaacattacttgccaaataccctaggctatatcttaattcctgtcaacagcaacattcagcaaatgggagctcataccgacacaggttgggaatgggaccttaaatggaggaggcatttgtttgacagtgaggtatctatggctggcagttttctgggtgaggtggcaggcatacaggttcagattaattgcagggatgattgggtctggttaagtcaccaatattcagcaaaatcagcctatgatatgctgaggggggatatagtacagggagatgatgttgtagattttgtggaattgtggaagctaaggatcccaaccagaattgcagtttttgtatggaggttacttcgagatagattgccaactaaagttaatctgtgcaggcggcaggtggcaattaatgaatcaagctgcccattctgtgggagcgcggaggaggacgcggcgcattttttctttcactgcagtaaaattttacctctttggtgggaatctatgtcttgggtgagcgtatctagtgtatttccacagcacccaaggcatcattttgcccaacatatgactgccggggtggaaggaattcgggcaactagatggaggtcttggtgggcggctcttacatggttatatggcagctgaggaacaacattatattctcaagtgggactttcaacggaaacaaactgatggaggactccctatttctactttggacgtggctcagaaactatgagaaagattctatatctcactacaatcagtggtcatctaaccttagagaggcttttgtttttagacaaggaaagcagtcatagtgtattgataattgtataaccaagctgtctaatgtggttcccagcaagactgctgtcaagtgtctagtctggcttgggaaccatttatctggatttttgttgtaatcacggtacctctggtactcagattcatttctcatatatatatatatatatatatatatatatatatttatttatttatctttgctgaccaaaaaaaatagtaaaacactgttatatactcaaccaactagttccatgtaaataaagtacaaatcttgtgttttaaaatgtaataatctatctttacaggtactttgaccccaagccaagttttcattacttagatgattcagggggaatttcctgccacataacattgccttccaatgcaccaataaaccaaattttgggtacaccacagttatctatggaggcttccaaaagagaagcttgcctgaaagcaatagaagaactgtataatttgggcgctttaagtgattgtctcttgccaaaacaagatgatgcagagcctgaggtgcaggtttcaggctcttctgatgaagatgaatgtgaaggtcaaacttcagttgctttctgataagccattactttcattgtctttcactgggttgccaaaaattactgttcaaattgtattttgcaataaactgttgagcatatttacttgtcaataactatattaaggagagcgactattccagcatgttgccatgctgatcattttcagacctttcaaatactacataatccattgttggtaattatttttgtaacatacctgtctatggatttagtgttaatcccattgtcagtgtataaacttctacaccatcattcaatcatgtgttgccagatcattagaaggttttttctcctctcatgtagttattgtctcaaactcttttgtgatgatacaataacacatgattggaagagagtgtaaaagttttactccaaaatgaatcaaatcaaaattttcttatgtgttgataatctttaatgggaagctttttatttgttttcagatgtagtaccgttactatgttgattactatcaacttatgtctctagggatgcgactatatcatatgttgtgttgtactatatttattttccttttttagcagatgccatatcaagaggaaaattacatgagatgctagttccttctgcctttggacagtcatggataaatgaggataacattgtccgtctcaactcttactacataaaattttgtccctatccagaggacagggtctacaaagagtttggtctattcatgatgacctgtcttccgatggaggctgagaaattggaacttgatctccatcttgctcatggtcgatctgtgatgacaatgtttgtcccatttggagttgtagaatttaacaaagatgaggtaagtggtgtgtgtatgtgtgtgctttattttattttaagaattttgttaattaatgcttggagttttccatcctgcagattaagatggcagagaattttcaagaaatgttcctcaaaattattcttgatagattagaattcatttccgagtttgtagacttgggtatgagtgctgaatctcactcaggcacatcaaccttctaccttttgcttccagttgtattgcaagaatatggaaatgccatggaagtagattggaagatagtgaagagatgcctttgttcaccaattttcaggcatccagctgatactatggataaaaaagttttccctttagatattcacctgcaacttgccaatggttacagaagtgtaagaaatgtcgagaatagtttagtgtatgccccacataagaagaacttttattttgtcacgaatgttaactatgaaaagaatggatatagtcctcataatgattcaggcacttcaagctatgtggattacttcattgaaaagtaggtatctgtttattattatgggttcattcttgtgttattttggttttgcatccctaattcttctatgtcgatgaaggcatttatatttatgggggcttttgtaaaattgctgattaactgatggaattggatatctgagaatgttggaatatcatatattgtgcttataatatttgacaaaaatatgcatgcttgaatgccaggttttccattcacctcaaatgtccgaagcaaccacttctgcatgtgaaaccggtctccaatttgcacaacctgttacacaacagaaagcgtgaggatgcaggtattgtattggatatgttatttttagcgttagagtctgacaggaacagtgttgattaaaaagaaaaatagagccaaagctccttacaaccagaaaatattttgaaagccttggaatgtaaaacagcaactccaggaataaatgtgactgaaaaagagactccacaaagaaaatctcagccttaggaatggagaaccccacttaaaccatgttctaccaaaattgtccctatgttccttcccactatcacgatcccccttagtcattttgcgcccattcagttaggattctctactattctctttgtttcagctcagcatactcatcattcctttcatctccccccttggaccataactaactcctcttttgccccattatccataatctgaggcccccttgatgtttcttcttgagtaaacacaagatatgggcaatagagcttaatcaactaagacatgagaatttagtttttgttacctaaaaccttttacgagctagtggaatgacaaaaacatgctaggaagagatgtggtagggtgggctaatgcgtaaaatatgttaggttcgcacaagaacaagtgtaccctacgcaataataacagtggactcgaaggtccgaatatcaaccccaaagaaccaattgtattcccaattagttaagtttattaaattaataatagagatgattgaaaagaggatttaaatattttcatgattttagtttttataagaaaacaaataaacaaatataaagatagtattagtgtattaagtaagttttactttgtgatttagttaagggggagtatgaggctcttcttaacaataaaacatgggatcttattcctcttcccaaagacagacaaagcgtgggttgtaggtgggtcttcagaattaagtgggctgtaagtgggtcttcagaattaaggagaatgctgatgggactattaacaggttcaaggctaggttagtggctaaaggatttcatcaggttgttggttgtgactttaatgaagccttttctcctgtgataaaacctgttacaatcaggctaattatccctcttgctctcactaataaatgggatttgttccagctagatgtcaacaatgcctttttaaatggccatcttgaacagactatctacatgcaggaaccacaaggcttcgaaagttcagataaaaccttggtttgcaagctacaaaaagctttgtatggcctcaaacaagctccaagacagtggttggataggctcaaaggaactcttttacagcttgggtttgtggccagcaagtgcgatccttcgttgtctgtttattaagacaaagggcacattatctacattcttgtttatgtagatgatattattattactggtacctccaatgtagtaattcagcaactcaccactaagctgcattccaatttttctcttaaacaattgggaaaacttgactattttcttggtattgaaatcaaatcactggctgatgggactattctatggactcaaagcaaatatacaagagatttgcttcagaaaaccaaaatggcataagcacaacctatttcttcccctatgattgctaattgcaagttaaccaaagctgactcggatttattcggtgatccatctctctatcgatctgttgttggtgctcttcaatacacaaccattacaaaacctgagttaagctatgttgtgaacaaggtctatcagttcatggctaatcatatggactctcactggacaactgttaaatgcattctaaggcacctcaaaggctctattcatcatggtctgcatttgaaggctgctccttccttagaggtggcagacctggtggattgctttgacatggtgtatttggcagcataggaataggatggtcttccaaaatgaaagtttcaacagtcataaagtgatggagcatgctctattttattgctgaacctggcttaaaaatctggagaaaggatttgatatcctgtttcacttatggttcagtaacattagggatagttttttgtgttgaggggggatagtttatataatacaagttaggctggatgggtacctagcggttagctagatctttggtttcctaattcaagttggttagcatgtattaggtcactacagttctgcaccttgcaagtgctaggatgtatatacaactatactgcttgtactatttttaatattctatataatatatatatacttttgctgataaaaaaaaaggctgctcttcctctcagccttttactatcaaagccctgtgtgatgctgattgggcctcggatctagatgatagaaggtctacctttggtgcagtgatttattttggtcctaatttggtctcatagtggtccaagaaacaacaaattgtggctagatcttccactaaagttgaatacaggagctcgactcaagccacgactgaagttacatggattcaaactctcttaacaaagttattgttctttttcagaccccagagatttactatgacaaccaaagtgcagctatatcactcataatctagtttttcattcccggactaagcacatgaaaattgacatctttttttgtcaaggagaaagtcttagctaaagagctcaaagtgtatcatattcctgctatagatcaatgggctgattccctcactaagcctttatcaccaactcgatttctttttcttaggtccaaactcaatgttgttgatttctgattctcaaccccattgagtttaaggggagggggggggggggtattagtgtattaagtaagttttactttgtgtaaccagaagacttaatagaaaggccttggccattaccaatgtatatttggtctggccttcaaatggaccaagctgctacatgttttgagactctccagttacgtagaacgatgcacccgaatcaggtatccaagtagtagagttaggatcttgatttttagaattaaccagcattgcactaggttaggagtctttgtgagaattagttccctgattttgttctgaaccgaaggtgtttgatgaattgctttgaaatactggttccatcagagtgagagacgcatttggctcaaaatcagaatcatagcgaaaatgacacatcgttgctgtgtgaccaaatttgaagcaaacttggcactgaaaatttgcataacgaccggggcctttaccgccaccacggcgacctccattgccgcagtcagaatcattgcctccatgactgtagcctccgccgtgattgaagccaccacgatttccaaaataattggatcaattttgtgaattgaaattattcgaggatgaattgtaagaatttgaagatgaattgtaaccttgagcaacattaatcgaaggtgaattagcaaagcgcttctgaaactttttcatgtatgtctcatgtgcgagcaacagtgccactacttctctaatcggaagtgattccaacttacttttgatcattgagatcactggaccgtactcctctggtaggccttcaagaatcacgtcaaggtgttcacgcagaaaaataggatctccacacgatccaagcgcaccgactatgcatttgatgcgcaaaagaaactcacacattgttttctgttcagacattgtagttctgagttctattcgaagtatcctagctttcgcacgtgtttgcttttgaaaatactcatggatctgctcccaaagctgatatgaatgaacgcatctgataattcgagatatgattgaaacttaaagagtcgattggagccacgacaagagaatctgatcttattgttcccaattggtgtatgctggattttcatttccagcttcacaatctgcctctgtgagaaagcgcatcgggatctaaggacttgccacgaaacgctgaagtctatgagccttgatgacagattctacttgttgcctccatagcagggagttagaatcatctaacttctgagaaatcggatgaaaagaaggttcggaagcaaaattctgatttgtcaccatggatagaccttaagctctggataccatcatagagtttgagagagagaaaaagaagaaagatgaaagatattattattgatttagaaagaaaaggtcagttacaaattaattttgtttctctatttatggagaaaacaaatatggttacacataacttgactaaggcagttaactaaccaaagttagttactgctctaatagaaataattgttctaacagaatcacaagtgttctaactgaatcataattgctctaacagaataacaactgctctaactgaatcacaaagtaaaacttacttaataccctaatagagaggtttaagtaacgataagaatgatcaggagttatgactgactgataccaattttctcttaatcctagtcttaatgaaattcccccagttaattatcgattttcaaaatcaactaaaacctatgatcaagattagaagatgtttttttgccttaaatcaataccccaatgatcatggatctatcaatttaatccaaatgattaaatcaattttagggatgattaattaaagattaactaatctattggaattacccaaatagtttggatcatgcaatttggtataaaacattatctaccaattacatgcagaagatcattactatgcaatcgattgagtattaaaatgacccgttccaaataaacattaaaatgaggaagataattaattaacataaaacaatgaagaatttcatttagattaaggagaggagtacaaatggatagctacatcattactctcgaactaaggggactacccatttatgatcagagcaaaactaaagaaatcttagagagagagaaaacatcactaacaaaattgaggtgaagtgagatattattcaacccaaacagaaaccgagtataatacagtttatatagcagttacgatactgtaactgtcaactaacttgagttagttagtgcaactgctgaacagttgtcctaactaattgtcaactaacatagctgtaactgcctaactaatgtaaaccaactatagttagactaacagagtaacataactgtgtaacagcatgactaaatgaaaagaaagagttacactgagtaagtatactcctataaaaactagcaattctatatagagtaaacatagacatacctataggcaggaacaatgatcacgagatccgttctaacggtgttgtccacactcttcagctttcaaaaaccctcaaggttctctcaaattcgtaaaaagataagaataaaattgaatgcctttatttataagtcagagacctctatatatagcttcctaaagataaatacacgaaaatgtgcattacgaccatggtgaatccacctcaccacaaccgtcgtcgaaagtaacactgaagccttgggttatggattgactacgactctcttggttgaccaccgccgtggtgaggtcactcgttatcaaatccttgatgctattctgaaagggctgttatcatttgactatagctgtgttgatgaccatggccgtggtgaatggatcacatccattatcaagtgcagagtcttcaaatcttcataaatttgtgtaatttctaactctttcactcaattgagtgattgtacttttgcaatacaaaactagtatccaaatgtgagttttactaaaaaaaatgcatacaaaatgacacaaaaaatcacataaaataccacccataaagttggtttatcatgggcttactgctattgacgtgcaatgaggaaggatttgctgctgagaagtggacaatgatatacattacagatatacaatccaaaattagttcttaagattgatcctaattgattcttccatatatacatgatatgctaccataaataatctagatattataattttgatttctgacaatttgtgtcctgtgagcatttctttatgattttgtgttagcaatttaaaaagtgtactgtgcattgactactttcaaatttgtatcttgattttgaatttatcttgtattctgatcatttttcagaatcttatctaatgtatgtaacttttgaatgtcaatgacagaaccacaggagctggacgaatacttaatttatttgcctcctgagctttgtgaactaaaagtaataggtttttcgaaggatattggcagttccatatctttgctgccctcaattatgcatcgtcttggaaacttgctggtggctattgaactaaagcacatgctatcttcttcctttccagaagcagctgaaattagtgccattagagtaaggccttattaaattcaatgtattatttacattattttcaagtagtgtattcttattcacatctaaccattgcagtgcttatatgggacagatgaatcttgtatacagctactaacaattgtgaacaaattactaggttttagaggctctcaccactgagaagtgtcaggagcgcttttcccttgaaagacttgaagtgcttggtgatgctttccttaaatttgctgttgcacgtcatttttttctcatgcatgacagccttcatgaaggagaccttacaaaaaggcgttccaatgctgtaaataattccaatttgtttaagttggctattaagcgcaatttgcaggtagagttatactagcacatccctgcttcatttactaagaaagtataattattcttatttattgattttctgttagactagggtttccacagcccccacattccatttcaaaacaaaatcacctgttgatgctttcttagaacgttgatctctcattaagaccatgagaaaaaaagatatacgtgggaaataattttaataaatacctaattaattaatatatatactaaaattatattggcaatgaaaaacatatagtgccggatttgagtctgtctttaatttctagctcacccacccttatcgttttaggagatagatagacacaggactctaccaggaatcccccatttcctgctctgggacctactactgtgtctcaaaattgttgagccaaaatgagaggttcaaatcctatttatgaagttaattcatgcatttgatgtaaggtttcctggatggattaaatggtggataagttcttttctatcacataaactcctaataattaactacctacaatcctttaacagatccttcctgactaacttggatctcagttcccatcaaaataacacttggataacataaatccaaaccctatacaattcctaaccgaggattaaagatactggagttttccctagaactgaataatagaaattaactgaaccatttagtagggcttattaccttgataagatttttctatcaatatcaggctttagaatgggttaatgtatatattttaggtctttgtatatatattaggttgtgttattttattctagtctggctcattcaacccataggccatgattatatattattctatcttgtaatcttttattttttatcaatagcaaaacactttctctcttcattttcacagtgcatatttttatttactgacttgagtcttatctctatctcctcgctccctcttgcaggtctatatatgcgatcagacatttgatcccactcagttttatgcattgggccgtccttgcccaagagtttgtagcaatgaaaccgaagaaagcatacacttttgtttaaattctgttatgcaacaaggaaaagcaactgaaacccgatgtagcaaaaatcatcattggttacataggaaaacaattgctgatgtggttgaagctctggttggagcattcctagttgacagtggctttaaagctgcaattgcctttctttcatggattggcatacaagttgattttgaagcttcacaagtggttgatatctgcatagcaagtgctagctattcccctctttcttctgaagtagacattccttctcttgaaggtaagctaggacatcacttttttcataaaggcctgcttctccaggcatttgtacatccttcttacaataagcttggaggaggctgttatcaggcaagtgtaacttttcttttccctcccagtgttctgacttcatataagaattatttcctttactttatagatctatgaatcctagtgagacatttgatctttaatttttaaaatgtgataattctttgcagcgattggagtttcttggagatgctgtcttggattatttgattacttcatatctattctcagcttatcccaaactaaagcctggtcaattgacagatttgagatcattgtctgttaacaacaaggcatttgcttgtctagcggtagatcgcagttttgataattttcttttatgtgattcaagtggcctgtctgaggcaataaaaaagtatgtggactatgttagaagacctgtgtcagataatggcattaaagaagggccaaaatgtcccaaggtagatagtatgacctttatataaagttgctacacctggttgttgttgttgttgttatgcatttactcatctaagatgaagttcctaaagcattatgtctgtattcatttcaaagtttgctttaggtattttacttggaataatgctactcccacacacgacacctcacatctgtaaagtttccattatttgatcatagctcacctacactttgattctgccatctatgcttgatgtaaattgatgtgcacccactgtcccacaagatgtgtaccaagcattattcttttacttggaaatgacaagagcaaataaatggaatactaaaagagaacccaagcccttgtgtaggaagaagacacagaaaacccatccaaatgattgccaatatttttgcaaaaaagcacaaaataagccagtacatgttgggtgggaaagcctgacgcgtgacagtcaactgaacaaattatttattatattgagataagatgacaaatttaccttctgctctatgatttgtgttatggacatgagtaactcttctaggaacattacgagtcttttgtttgtccaattcaagcagctcataagttaattaagtttctgataggtgtgcattgctttgttattttgcatcaaaaggtatatggggtataaattgacatcattggtttcttcaggcactgggtgacttagtggaatcttgtgttggtgccatccttcttgattcagggttcaatttgaacaaagtttggaagattatgacttcattcttggacccaatcatgaaattctcatcaagcttgcagctcagtcctgttagggatttgcgagaactttgccaatctcataatttggagttggagtttctgccagtgccctcaaaattgactaaaaggttttcagttgaagctaaagtgagtgggaatggtgtatgtgaaacagcttcagcaactggccaaaataaaaaagaggcttgcagaattgcttcacagctactttttttaaagttcaaggtaaagcaatcatgttaagttttattttttccatccttattttctcaactcaacaccttaggattagcatttctttattgtacggtgacaccacaggtgagtatattacttttgtgattcatgtaaacaagggtaataatcatattttaactttttctgctgatgtggtgaaatcagttgtgcttatattccttaaatttctaaatactctagttgttaatgaaacaagtgttctagtttaagatgttccttgtttcttcatttggagctacttttgatcaagttcagaataatgcaatagtacctctttttcccgaaatgagaagcttggtagtaacgtcatattttttttactgtggagttcttgtaagttgaattgctatactagatagattggctcacttagtccaacagattatggacaaatttcattattatatattcattttcctttatattttccgtagagctgtctagtgtattatgtttgctttcttctgccaagttctattctttatataactttagtttgggccaatcgaaaatagtactacctccaatcctatatataagaaacaactgtctaatttatcaagatcagtaaacgtggttagattggttaacttgtcataaattttaattttattccaaaatggtacattaaatgatttaagagataattattttttaaaagataatttttcaacctatgagtataccttgcgttaagaagagagtgagagaagcaaagctattttgaatatgtctttctgggttttatcttccacccagtcaaaatgattacatggataataaataactattcttgttttcaagagaacaattaaaatatcacaattttctaagatacattgaacccaactaactattaactaagctacttgaaaggaaattatcattaaatgctcctcttttcaacactccccccaagctggagaatagattttatccattcccagcttgtataatattctatcaaaatttggagtgtgcaatcctttagtgagaatatctacaagttgaccttgtgaaggcacatatggagtgcaaatcaaaccactatccaacttttccttgataaaatgtctatccacttcaatgtgttttattcgatcatgttgtacaagattatgggctatgctaattgctgacttattatcactgtagagcttcataggtccgtcccatttaatcttcgagtcttctaagatgatttttaaccaaagcaattcacaaataccttgtgccatagcccaaaattcagcttcagctctagattgtgctacaacatcttgttttttactctccaagttaccaagtttcctcctagaaaggtacaatatttggaagtggatttactatcagctattgatccttcattgttagcattcgtataagcttcaagtattgtattcccatttcttttgtacaaaattcctcttcctggtggtgtcccctcaaggtaatgaagaattctataggtaacttgtaagtgaacttctcttggacaatgcataaattggctcaccaaactaacagcaaaagtaatatcaggccttgggtgagacaagtaaatcaattttccaactagacgttgatacatctccttatccgcttctgcaatgtcatcttcattacccaatttaaggtttgaatccatgggagtacttagagatttacaagctgtcatgcatgtctccttcggctaatctgtgacatatttttgttggaatatgaaaatacctttcttggagtgggacacttcaattcccgaaaaatatttcagcctcccaagagttttcatctcaaactcctttgctagatgctgacttaagagtagttgttccttccaatcatcactagtaacaatgatatcatccacaaatactaacaatacagtcactccccctgaggttgagtgtttgatgaataaagtgcggtctccttggctttgtttgtatcctaaggctgtcatgaccttagtgaatctcccaaaccatgtctgaggggattgtttcaacccatataaagtctttcttgactggaaaatagaattggcagcatcttcatatccaggtggaacctccatatagatttcctcctcaagctccccttgcaagaaaacattctttacatcaaactgttgtaatttccagccataatttgcagcaagagataatattactcgaactgtattcatctttgcaacaggagcaaaagtctctgagtaatctatcccataggtttgtgtgaaatccttagcgaccaatctcgccttgtacctctcaatcgacccatctaccctatattttattatatacacccacttgcaacccactggtttctttcctattggcaaagaaaccaactcccatgtcttgttcttctgcaatgcctccatttctgtatccatggcctgcttccaatttttatcaggtaatgcctcaaaaacattagtgggaattgagatagagtttaggtttgcaagaaaggttttataggttggagagattttatgaaatgaattgtaatttgagagaggatagaaaggctttttggtacatgttctggttccttttctaaaggcaatgggaagataaaggtcgtcattatgttctgaaatttccatttcatttggagaagctaaaatattatcattcaagattggaaaatcaaagttagttacctgatctaaaggagttggattggcctcttgggcaagttttgatttagaaatggcctttgatcttcttgtgtaaaccagattcttcccaaaccttgtatcattttcaagtctggtgggtgcatccttgttggattcattttgggctaatgtttcttgcttaggtttttgtgtaagatcacaattccttgtcctggaatacacaacaatggtcataaaaaacaataatacaagatatgtcatttgtatgtttctgaacagagacaagatttgtggacaattttgggacatgcaaaacattttttaggttttgaagggatttatttggatgtttcctataccggctatagttacaagagtgccatcaacaataattattttcttattgctaggacatggagaataggtggagaagatcatatggtcagtggctctagaatctaaaacccaaagggatggaaggattttttagacattaatttcaaatgaaagaggaagtatacctgaatatgccaatgtacaagtacttgatggtttttcaaggttgctaaaaaaggctctcattctttctatttttcaagcagcaggaaaaattattggaaaactgagtcgccggaattctaacagtcgctggaaaagtctccggaattttggcagttatcggaaaagtttgacagcttcaagagcccagtcaaacttgctaaataaccaaccctttttgtgcagaagcagagcacccctagatcaggagctctgatattattcgagaaaatgagagaaagaaagagagaaaacgagagagaaaggaaaatgatattattgtgatctgaaaagttagttagaattagttacaacagaggtatatatagacctctgaccctctgaactatcactaacagactctgacttcctaatactagtgaggtgttgttagcaaaagctaatagaccttacaaacatataatctgatgtctaacactagaggggtgctgttagcaaaagctaacggcccttacaatcattctataaaactgttttcacagttatacaagtacttactctaataccccccccccccccccccctcaaactcaaggagaagagttttgagaagaaacactcttcacattgaatttgtccctgagaacttcaaatcttgctgcagaaagaggcttggtcagtacatcagcccactggtccagagctggaatatgcacaatggaaagttgcttggccagaatcttttctcttacgaagaagacatcaattttcatgtgttttgtacgaatgtgaaacacaggattgtgagcaataggcacggttctctgattatcacaaaagattataggagtagtgaatggaacttgaaactctgttaggagagcatgaatccatgttaacttagtggaagtttgagttaaaatgcgatactcagcttcaatactagacctgacagcgaccttttgtttgcgagaccaccaagatattaagtttggaccaagaaatatggcagcccctgaggtggaacgcctgtcatccacattggatgcccagtcagcatcacaacagaacacgcgaagagccaagggcttggtaacagaagtaggctaaagaagtagtccatgaaacaaagtacccttgagatacctcaagattcttttcagcaccgcctagtgagagtttagagatgcagccataaattgacaaactttattgacaacaaagttgatttcaggcctagtaagagtagcatattgtaagacaccaactatagacctgtatagagttgaatcatgaaagatatcaacaccatgtcgagataacttgcaattagagaccatgggggaagaaatagaataagctttagttatgtgagttttgtggagtaaatcatgaatatatttactccgagtcatcaatatggagttattgggtagatacttgatctctagacccaaaaaataatccaaatgaccaagttgcttgagagagaatgcaatgtgtagtttggttgtgagctgctgaattagagaagcagtgctacccgtgatgatgatatcgtccacatatagactaaaagatagacaatatgcatttgttgctcgtagatgaaaagggaagaatcacatttgctcccaacaaatccaaactgcagcagagtaaatttcagtctatcaaaccattgccttggggcctatttcaagccatagagagctttgttgaacttgcagactagggacctatctgtaacttcaaaaccaaggggttgtgtcataaatacagattcttcaagaagcccatttagaaaagtcttattcgcatcaagctgaaacaacttccacccatgtgacagagcaagggtgagaacaatatgaatggtgacaggcttgaccacaggagaaatgaaaatcaaagccatgaatttgatgaaatcccttgactaccaaccttgctttgaacctattgatggaaccatcaacattttcctttactttgaaaatccacttacacccaatagcttgtccattggaaggtaagggtcccaagttttgtttttcaacaaagcaccatactcttgttgcatggcagcaagccaatctggatttttcaaggcttgtttcacagttttgggttcagaatgggtaagaaataaaaaaggatgtagtctaggattgtgaattccagacttgaaccttatttgcataaagtgtgtattatctggtatagaattaggtgctgaaacagactcagaagaggatgcactaggggtactggattttgaagtttgaggatgaacagaggtaggctcagaggaagtggatgatggacaaggcacagaaaaagaggttgtgggggaatgagttggaataggggaaaaaccaaagggaacaagaggtatagaaggagaatgaaagggagacaattgagaggattgaggggtaggaataacacaaggtggagataggttgggattaaggctgaagtaggaatcaagattcttaatggggttagaagatgaaggaaacatgtcagaataagggaaccttaattcattaaacagaacatctttggaaatattgattctgccaaatgaagacaaacatttgtaacctttgtgggaggaggaataccccaaaaataaacactcctgagatcgaaaatttagtttgtgtgtatggtaaggcctcaacaaggaaaacaggcacaaccaaaggttttaaggaaatgaaaatcaggatccttgttaaaaagagtaacaaaaggaatgacaaagttgagggaagcagtgggaactatgttaattagatagacaacagtagtaaaggcataatcccaaaattgtaagggtaaagaagcatgatgcaacaatgtaaggcccaaatcaactatatgtctgtgctttctttcaatcacaccattttgatgatgagtgtggggacaaatgagtctgtgggagatgtcataggaggttaagagagtagagaaaagtttgtattcacccccaatcaaattgaatactcttgattttgcagttcaaccatagatttggaagcttgaaaaacagaaagagtttcagccttaaactttgataggaaatattcaggtgtacttggcaaaagcatcaataaaggagacataatatttataaccagcatatgaagtcaaatgagaaggtccccacaaatctgtgaaaataagctccaaaggagagtaaacagaaacaaaagtgtgagatggtaatctatgagatttttccatacagcaggaagaccaaaaacctaagaaatttttatttgatggagaaattttacaatgattgaagacaagtttcattacatgaccattagggtgacctaatctaacatggtagaggctagcagtactagaagaagaaacaacataattagaaactacactagagttattattaacagtagcagttggatagacaagtcagtatctgaaattgaggttgaggtagacaacaatagaggagagttgtcttgaagcttgagattatgaaatgagtaaagaccatcagtaccaacaactccttgaagaaggactttattggtctcctgagatttcacaagaacaagtgaggatgaaattcaaagaaaacaaagttatctttagcaaattgactcacacttaacaaattttttgaaattgaaggaacatgtaataacttgtgaagtttaaatgttatgtgagcatcattggaggacacaaaagaagaggaaccaacactggagatactcaaaccttcaccattgcctatgaaaatttgatcaggtctatcaaagtgagtgaattggttgatattctgtgattcaccagtcacatgaaagctggctccaaagtctggaatccaggtagagccatcaggaccattcccacaagaggaggaatttgtgagcatagcactgggttgattggaggttggaacaacagccttggaattaggactaatccaggtattggaagttctgattgaaccagtggagttgggaattggttgaagtgtggtaggatcaaagaaggtgagtgattcatgaggctaaaaactcatattagacctaaagtggcaaacattggcaatgtgtccatacataaggcaaatttaacactgaaagttggcaaatcgaccaccatcacgacctctgtcggagccaccaccaccacgttcgacaccgcgatctggaaaatcaccacgacaaccgccacgaccatacgaacttcgagaaccagcaggatcaccggatttataagaattttggtgcgaatagccttgagtgtaattcaaggacggagaacttagcaccttgttagacttttggcaagcgtaccaatgttgttgcaggttacagatttataaaaagagattgtctccacaaggagatgagttactcaattccgccgaataaaagtaaacagttcaatagttatgtacaaatttaatcgagatatcatggatttgtctaactaatgaaaaataattgacgtaacagaatgacggaaataacagaatttagtgcgtcagaaatacgtaaaattatggaaacaataataatgaatctaattaatttaagaaaaatgtaggattggatttcatcgttctaataagattaacatatatgaatcattttctaacattactaatgaatacattaaattatcccaaatcaatccctcacactcatgaatcctaagaatatttactgaatatcgatccctctcactcaagagtcctaaaaatatttaccaaatattgatccctcgcatatgaagtaaataacccagcattacaatcataatctcgtgctatttgcaatcaaaacgtaatgctctattcctagcaatgtaacgtaaagataaattcattaagttcaaattctaagtattttccggtcaaacttaaaatccaattttatgaaattagtgatcaaatagaatcaagcattacgaacaaaatgaaattaccaataatgagtagaaaagattcatacatatataaaatatcaaaaaagatacataagggtacgaagattacatccaatcttttggagaaactagctgatcattgcgtagagcacaagatcaacaagagaaatgacgccagcaagttcatcatcatagcctttaattttacgcaaatactcatagattgatttaccgtcaagcaaaaccgcgcgcatcgcaattcgaagctgtcgagcatgagatttcttatgaagattgaagtactcatgaatcatctcccaaacttgataggagtgattcgagtcaagaatgcgcgatagaacgggtttcgagagagtagattaaagcaaaacaaggagcgtttggtcctaaacttcccaagcttcataatcaagattcatgcaatcaacaatgcgatcatccttcgtgagataacaaggcagaacgacgggattgacgatgaaacactacaatttatgcgacttgataaccggttctacatgttgccagtggagatagtttgagtcatcaagcttcttggtgatagagtttggaacgactgagaaacgagattcaaaggagcggaagctatggatgcacggatctggaacttcagaaggaacaataactacaaaaaaatggctctagataccatattcgagaaagaaagagagaaaactagagagaaaggaaactggtattattgtgatctaaaaacttaattagagttagttacaacaaaggtatatatagacttctgaccctctgaactaacactaacagactctgacttcctaatactagtgaggtgctgttagcaaaagctaacggcccttacaaacatataatctgttgtctaacactagaggggtgctgttagctaacagcccttacaattattctagaaaactattttcacagttatacaagtacatactctaatagataccatgttaagaagagaatgagagaagcaaaactattttgaatatgtctttttgggttttatcttccacccagcagattgatttatttataatcagaatgattacatggataataaataactaattctgttttcaagagaacaattaaaatatcacaacttcctaagatacattaaacccaactaactattaactaagctacttgaaaggaaattatcattaaatgctcctctttccaacaccttgttttgttgatagttcataaatgcacccactttcatgggaaaatgagtatatatcattgatagacctcacagttaattaggagtaaaaaggaaatttaacaataaagtagttttatgtttcttataattaagaccaagaaaatgttgtcttttgttacttatatagaggatcggaggtagtatcttttaaaacccattctcgtgccaaaacacaattgtagttttttagtttttcaaccgtcattttataagagctttcttttaaaataaataaataaataaaagggatgaaagtggttcatattcacccgcatcagcatattactaatactgggaactagcccttaaatatgatatctccttgatttttttctttgacatcatccctgtagagagaaatctgtatttgtgttatatcagtggcaaggcactgtacagagaggtcttgttattaacaaggaagagtgcaagtatctgtctagtacaattattgaagctgtagtatagctatatgcaatgacaattaatgcagaacttaagaactaacattaatatctcaattctcaacattccttggtgaatttcttcttcaacatgcataattaaacacaaattccctaagcctagtactgtattgttgtacaaaacacttggctagatgcattttatcttccctagctacaactccaggaactatattgtttgaatttaacagtcatgggtgtggatgtgcaggctcaaggttggaaagctaagtcaaaaaccctggaagaagttctggaatcaacttctaaaatggaaccaaaacttattggctatgatgaaactcccattgatgtaacagataccaatactgccaagcacatagtggttaatgctgacccgtacaacaactctaacccagaaatttgccctatgcaactgacagatgaaatatgctctccatgtgtgaaacctttcggccaacggcttcaatcttctgctaagggaaagcttagtcaaatatttgaaaatcgtgattgtggcagtgactcgtctgggacaggtagtataaaaatcatagtatttttgtcgatactgcgtctctgttaatcctgaatattgtttcatattttttgtacaaaggaacagcaagatcacgattgtatgaattatgtgctgcgtattgctggaaacctccttcatttgaatgctgcaagaaagagggaccagaccacctgaaacagtgagttactttaaaaataaaatgaagttttaaacatccgtactatcaggtttcagctttggaatttcactcaggatcttcatttcatcctctgaaaatccaaagttaacaatagaagttcaaaactagctatcaatgataatgagaatcacagccaaaagaaaagaaaaatatccctaaaaacttgtttatattaacatggactaaagtataaacaacaaacattcaaattttgtagactggagtggtgtccttaaagggctgtgtaatttaagcatctccatgaaaaaacgggtggattttctcattcaaatcaattacatttctgaatttttgacactggtgatgaatggatgatgataattatagttgaaatttgtaatctttttcatcaatatttagtatatatataaaacttggttcacttgcattccgtgtgttgttttcttaacgactctaggttccttcgtttcagggtacatagaactttcacttgcatttgtttattgttccatttttagatttacttgcaaggtgaccttagagatagaagaggcccagaatttgattttagagtttgttggggaacctctgtcaaagaagaaagatgcagcagagagtgcggcagagggtgcattatggtatctacaacatgaaggtttcttgcctagtattggtaattgacatattgcacaacaattatcatgtcacataaatctgaggcaatgtcttagggtgtcatttgaaatttctggatgcaccctcattgttattgataatcatataaatctagaagacaataatagataatacaggtttagtaacccagggccagagggttccctaatggtaatctattgtaaagcattatttatgtatgtattattgtagtgtcaaagttacatttatttgtaatgaccctcgattgtaacagtgaattttctatttactacgtttgaaatataaatataagctcccgaaacatttgaatggtaa

SEQ ID NO: 230 - DNA, 35587 bp, Glycine max
  source 1..35587: mol_type = genomic DNA
ttaggtgtagccactatcttaacttgaacttaatttttaataagtttggtagctcaaattttttactagctcatgaatctttgcaaatgcttccaaatcttgatcattttgtctggtacaaggtcattttagcacttgcaagtcatggacagagttccaaatacaaggggtcctcttttaaaaaagtttaggacattaaaacttatgtatttttttgtgtgtgtcttagatgttttataggttaaaaaagtacagaaaataataaaaggttgagaaaagtttaccaaaaagcttgaaacatgtgccttagtgtaaaagaaccgttgtgagtagcaatggatgtctacattcaaatttttaccattttggtaataaattttagactttgaataaaaagaaaaaaaagtgtgtttagcaattttggtgaaataatttaatttaatataaattaatgtgctaatgatcaaactagaatgttactaacatgtgattacttcacggtatttcagtaagctgtagaagccttatcaaaggcgtgcattcaacattaggtaaaattataacatttcaatcaacaatataaaatatagtaatccaacatcttaaggaagtttaactataattcttaatgaccagtcattattaatttcatcatatacttgactatctattcccaatcacaagctaatgttacattgtctatttcataacatagtctaagttttagttgaattaactactaagttttcactaaaaaaatacataaatttatgataaaataggtggtacattaaaaatgttaaaatatgttataacatcatttaattttaatttattatgcatgaaaaatttgttaacttttattataattatcttaaaaattatataaaataatttataattgattcacaatgtaaataattttatattatcaatgtaacatattaaattcttaatctatttaatcaaaacttataattatgaaaaaatcatttaaatagaaattacatgaaatcaaggtgttgccattgtggtgctcccaatagtatatacatacacaaaatctaatctttattttctctttgatagacataaaaaagtttgattgatgataataaaatagatgagtgagaataaataagaaataaaataaaattttaaaatatttgattgaagataaataaagaaaaaacgagtaaaaacaaataaaaataatacaactaagtcccacaatttttaaaaatgttttcaccctattcatatcttaccaaacaaacaaacttatttcgatttctctccctctttcctatgtttcatctatcaaaaatcaaacaaaggctaaggataatataattttttttatgtcctgatatataaattttatttctacataaaaaaaaaatataaaattgatttctaaaaagccattttgtttggaaaatactagtaacaaaaaacgacatgggggagtgttgggaatgaagtgatgcgaaaacgtgcgtggaaacaaaacaaagaacaaagactttcagtcattcagtctttagtgagcgtgttcactaaggtaactcttcactctcttctccgttgactccataatcaacgttttggttgggaacagaagtgaatgaagtgactacaaacaaagctctctctctgttattattattattattcattttctcttttcacactcctttgtcctttgaacccacccgtgaactctccaaccgtcgtcgttttgatttcacccactctcatacctccaaactctcttttcctcggctaatgccggacggagaatcctctgccgtcgccggcggccaagtttccatggaaccctctttaagcctctccgatcaactacagtccctgagtctttcccaagtaaaaaatcatgatgactcggtcaagaaagatccccggaagattgcaagaaggtaagtaacttttgctacccctttgttcttttgattattttcttcactgagtcacgtttatttttcaaatgggtgggtggagtttggctttttttattttatttttttattgttattttttgcacgtgggcttggtcattattgcttggcgttgtttgctgttgtagttagttagttattttttttgtttggcttttgagaattggagttgaagaaaacgcctgtttcaagattctgcttaaaatgtgactagttgaattgcactagcaagctttgttgtgtatgcaagattgtacttcttgcgtctgtgaaattttcaaccgagtgttttgttatttatatgttttattccagaaaatgtttttgtagttcaagaaaatgttcctaatttatggtgatcagatgtctgaaatgtgatgccgactatgcttatcttttttattcttcacttgtcttctggaactccaataatcttatgaatgttttggtcctttaaaggtatcagttggagttgtgcaaaaaagctatggaggaaaatataattgtgtatttagggacagggtgtgggaagacccacattgctgtgcttcttatgcatgagatgggtgatttgattcggaaaccacagaagaacatatgtgtctttcttgctcccactgtggctttagtccatcaggtgagctgctgtacatattgttgcattcaatgttgttattgtacaaaagtatttttttgggaagtacaatattttttttttctgggcaaattagaaatataatggaacaaatatctttttcctcccttttatttttgggtgctctgtactttggccatttcaggttgggtaattttgtgttgcaggtttacagtctgtaaggccagtgagaatggctttctgggataaataggcctagcaaggaagtattctgttgtattataactgaacatgaaaattttaatgacagatgacctttatacctttgattataatcattgcaattgggtcagtctcaatttcccgccaatctttttgaataaaacatttcttgaatctagaattagagatcttagtgatctacttgttatgtcaagcatggttgttttatgtgtgaatctgatgaattaatttgttctcgtgtttaataatgtcccaccaaactttagttttaactgatttcactatgttggtcaattccatcatgtgttttctgaagcctattttttatttatctatagcaagcaaaggttatagcagactctactgattttaaggttgggacatactgtggaagttccaagcgcttgaaacatcatcaagactgggagcaggagatgggacaatatgaggtgataatgctagttaaatcatgttgaaattaattatgtttttctctaaattattttattttatatccagacttgttactgttacagaaattttaagtaaaagctgttgaaagaaagttggtttcatcactgaaatttaatttggcaaaaaattcaaattagctcctgctgttttgaaatcttaaaatctgcttacttaaattttaattccatgttgttttttgcttctaaaatttctgtgttcttgtttttttcccttcaggttcttgttatgaccccacaaatattacatcataacttatcccattgcttcatcacaatggagatgattgcacttttgatatttgacgaatgtcatcatgctcaagtcaaaagcaaccatgcttatgcagtaatcatgaaagtatgttgcactcttgctcaactttaaagattcaaaatggagctacacaattttccacataaatttttccattttcatagcttttatttttgacaatctttaatttggcattttttcaggtcttctacaaaagtaattccacaaaggttccccgtatatttggcatgactgcttcccctgttgtaggaaaaggtaaaataatgcttatcttaaaaaaattgagtactaacaagagccaagatatttgccttcctcaattatcttccccttgttggtagcagttataatgtggatgtttgtgaaagcttttattgagaaaaataattgcttgtttttcaaaagttctcttggaaagggataaagtaaattttttttttttttactccaaataagctatttcaaacactcgttctatcaaaaaaaggttcaaggtgggagtgggggaagggaatttgtcacacagaagaaggtcaatgggttgtgtggtctattaatccatttttgtacatggatggaaaaaagtatgaaagatctggacttaagaagtcagtttgttaagttcaccaaaagacttaccctaccattaacaagcaatttttttttatatagtttgttgtgatatatcatgcaaggcactattgttgtgcctaggtagaatgtgtaaatgatatggtgtacctttatatgtgtatacattctctttatcagaataaaaagatcttaaatttcagcaaaggggctgaaagagactgactgtataggatgtggtccacatatagtttgactggaaaccattggttaactttgaaaggttcaaatgtgtcaagaaaaagaaaatcttgtgatgtgagggacctttttcttgaatatgggacagggagtgaagggacaaaccaaggtcacagacatttaatataaatttttcaattattgacaagaattttttttaatgaaaattttaacatgtcattttagttttcaatactttgacctttgtttaatttttttttctctaggactaggtccatctaatcctgcgaaatattattgaaataatatacacgtgtgtgcagttttgatggttggctttctgtttatacatatatgtacatatttttttattttgtatttgaaaaatattaactgttacctgctttacttttgggaatgttgatgttccatcatataaatgttttgttgttcttatatcccatttctgtctgttcttcaagagtgttaccctaaaatttgcctacattgttaataatatattctttctttcctttttatattttatgcatatttctattagcataattgctgaatactgatagtgtagtttattccaaatatgtaaaaccctcttcataatttctgaatttgctggttctttcaattttcaggtgcttctagtgaagcaaatttagcaaaaagcatcaacagtcttgaacatatacttgatgccaaggtacagtttatttagtacaatatgtcaaaattcttaaatttgtgaacaatatctgttgtttgtgtaaaagattttttgtcaaacttttgctgtcctttcctgtgcaagaaagcaaatgttcttcccattagctattgactagaaaccattgatataatggttgcagctgtgtattggttgagctccatataaagatatttgtgtctgaactcttctgaattccttatgtttaccttatatgcgaactgcatggttcttgtggatagttacctagttgttctgcttgttagatgctgggcatggttactaatctgtaatgatttgaatctcatttgtaggtatactctgttgaagacaaggaattgcaatcttttgtgaccactcctgtgattaatatatatcattatgtttcaactgcaagtggggaaactagcttgcacttgaaaattgaggagattaaacgccaggtgcacttttgctatgggttttaagatgattagataaataaggtttactgatccctgtgtaattttatttgaatagtgcatagcaacccttggtaggagtatagaagatcaccagaaacggatgaatacaaagaaacttctgaaccggatgcatgataatgtgattttcggtctgcagaatcttggcatttggggagcattgcaagtaagactcttgtagtgtattataagttttagttctctaatcatttgactagaaatatattaatataagtcaataatgtttttagcagaatctataaataataatacagagaaaatttttgttgttatttgttccattttgttggtcctcctacggggcccgcacacccaaagaagaaaaaacctaggaagaaaaataagcctagaataggctgtggaatttcttggttataatgttaagcttacataaattagacacagtagcagacactctacatcgattcatgaagatgaatggtttagaatggtgttttgtttcttgaagatgatgtcttggtagttggtaccaattcagtttttgctagtgaggtagatgggatatttgaagataaggggatgttatttggaattcatttagacaagtcttctgaatacatgttttccttgggttttggtgtatttatattttttcttgtgttttgttatatatctctgacatctctgttttttctttttaatttttattttgtccattcctgtggttttccatcatgcttcttgttttattgatatcgggaaatgattttataggttagaaggactgtcactgtcactatcttggtttttattctttttccttttctaatatatgtgttcaccttccaaggctagtcatattcttctgagtggtgatcattctgagaggcatgaattagtggaggcagatggaaattcaagtgatgactctctgtgtgataaatatcttgctcaggctgctgaactatttacttcacaatgcatgataggtattttgacattatctgatattcttttaatcatgccactgctgttactaggttttctggctgttatgtgcttccattttgcttgatgtgttaggctaacatttgtctagcaatgaatcagtctttttcattattgttaatttttatgatatgtttaaaacagagttcttgtaggatagatgcttcatttatattgcaactaaacatactttttttgtaggcgacagggtaactgatttatcttctgtggaaatattaaaagagccatttttctcagcaaagcttttacgactcattgggatactatccaactttaggttggcaaaactatgctgtttaaaccactcctttaatacatgttttcatatagcacaagtctcgttgatatttggttatgaaactaatatatttgggcaaattctgattacatgttccaactcaggttgcaaaagaacatgaaatgtataatttttgtgaatagaattgtgacagcaagatccctgtcatacatactacagaagctcaagcttctaagacaatggaggagtgattttctagtaggagtccatgctggactgaagagtatgtcacgaaagaccatgaacatcattgttgataaatttcgttctggagaggtattactattggatttctcattaatttttaaatgaattaaactatactcctgtatatgtgtgtataagttgctaattctcatagaagattctctgattttacctgattggcaatagatatattgagggaatgtaaaatgtctcttacattgcaaaactatgaaatagctgggacctactggagagttttgtaaaaaatattttacctaacttctcttcatgttctttaaatatgtatatatttcctagcttgttagagagttgatcgctagtaatgtgcctgcatggtcatgctgttaacagttgaatctactggttgcaaccaaagtgggtgaagaaggacttgacattcagacatgttgtctcgtcatacgatttgatcttccagaaactgttgccagcttcatacagtcaagaggtcgtgcacgtatgcctcagtcagaatatgcatttttggtggacaggtactactttctaatagatttcagaagtaatttaagcaaatccatccatttggttagttttgtaatcatcttgttgttgcagtggcaataagaaggaaattgacgtaattgatggtttcaaggaagatgaataccgaatgaatatggaagttacttttcgaacatccaaggagacatacatcatccctgaggaaagaatattcagaattgattcgtctggtgcttctgttagttctggatatagtatctcattgcttcaccaatattgttcaaagcttccacacgatgagtatgagcttatttaaactagaccattttgatccaaattatatactctgtgagattatgtcttgatattattcctgctgttgtatttattattagaatattctttttcctgttaattagtaattgattgatcttgtaatcaatactgattcatgtttcatattataaataacatgaggtgtggtctacattgccacttccattagtttcttcgtaggaggggaatgaatatcctctcacacaagattttcacataatcgtatcatatgaaaaaattgtctttcttaattttcacatagactaatatagattttgataatatccctcctattcaatgtatatgaagatagagaaataggtacagagagagagagatgagtagagagagaaacaatggggggggggtgagtgtcaggagtggcggtgaggcaagagtgagaggtacagcgagcttccatgcggacccacaacggacatcagcacacaaggatggacagcaacaaggttacagtcgagaaaattggcgggacaagagtgacatatcaacattctacttcacacgatttacagaggacatcacagagaaggaactatggtatcatttcaagaggtggggtgatgtgaaacaagaacgggaggagatttggatttgcaagattcaaaggagtggaggatgcgcacggtttagcaaagaaaatggaccagatggtcattggcggtctgaaactgtacgtgaacgtacccaagtatgggagagacacgaggaggatggcaccggcacaacccaaaacgcagtggcactaacttggaccatttggaagcatcgaaatggggtggtttttgctaatcaaactttcgaaggaagtaaagtgatggaagatgcgatttttctactatggacatggcttaaacttttggagaagggtttcaccctgcatttcaatcattggtcctctcatctcacagcagcgttttgtaattagggaaaaaaggtagttgtaatattataagtatttgtgctgtgtagtagtgtctttcctcagggtcagctggttcttattgcatgtatcttggcattctgaaccagctattaattcaatcctcttatgtatctatagtacctctggtactcatttttataaatgatacttacttttgctgagcaaaaaaaaaaaaatgttagatggaatctgttttcagacgattgcttggatgtcttggagccagtgctgcactcctaagcatatgggaggattggggatcagagatattcaaagtctcaacaaggctttgctgttcaaatggaagtggatgatgttccaccaaccagaccagctttggactagaatcctgaactctaagtataatggctggaggggattggagcatggtcctagaaagcagtatttctctacttggtgggctgacttaagggccatctctcaacatcagaatgtgatcaatgctgataatcaaattaggtggaagctggggagaggcgacaaattcctgttttgggaagatccttggggcgatgaaggagttcctctcaaggaccaattccctgaattattcactatttcttcccaaagggatttaagagtggcagaggtgggatcttggactgagagtaggtgggtctggaatatggtttggagaagacacttgtttgataacgaggtgcagctagcctctaaattcattgatcacatccatcaaatcagattaattaacaatctcaatgacacctggatttggagagctgaatccactggggttttcacatctaaatctggttatcaagttattaaagctgatagggatgatgaaggtcagtacctgggattcaagaaactctgggagattaaactccctcctaaagccctctcctttgtttggaggttactatgggatagacttcccacgaaggacaacttgattaagaggcaaattcaggtggataatgatttatgccccttctgtcatagtcaacctgaaactgcatcccacttatttttcacttgtggcaaaactatgcctatatggtgggaattcctatcttggataaaggaagaaaaggtgtttcactgcagacctttggataattttctccagcacttctcctcagcagtttcaaaggatgctaacataagaaggacaatgtggtggatagcagttacaagctcaatttggaggctcagaaatgatataattttccagaatcaaacctttgatatcactagactgacagatagcactctgttcctcttatggacctggttgaggggttgggaaaggaatttccagattccttattatagttggtcttcaaatatatctatagcttttagttaaagcttctgttagtagggatttcatctgtgtagggtgttgtatctcctgaattttcaggacccttttctgtattatgtagtacctctagtacttgttattacatattacatattatcttcgctttccaaaaaaaaaagacaattaaccaacaacagaaagaaatgctgatggggaggttttgggaggaggaagtaaaagaggccatgtgggactgtgggagtgagaaaagtccaggtccagatggtctcaatttcaagttcatcaagaaattttgggtcaccatcaagcccgatgtccttcgatttttggatgaattctatgttaaggaatgcttcccaaagggatgcaatgcatcctttatagcattaatcccaaagatggctgatccacaaggattgaatgattatagacctatttcactcataggctgtgtctacaagatcgtgagtaaggttctggccaacagattgaagaaagtgatggcttccattatagatgaacgccagtctgcatttataggtggtaggcacctgttgcacaatgtcattatagcaaatgaagtggtggaggaagctaagaggagtcataaaccatgccttgtgttcaaagttgattatgaaaaggcatacgattcagtctcatggaaatttttgaaatacatgatgagaaggatggagttttgtcccaaatggatacaatggattaaggggtgtttatcatctgcctctgtttcgattttggtgaatgggagtccctcggctgaatttacccctcaaagaggccttaggcaaggcaatccactagtgccccttctttttaatattgttgctgagggtctaaatggtttgatgagacaagctgtggagaaaaacatatttagagggtatccagtgggtagccacagagtgagcatcagcctgttacaatacgcggatgacaattttttttggggaggcatcaatggagaacactaaggcaatcaaatcaattttgaggacctttgaacttgtttcaggcctcaaaattaattttgcaaagagcaactttggtgcaattggtatgccggaatcgtggaagcaaaatgaagctgatttcttgaattgtaatctgctgtccattccttttgtgtacttggggatccccattggggataacccgaggagatgtcagttgtgggatcctataattaaaaagtgtaagaagaaattagctaagtgcaagcagagacatatcctttggggggagagttacactcatacattcagtcctaacatctatacctatttattttctttcatttttcaggattcctagaagggtggtggaaagattggtgcgtattcagcgaagattcctttggggtggtggacctgaacacaacaagattgcttaggtcaaatgggaaactgtgtgtctcccaaaagacaaaggggggctaagaattaaggacatcaacagcttcaaccttgcattgctggccaaatggaaatggagcttgttccaaaatcacacaggcctatgggctagagtgttggagtcgaagtatggtgggtggaggggtttagatgaagcatcacgtgattctaatgagtccatatggtggagggatctgaaattggcactccaccatccgcaaactaagaatgcttttcataatggtttggtgtggaagttggggtgtggcgaccgaatcaagttttgggaggatggatggcttcatgatgggacaacattacttgccaaataccctaggctatatcttaattcctgtcaacagcaacattcagcaaatgggagctcataccgacacaggttgggaatgggaccttaaatggaggaggcatttgtttgacagtgaggtatctatggctggcagttttctgggtgaggtggcaggcatacaggttcagattaattgcagggatgattgggtctggttaagtcaccaatattcagcaaaatcagcctatgatatgctgaggggggatatagtacagggagatgatgttgtagattttgtggaattgtggaagctaaggatcccaaccagaattgcagtttttgtatggaggttacttcgagatagattgccaactaaagttaatctgtgcaggcggcaggtggcaattaatgaatcaagctgcccattctgtgggagcgcggaggaggacgcggcgcattttttctttcactgcagtaaaattttacctctttggtgggaatctatgtcttgggtgagcgtatctagtgtatttccacagcacccaaggcatcattttgcccaacatatgactgccggggtggaaggaattcgggcaactagatggaggtcttggtgggcggctcttacatggttatatggcagctgaggaacaacattatattctcaagtgggactttcaacggaaacaaactgatggaggactccctatttctactttggacgtggctcagaaactatgagaaagattctatatctcactacaatcagtggtcatctaaccttagagaggcttttgtttttagacaaggaaagcagtcatagtgtattgataattgtataaccaagctgtctaatgtggttcccagcaagactgctgtcaagtgtctagtctggcttgggaaccatttatctggatttttgttgtaatcacggtacctctggtactcagattcatttctcatatatatatatatatatatatatatatatatatttatttatttatctttgctgaccaaaaaaaatagtaaaacactgttatatactcaaccaactagttccatgtaaataaagtacaaatcttgtgttttaaaatgtaataatctatctttacaggtactttgaccccaagccaagttttcattacttagatgattcagggggaatttcctgccacataacattgccttccaatgcaccaataaaccaaattttgggtacaccacagttatctatggaggcttccaaaagagaagcttgcctgaaagcaatagaagaactgtataatttgggcgctttaagtgattgtctcttgccaaaacaagatgatgcagagcctgaggtgcaggtttcaggctcttctgatgaagatgaatgtgaaggtcaaacttcagttgctttctgataagccattactttcattgtctttcactgggttgccaaaaattactgttcaaattgtattttgcaataaactgttgagcatatttacttgtcaataactatattaaggagagcgactattccagcatgttgccatgctgatcattttcagacctttcaaatactacataatccattgttggtaattatttttgtaacatacctgtctatggatttagtgttaatcccattgtcagtgtataaacttctacaccatcattcaatcatgtgttgccagatcattagaaggttttttctcctctcatgtagttattgtctcaaactcttttgtgatgatacaataacacatgattggaagagagtgtaaaagttttactccaaaatgaatcaaatcaaaattttcttatgtgttgataatctttaatgggaagctttttatttgttttcagatgtagtaccgttactatgttgattactatcaacttatgtctctagggatgcgactatatcatatgttgtgttgtactatatttattttccttttttagcagatgccatatcaagaggaaaattacatgagatgctagttccttctgcctttggacagtcatggataaatgaggataacattgtccgtctcaactcttactacataaaattttgtccctatccagaggacagggtctacaaagagtttggtctattcatgatgacctgtcttccgatggaggctgagaaattggaacttgatctccatcttgctcatggtcgatctgtgatgacaatgtttgtcccatttggagttgtagaatttaacaaagatgaggtaagtggtgtgtgtatgtgtgtgctttattttattttaagaattttgttaattaatgcttggagttttccatcctgcagattaagatggcagagaattttcaagaaatgttcctcaaaattattcttgatagattagaattcatttccgagtttgtagacttgggtatgagtgctgaatctcactcaggcacatcaaccttctaccttttgcttccagttgtattgcaagaatatggaaatgccatggaagtagattggaagatagtgaagagatgcctttgttcaccaattttcaggcatccagctgatactatggataaaaaagttttccctttagatattcacctgcaacttgccaatggttacagaagtgtaagaaatgtcgagaatagtttagtgtatgccccacataagaagaacttttattttgtcacgaatgttaactatgaaaagaatggatatagtcctcataatgattcaggcacttcaagctatgtggattacttcattgaaaagtaggtatctgtttattattatgggttcattcttgtgttattttggttttgcatccctaattcttctatgtcgatgaaggcatttatatttatgggggcttttgtaaaattgctgattaactgatggaattggatatctgagaatgttggaatatcatatattgtgcttataatatttgacaaaaatatgcatgcttgaatgccaggttttccattcacctcaaatgtccgaagcaaccacttctgcatgtgaaaccggtctccaatttgcacaacctgttacacaacagaaagcgtgaggatgcaggtattgtattggatatgttatttttagcgttagagtctgacaggaacagtgttgattaaaaagaaaaatagagccaaagctccttacaaccagaaaatattttgaaagccttggaatgtaaaacagcaactccaggaataaatgtgactgaaaaagagactccacaaagaaaatctcagccttaggaatggagaaccccacttaaaccatgttctaccaaaattgtccctatgttccttcccactatcacgatcccccttagtcattttgcgcccattcagttaggattctctactattctctttgtttcagctcagcatactcatcattcctttcatctccccccttggaccataactaactcctcttttgccccattatccataatctgaggcccccttgatgtttcttcttgagtaaacacaagatatgggcaatagagcttaatcaactaagacatgagaatttagtttttgttacctaaaaccttttacgagctagtggaatgacaaaaacatgctaggaagagatgtggtagggtgggctaatgcgtaaaatatgttaggttcgcacaagaacaagtgtaccctacgcaataataacagtggactcgaaggtccgaatatcaaccccaaagaaccaattgtattcccaattagttaagtttattaaattaataatagagatgattgaaaagaggatttaaatattttcatgattttagtttttataagaaaacaaataaacaaatataaagatagtattagtgtattaagtaagttttactttgtgatttagttaagggggagtatgaggctcttcttaacaataaaacatgggatcttattcctcttcccaaagacagacaaagcgtgggttgtaggtgggtcttcagaattaagtgggctgtaagtgggtcttcagaattaaggagaatgctgatgggactattaacaggttcaaggctaggttagtggctaaaggatttcatcaggttgttggttgtgactttaatgaagccttttctcctgtgataaaacctgttacaatcaggctaattatccctcttgctctcactaataaatgggatttgttccagctagatgtcaacaatgcctttttaaatggccatcttgaacagactatctacatgcaggaaccacaaggcttcgaaagttcagataaaaccttggtttgcaagctacaaaaagctttgtatggcctcaaacaagctccaagacagtggttggataggctcaaaggaactcttttacagcttgggtttgtggccagcaagtgcgatccttcgttgtctgtttattaagacaaagggcacattatctacattcttgtttatgtagatgatattattattactggtacctccaatgtagtaattcagcaactcaccactaagctgcattccaatttttctcttaaacaattgggaaaacttgactattttcttggtattgaaatcaaatcactggctgatgggactattctatggactcaaagcaaatatacaagagatttgcttcagaaaaccaaaatggcataagcacaacctatttcttcccctatgattgctaattgcaagttaaccaaagctgactcggatttattcggtgatccatctctctatcgatctgttgttggtgctcttcaatacacaaccattacaaaacctgagttaagctatgttgtgaacaaggtctatcagttcatggctaatcatatggactctcactggacaactgttaaatgcattctaaggcacctcaaaggctctattcatcatggtctgcatttgaaggctgctccttccttagaggtggcagacctggtggattgctttgacatggtgtatttggcagcataggaataggatggtcttccaaaatgaaagtttcaacagtcataaagtgatggagcatgctctattttattgctgaacctggcttaaaaatctggagaaaggatttgatatcctgtttcacttatggttcagtaacattagggatagttttttgtgttgaggggggatagtttatataatacaagttaggctggatgggtacctagcggttagctagatctttggtttcctaattcaagttggttagcatgtattaggtcactacagttctgcaccttgcaagtgctaggatgtatatacaactatactgcttgtactatttttaatattctatataatatatatatacttttgctgataaaaaaaaaggctgctcttcctctcagccttttactatcaaagccctgtgtgatgctgattgggcctcggatctagatgatagaaggtctacctttggtgcagtgatttattttggtcctaatttggtctcatagtggtccaagaaacaacaaattgtggctagatcttccactaaagttgaatacaggagctcgactcaagccacgactgaagttacatggattcaaactctcttaacaaagttattgttctttttcagaccccagagatttactatgacaaccaaagtgcagctatatcactcataatctagtttttcattcccggactaagcacatgaaaattgacatctttttttgtcaaggagaaagtcttagctaaagagctcaaagtgtatcatattcctgctatagatcaatgggctgattccctcactaagcctttatcaccaactcgatttctttttcttaggtccaaactcaatgttgttgatttctgattctcaaccccattgagtttaaggggagggggggggggggtattagtgtattaagtaagttttactttgtgtaaccagaagacttaatagaaaggccttggccattaccaatgtatatttggtctggccttcaaatggaccaagctgctacatgttttgagactctccagttacgtagaacgatgcacccgaatcaggtatccaagtagtagagttaggatcttgatttttagaattaaccagcattgcactaggttaggagtctttgtgagaattagttccctgattttgttctgaaccgaaggtgtttgatgaattgctttgaaatactggttccatcagagtgagagacgcatttggctcaaaatcagaatcatagcgaaaatgacacatcgttgctgtgtgaccaaatttgaagcaaacttggcactgaaaatttgcataacgaccggggcctttaccgccaccacggcgacctccattgccgcagtcagaatcattgcctccatgactgtagcctccgccgtgattgaagccaccacgatttccaaaataattggatcaattttgtgaattgaaattattcgaggatgaattgtaagaatttgaagatgaattgtaaccttgagcaacattaatcgaaggtgaattagcaaagcgcttctgaaactttttcatgtatgtctcatgtgcgagcaacagtgccactacttctctaatcggaagtgattccaacttacttttgatcattgagatcactggaccgtactcctctggtaggccttcaagaatcacgtcaaggtgttcacgcagaaaaataggatctccacacgatccaagcgcaccgactatgcatttgatgcgcaaaagaaactcacacattgttttctgttcagacattgtagttctgagttctattcgaagtatcctagctttcgcacgtgtttgcttttgaaaatactcatggatctgctcccaaagctgatatgaatgaacgcatctgataattcgagatatgattgaaacttaaagagtcgattggagccacgacaagagaatctgatcttattgttcccaattggtgtatgctggattttcatttccagcttcacaatctgcctctgtgagaaagcgcatcgggatctaaggacttgccacgaaacgctgaagtctatgagccttgatgacagattctacttgttgcctccatagcagggagttagaatcatctaacttctgagaaatcggatgaaaagaaggttcggaagcaaaattctgatttgtcaccatggatagaccttaagctctggataccatcatagagtttgagagagagaaaaagaagaaagatgaaagatattattattgatttagaaagaaaaggtcagttacaaattaattttgtttctctatttatggagaaaacaaatatggttacacataacttgactaaggcagttaactaaccaaagttagttactgctctaatagaaataattgttctaacagaatcacaagtgttctaactgaatcataattgctctaacagaataacaactgctctaactgaatcacaaagtaaaacttacttaataccctaatagagaggtttaagtaacgataagaatgatcaggagttatgactgactgataccaattttctcttaatcctagtcttaatgaaattcccccagttaattatcgattttcaaaatcaactaaaacctatgatcaagattagaagatgtttttttgccttaaatcaataccccaatgatcatggatctatcaatttaatccaaatgattaaatcaattttagggatgattaattaaagattaactaatctattggaattacccaaatagtttggatcatgcaatttggtataaaacattatctaccaattacatgcagaagatcattactatgcaatcgattgagtattaaaatgacccgttccaaataaacattaaaatgaggaagataattaattaacataaaacaatgaagaatttcatttagattaaggagaggagtacaaatggatagctacatcattactctcgaactaaggggactacccatttatgatcagagcaaaactaaagaaatcttagagagagagaaaacatcactaacaaaattgaggtgaagtgagatattattcaacccaaacagaaaccgagtataatacagtttatatagcagttacgatactgtaactgtcaactaacttgagttagttagtgcaactgctgaacagttgtcctaactaattgtcaactaacatagctgtaactgcctaactaatgtaaaccaactatagttagactaacagagtaacataactgtgtaacagcatgactaaatgaaaagaaagagttacactgagtaagtatactcctataaaaactagcaattctatatagagtaaacatagacatacctataggcaggaacaatgatcacgagatccgttctaacggtgttgtccacactcttcagctttcaaaaaccctcaaggttctctcaaattcgtaaaaagataagaataaaattgaatgcctttatttataagtcagagacctctatatatagcttcctaaagataaatacacgaaaatgtgcattacgaccatggtgaatccacctcaccacaaccgtcgtcgaaagtaacactgaagccttgggttatggattgactacgactctcttggttgaccaccgccgtggtgaggtcactcgttatcaaatccttgatgctattctgaaagggctgttatcatttgactatagctgtgttgatgaccatggccgtggtgaatggatcacatccattatcaagtgcagagtcttcaaatcttcataaatttgtgtaatttctaactctttcactcaattgagtgattgtacttttgcaatacaaaactagtatccaaatgtgagttttactaaaaaaaatgcatacaaaatgacacaaaaaatcacataaaataccacccataaagttggtttatcatgggcttactgctattgacgtgcaatgaggaaggatttgctgctgagaagtggacaatgatatacattacagatatacaatccaaaattagttcttaagattgatcctaattgattcttccatatatacatgatatgctaccataaataatctagatattataattttgatttctgacaatttgtgtcctgtgagcatttctttatgattttgtgttagcaatttaaaaagtgtactgtgcattgactactttcaaatttgtatcttgattttgaatttatcttgtattctgatcatttttcagaatcttatctaatgtatgtaacttttgaatgtcaatgacagaaccacaggagctggacgaatacttaatttatttgcctcctgagctttgtgaactaaaagtaataggtttttcgaaggatattggcagttccatatctttgctgccctcaattatgcatcgtcttggaaacttgctggtggctattgaactaaagcacatgctatcttcttcctttccagaagcagctgaaattagtgccattagagtaaggccttattaaattcaatgtattatttacattattttcaagtagtgtattcttattcacatctaaccattgcagtgcttatatgggacagatgaatcttgtatacagctactaacaattgtgaacaaattactaggttttagaggctctcaccactgagaagtgtcaggagcgcttttcccttgaaagacttgaagtgcttggtgatgctttccttaaatttgctgttgcacgtcatttttttctcatgcatgacagccttcatgaaggagaccttacaaaaaggcgttccaatgctgtaaataattccaatttgtttaagttggctattaagcgcaatttgcaggtagagttatactagcacatccctgcttcatttactaagaaagtataattattcttatttattgattttctgttagactagggtttccacagcccccacattccatttcaaaacaaaatcacctgttgatgctttcttagaacgttgatctctcattaagaccatgagaaaaaaagatatacgtgggaaataattttaataaatacctaattaattaatatatatactaaaattatattggcaatgaaaaacatatagtgccggatttgagtctgtctttaatttctagctcacccacccttatcgttttaggagatagatagacacaggactctaccaggaatcccccatttcctgctctgggacctactactgtgtctcaaaattgttgagccaaaatgagaggttcaaatcctatttatgaagttaattcatgcatttgatgtaaggtttcctggatggattaaatggtggataagttcttttctatcacataaactcctaataattaactacctacaatcctttaacagatccttcctgactaacttggatctcagttcccatcaaaataacacttggataacataaatccaaaccctatacaattcctaaccgaggattaaagatactggagttttccctagaactgaataatagaaattaactgaaccatttagtagggcttattaccttgataagatttttctatcaatatcaggctttagaatgggttaatgtatatattttaggtctttgtatatatattaggttgtgttattttattctagtctggctcattcaacccataggccatgattatatattattctatcttgtaatcttttattttttatcaatagcaaaacactttctctcttcattttcacagtgcatatttttatttactgacttgagtcttatctctatctcctcgctccctcttgcaggtctatatatgcgatcagacatttgatcccactcagttttatgcattgggccgtccttgcccaagagtttgtagcaatgaaaccgaagaaagcatacacttttgtttaaattctgttatgcaacaaggaaaagcaactgaaacccgatgtagcaaaaatcatcattggttacataggaaaacaattgctgatgtggttgaagctctggttggagcattcctagttgacagtggctttaaagctgcaattgcctttctttcatggattggcatacaagttgattttgaagcttcacaagtggttgatatctgcatagcaagtgctagctattcccctctttcttctgaagtagacattccttctcttgaaggtaagctaggacatcacttttttcataaaggcctgcttctccaggcatttgtacatccttcttacaataagcttggaggaggctgttatcaggcaagtgtaacttttcttttccctcccagtgttctgacttcatataagaattatttcctttactttatagatctatgaatcctagtgagacatttgatctttaatttttaaaatgtgataattctttgcagcgattggagtttcttggagatgctgtcttggattatttgattacttcatatctattctcagcttatcccaaactaaagcctggtcaattgacagatttgagatcattgtctgttaacaacaaggcatttgcttgtctagcggtagatcgcagttttgataattttcttttatgtgattcaagtggcctgtctgaggcaataaaaaagtatgtggactatgttagaagacctgtgtcagataatggcattaaagaagggccaaaatgtcccaaggtagatagtatgacctttatataaagttgctacacctggttgttgttgttgttgttatgcatttactcatctaagatgaagttcctaaagcattatgtctgtattcatttcaaagtttgctttaggtattttacttggaataatgctactcccacacacgacacctcacatctgtaaagtttccattatttgatcatagctcacctacactttgattctgccatctatgcttgatgtaaattgatgtgcacccactgtcccacaagatgtgtaccaagcattattcttttacttggaaatgacaagagcaaataaatggaatactaaaagagaacccaagcccttgtgtaggaagaagacacagaaaacccatccaaatgattgccaatatttttgcaaaaaagcacaaaataagccagtacatgttgggtgggaaagcctgacgcgtgacagtcaactgaacaaattatttattatattgagataagatgacaaatttaccttctgctctatgatttgtgttatggacatgagtaactcttctaggaacattacgagtcttttgtttgtccaattcaagcagctcataagttaattaagtttctgataggtgtgcattgctttgttattttgcatcaaaaggtatatggggtataaattgacatcattggtttcttcaggcactgggtgacttagtggaatcttgtgttggtgccatccttcttgattcagggttcaatttgaacaaagtttggaagattatgacttcattcttggacccaatcatgaaattctcatcaagcttgcagctcagtcctgttagggatttgcgagaactttgccaatctcataatttggagttggagtttctgccagtgccctcaaaattgactaaaaggttttcagttgaagctaaagtgagtgggaatggtgtatgtgaaacagcttcagcaactggccaaaataaaaaagaggcttgcagaattgcttcacagctactttttttaaagttcaaggtaaagcaatcatgttaagttttattttttccatccttattttctcaactcaacaccttaggattagcatttctttattgtacggtgacaccacaggtgagtatattacttttgtgattcatgtaaacaagggtaataatcatattttaactttttctgctgatgtggtgaaatcagttgtgcttatattccttaaatttctaaatactctagttgttaatgaaacaagtgttctagtttaagatgttccttgtttcttcatttggagctacttttgatcaagttcagaataatgcaatagtacctctttttcccgaaatgagaagcttggtagtaacgtcatattttttttactgtggagttcttgtaagttgaattgctatactagatagattggctcacttagtccaacagattatggacaaatttcattattatatattcattttcctttatattttccgtagagctgtctagtgtattatgtttgctttcttctgccaagttctattctttatataactttagtttgggccaatcgaaaatagtactacctccaatcctatatataagaaacaactgtctaatttatcaagatcagtaaacgtggttagattggttaacttgtcataaattttaattttattccaaaatggtacattaaatgatttaagagataattattttttaaaagataatttttcaacctatgagtataccttgcgttaagaagagagtgagagaagcaaagctattttgaatatgtctttctgggttttatcttccacccagtcaaaatgattacatggataataaataactattcttgttttcaagagaacaattaaaatatcacaattttctaagatacattgaacccaactaactattaactaagctacttgaaaggaaattatcattaaatgctcctcttttcaacactccccccaagctggagaatagattttatccattcccagcttgtataatattctatcaaaatttggagtgtgcaatcctttagtgagaatatctacaagttgaccttgtgaaggcacatatggagtgcaaatcaaaccactatccaacttttccttgataaaatgtctatccacttcaatgtgttttattcgatcatgttgtacaagattatgggctatgctaattgctgacttattatcactgtagagcttcataggtccgtcccatttaatcttcgagtcttctaagatgatttttaaccaaagcaattcacaaataccttgtgccatagcccaaaattcagcttcagctctagattgtgctacaacatcttgttttttactctccaagttaccaagtttcctcctagaaaggtacaatatttggaagtggatttactatcagctattgatccttcattgttagcattcgtataagcttcaagtattgtattcccatttcttttgtacaaaattcctcttcctggtggtgtcccctcaaggtaatgaagaattctataggtaacttgtaagtgaacttctcttggacaatgcataaattggctcaccaaactaacagcaaaagtaatatcaggccttgggtgagacaagtaaatcaattttccaactagacgttgatacatctccttatccgcttctgcaatgtcatcttcattacccaatttaaggtttgaatccatgggagtacttagagatttacaagctgtcatgcatgtctccttcggctaatctgtgacatatttttgttggaatatgaaaatacctttcttggagtgggacacttcaattcccgaaaaatatttcagcctcccaagagttttcatctcaaactcctttgctagatgctgacttaagagtagttgttccttccaatcatcactagtaacaatgatatcatccacaaatactaacaatacagtcactccccctgaggttgagtgtttgatgaataaagtgcggtctccttggctttgtttgtatcctaaggctgtcatgaccttagtgaatctcccaaaccatgtctgaggggattgtttcaacccatataaagtctttcttgactggaaaatagaattggcagcatcttcatatccaggtggaacctccatatagatttcctcctcaagctccccttgcaagaaaacattctttacatcaaactgttgtaatttccagccataatttgcagcaagagataatattactcgaactgtattcatctttgcaacaggagcaaaagtctctgagtaatctatcccataggtttgtgtgaaatccttagcgaccaatctcgccttgtacctctcaatcgacccatctaccctatattttattatatacacccacttgcaacccactggtttctttcctattggcaaagaaaccaactcccatgtcttgttcttctgcaatgcctccatttctgtatccatggcctgcttccaatttttatcaggtaatgcctcaaaaacattagtgggaattgagatagagtttaggtttgcaagaaaggttttataggttggagagattttatgaaatgaattgtaatttgagagaggatagaaaggctttttggtacatgttctggttccttttctaaaggcaatgggaagataaaggtcgtcattatgttctgaaatttccatttcatttggagaagctaaaatattatcattcaagattggaaaatcaaagttagttacctgatctaaaggagttggattggcctcttgggcaagttttgatttagaaatggcctttgatcttcttgtgtaaaccagattcttcccaaaccttgtatcattttcaagtctggtgggtgcatccttgttggattcattttgggctaatgtttcttgcttaggtttttgtgtaagatcacaattccttgtcctggaatacacaacaatggtcataaaaaacaataatacaagatatgtcatttgtatgtttctgaacagagacaagatttgtggacaattttgggacatgcaaaacattttttaggttttgaagggatttatttggatgtttcctataccggctatagttacaagagtgccatcaacaataattattttcttattgctaggacatggagaataggtggagaagatcatatggtcagtggctctagaatctaaaacccaaagggatggaaggattttttagacattaatttcaaatgaaagaggaagtatacctgaatatgccaatgtacaagtacttgatggtttttcaaggttgctaaaaaaggctctcattctttctatttttcaagcagcaggaaaaattattggaaaactgagtcgccggaattctaacagtcgctggaaaagtctccggaattttggcagttatcggaaaagtttgacagcttcaagagcccagtcaaacttgctaaataaccaaccctttttgtgcagaagcagagcacccctagatcaggagctctgatattattcgagaaaatgagagaaagaaagagagaaaacgagagagaaaggaaaatgatattattgtgatctgaaaagttagttagaattagttacaacagaggtatatatagacctctgaccctctgaactatcactaacagactctgacttcctaatactagtgaggtgttgttagcaaaagctaatagaccttacaaacatataatctgatgtctaacactagaggggtgctgttagcaaaagctaacggcccttacaatcattctataaaactgttttcacagttatacaagtacttactctaataccccccccccccccccccctcaaactcaaggagaagagttttgagaagaaacactcttcacattgaatttgtccctgagaacttcaaatcttgctgcagaaagaggcttggtcagtacatcagcccactggtccagagctggaatatgcacaatggaaagttgcttggccagaatcttttctcttacgaagaagacatcaattttcatgtgttttgtacgaatgtgaaacacaggattgtgagcaataggcacggttctctgattatcacaaaagattataggagtagtgaatggaacttgaaactctgttaggagagcatgaatccatgttaacttagtggaagtttgagttaaaatgcgatactcagcttcaatactagacctgacagcgaccttttgtttgcgagaccaccaagatattaagtttggaccaagaaatatggcagcccctgaggtggaacgcctgtcatccacattggatgcccagtcagcatcacaacagaacacgcgaagagccaagggcttggtaacagaagtaggctaaagaagtagtccatgaaacaaagtacccttgagatacctcaagattcttttcagcaccgcctagtgagagtttagagatgcagccataaattgacaaactttattgacaacaaagttgatttcaggcctagtaagagtagcatattgtaagacaccaactatagacctgtatagagttgaatcatgaaagatatcaacaccatgtcgagataacttgcaattagagaccatgggggaagaaatagaataagctttagttatgtgagttttgtggagtaaatcatgaatatatttactccgagtcatcaatatggagttattgggtagatacttgatctctagacccaaaaaataatccaaatgaccaagttgcttgagagagaatgcaatgtgtagtttggttgtgagctgctgaattagagaagcagtgctacccgtgatgatgatatcgtccacatatagactaaaagatagacaatatgcatttgttgctcgtagatgaaaagggaagaatcacatttgctcccaacaaatccaaactgcagcagagtaaatttcagtctatcaaaccattgccttggggcctatttcaagccatagagagctttgttgaacttgcagactagggacctatctgtaacttcaaaaccaaggggttgtgtcataaatacagattcttcaagaagcccatttagaaaagtcttattcgcatcaagctgaaacaacttccacccatgtgacagagcaagggtgagaacaatatgaatggtgacaggcttgaccacaggagaaatgaaaatcaaagccatgaatttgatgaaatcccttgactaccaaccttgctttgaacctattgatggaaccatcaacattttcctttactttgaaaatccacttacacccaatagcttgtccattggaaggtaagggtcccaagttttgtttttcaacaaagcaccatactcttgttgcatggcagcaagccaatctggatttttcaaggcttgtttcacagttttgggttcagaatgggtaagaaataaaaaaggatgtagtctaggattgtgaattccagacttgaaccttatttgcataaagtgtgtattatctggtatagaattaggtgctgaaacagactcagaagaggatgcactaggggtactggattttgaagtttgaggatgaacagaggtaggctcagaggaagtggatgatggacaaggcacagaaaaagaggttgtgggggaatgagttggaataggggaaaaaccaaagggaacaagaggtatagaaggagaatgaaagggagacaattgagaggattgaggggtaggaataacacaaggtggagataggttgggattaaggctgaagtaggaatcaagattcttaatggggttagaagatgaaggaaacatgtcagaataagggaaccttaattcattaaacagaacatctttggaaatattgattctgccaaatgaagacaaacatttgtaacctttgtgggaggaggaataccccaaaaataaacactcctgagatcgaaaatttagtttgtgtgtatggtaaggcctcaacaaggaaaacaggcacaaccaaaggttttaaggaaatgaaaatcaggatccttgttaaaaagagtaacaaaaggaatgacaaagttgagggaagcagtgggaactatgttaattagatagacaacagtagtaaaggcataatcccaaaattgtaagggtaaagaagcatgatgcaacaatgtaaggcccaaatcaactatatgtctgtgctttctttcaatcacaccattttgatgatgagtgtggggacaaatgagtctgtgggagatgtcataggaggttaagagagtagagaaaagtttgtattcacccccaatcaaattgaatactcttgattttgcagttcaaccatagatttggaagcttgaaaaacagaaagagtttcagccttaaactttgataggaaatattcaggtgtacttggcaaaagcatcaataaaggagacataatatttataaccagcatatgaagtcaaatgagaaggtccccacaaatctgtgaaaataagctccaaaggagagtaaacagaaacaaaagtgtgagatggtaatctatgagatttttccatacagcaggaagaccaaaaacctaagaaatttttatttgatggagaaattttacaatgattgaagacaagtttcattacatgaccattagggtgacctaatctaacatggtagaggctagcagtactagaagaagaaacaacataattagaaactacactagagttattattaacagtagcagttggatagacaagtcagtatctgaaattgaggttgaggtagacaacaatagaggagagttgtcttgaagcttgagattatgaaatgagtaaagaccatcagtaccaacaactccttgaagaaggactttattggtctcctgagatttcacaagaacaagtgaggatgaaattcaaagaaaacaaagttatctttagcaaattgactcacacttaacaaattttttgaaattgaaggaacatgtaataacttgtgaagtttaaatgttatgtgagcatcattggaggacacaaaagaagaggaaccaacactggagatactcaaaccttcaccattgcctatgaaaatttgatcaggtctatcaaagtgagtgaattggttgatattctgtgattcaccagtcacatgaaagctggctccaaagtctggaatccaggtagagccatcaggaccattcccacaagaggaggaatttgtgagcatagcactgggttgattggaggttggaacaacagccttggaattaggactaatccaggtattggaagttctgattgaaccagtggagttgggaattggttgaagtgtggtaggatcaaagaaggtgagtgattcatgaggctaaaaactcatattagacctaaagtggcaaacattggcaatgtgtccatacataaggcaaatttaacactgaaagttggcaaatcgaccaccatcacgacctctgtcggagccaccaccaccacgttcgacaccgcgatctggaaaatcaccacgacaaccgccacgaccatacgaacttcgagaaccagcaggatcaccggatttataagaattttggtgcgaatagccttgagtgtaattcaaggacggagaacttagcaccttgttagacttttggcaagcgtaccaatgttgttgcaggttacagatttataaaaagagattgtctccacaaggagatgagttactcaattccgccgaataaaagtaaacagttcaatagttatgtacaaatttaatcgagatatcatggatttgtctaactaatgaaaaataattgacgtaacagaatgacggaaataacagaatttagtgcgtcagaaatacgtaaaattatggaaacaataataatgaatctaattaatttaagaaaaatgtaggattggatttcatcgttctaataagattaacatatatgaatcattttctaacattactaatgaatacattaaattatcccaaatcaatccctcacactcatgaatcctaagaatatttactgaatatcgatccctctcactcaagagtcctaaaaatatttaccaaatattgatccctcgcatatgaagtaaataacccagcattacaatcataatctcgtgctatttgcaatcaaaacgtaatgctctattcctagcaatgtaacgtaaagataaattcattaagttcaaattctaagtattttccggtcaaacttaaaatccaattttatgaaattagtgatcaaatagaatcaagcattacgaacaaaatgaaattaccaataatgagtagaaaagattcatacatatataaaatatcaaaaaagatacataagggtacgaagattacatccaatcttttggagaaactagctgatcattgcgtagagcacaagatcaacaagagaaatgacgccagcaagttcatcatcatagcctttaattttacgcaaatactcatagattgatttaccgtcaagcaaaaccgcgcgcatcgcaattcgaagctgtcgagcatgagatttcttatgaagattgaagtactcatgaatcatctcccaaacttgataggagtgattcgagtcaagaatgcgcgatagaacgggtttcgagagagtagattaaagcaaaacaaggagcgtttggtcctaaacttcccaagcttcataatcaagattcatgcaatcaacaatgcgatcatccttcgtgagataacaaggcagaacgacgggattgacgatgaaacactacaatttatgcgacttgataaccggttctacatgttgccagtggagatagtttgagtcatcaagcttcttggtgatagagtttggaacgactgagaaacgagattcaaaggagcggaagctatggatgcacggatctggaacttcagaaggaacaataactacaaaaaaatggctctagataccatattcgagaaagaaagagagaaaactagagagaaaggaaactggtattattgtgatctaaaaacttaattagagttagttacaacaaaggtatatatagacttctgaccctctgaactaacactaacagactctgacttcctaatactagtgaggtgctgttagcaaaagctaacggcccttacaaacatataatctgttgtctaacactagaggggtgctgttagctaacagcccttacaattattctagaaaactattttcacagttatacaagtacatactctaatagataccatgttaagaagagaatgagagaagcaaaactattttgaatatgtctttttgggttttatcttccacccagcagattgatttatttataatcagaatgattacatggataataaataactaattctgttttcaagagaacaattaaaatatcacaacttcctaagatacattaaacccaactaactattaactaagctacttgaaaggaaattatcattaaatgctcctctttccaacaccttgttttgttgatagttcataaatgcacccactttcatgggaaaatgagtatatatcattgatagacctcacagttaattaggagtaaaaaggaaatttaacaataaagtagttttatgtttcttataattaagaccaagaaaatgttgtcttttgttacttatatagaggatcggaggtagtatcttttaaaacccattctcgtgccaaaacacaattgtagttttttagtttttcaaccgtcattttataagagctttcttttaaaataaataaataaataaaagggatgaaagtggttcatattcacccgcatcagcatattactaatactgggaactagcccttaaatatgatatctccttgatttttttctttgacatcatccctgtagagagaaatctgtatttgtgttatatcagtggcaaggcactgtacagagaggtcttgttattaacaaggaagagtgcaagtatctgtctagtacaattattgaagctgtagtatagctatatgcaatgacaattaatgcagaacttaagaactaacattaatatctcaattctcaacattccttggtgaatttcttcttcaacatgcataattaaacacaaattccctaagcctagtactgtattgttgtacaaaacacttggctagatgcattttatcttccctagctacaactccaggaactatattgtttgaatttaacagtcatgggtgtggatgtgcaggctcaaggttggaaagctaagtcaaaaaccctggaagaagttctggaatcaacttctaaaatggaaccaaaacttattggctatgatgaaactcccattgatgtaacagataccaatactgccaagcacatagtggttaatgctgacccgtacaacaactctaacccagaaatttgccctatgcaactgacagatgaaatatgctctccatgtgtgaaacctttcggccaacggcttcaatcttctgctaagggaaagcttagtcaaatatttgaaaatcgtgattgtggcagtgactcgtctgggacaggtagtataaaaatcatagtatttttgtcgatactgcgtctctgttaatcctgaatattgtttcatattttttgtacaaaggaacagcaagatcacgattgtatgaattatgtgctgcgtattgctggaaacctccttcatttgaatgctgcaagaaagagggaccagaccacctgaaacagtgagttactttaaaaataaaatgaagttttaaacatccgtactatcaggtttcagctttggaatttcactcaggatcttcatttcatcctctgaaaatccaaagttaacaatagaagttcaaaactagctatcaatgataatgagaatcacagccaaaagaaaagaaaaatatccctaaaaacttgtttatattaacatggactaaagtataaacaacaaacattcaaattttgtagactggagtggtgtccttaaagggctgtgtaatttaagcatctccatgaaaaaacgggtggattttctcattcaaatcaattacatttctgaatttttg

SEQ ID NO: 231 - protein, 906 aa, Glycine max
MASFGPNGTENEDSLPPPPPVVPSDVVPVKAEPEKKKASRFPIARRGLASKGTKLQLLTNHYRVNVANTDGHFYQYSVALFYDDGRPVEGKGVGRKLLDRVHETYDSELNGKDFAYDGEKTLFTLGSLARNKLEFTVVLEDVIATRNNGNCSPEGNGELNESDKKRMRRPNRSKAFKVELSYASKIPLQAIANALRGQESENYQEAIRVLDIILRQHAAKQGCLLVRQSFFHNNPKNFADVGGGVLGCRGFHSSFRTTQSGLSLNIDVSTTMIITPGPVVDFLISNQNVRDPFSLDWAKAKRTLKNLRIKSSPSNQEFKITGLSELPCKDQMFTLKKKGGDDDTEEEVTVYDYFVNIRKIDLRYSGDLPCINVGKPKRPTYIPLELCSLVSLQRYTKALSTLQRSSLVEKSRQKPQERMRVLSDALKSSNYGSEPMLRNCGISISPNFTEVEGRVLQAPRLKFGNGEDFNPRNGRWNFNNKKIVKPTKIERWAVVNFSARCDIRGLVRDLIKCGGMKGIVIDQPFDVFEENGQFRRAPPVVRVEKMFELVQSKLPGAPQFLLCLLPERKNSDLYGPWKKKNLAEFGIVTQCIAPTRVNDQYLTNVLLKINAKLGGLNSMLGVEHSPSIPIVSRAPTIIIGMDVSHGSPGQTDIPSIAAVVSSREWPLISKYRASVRTQSPKMEMIDNLFKKVSDKEDEGIMRELLLDFYTSSGNRKPDNIIIFRDGVSESQFNQVLNIELDQIIEACKFLDEKWNPKFLVIVAQKNHHTKFFQPGAPDNVPPGTVIDNKICHPRNYDFYMCAHAGMIGTSRPTHYHVLLDEIGFSPDDLQELVHSLSYVYQRSTTAISVVAPICYAHLAATQMGQFMKFEDKSETSSSHGGSGIPAPPVPQLPRLQDKVSSSMFFC

SEQ ID NO: 232 - protein, 906 aa, Glycine max
MASSGPNGTDNGDSLPPPPPVVPSDVVPVKAELEKKKALRLPIARRGLASKGTKLQLLTNHYRVNVANTDGHFYQYSVALFYDDGRPVEGKGVGRKLLDRVHETYDSELNGKDFAYDGEKTLFTLGSLARNKLEFTVVLEDIIASRNNGNCSPDGNGELNESDKKRMRRPNSSKAFKVELSYASKIPLQAIANALRGQESENYQEAIRVLDIILRQHAAKQGCLLVRQSFFHNDPKNFADVGGGVLGCRGFHSSFRTTQSGLSLNIDVSTTMIITPGPVVDFLISNQNVRDPFSLDWAKAKRTLKNLRIKASPSNQEFKITGISEFPCKDQTFTLKRKGGDDVAEEEVTVYDYFVNIRKIDLRYSGDLPCINVGKPKRPTYIPLELCSLVSLQRYTKALSTLQRASLVEKSRQKPQERMRVLTDALKSSNYGSEPMLRNCGISISPNFTEVEGRVLQAPRLKFGNGEDFNPRNGRWNFNNKKIVKPTKIERWAVVNFSARCDTRGLVRDLIKCGGMKGIVIDQPFDVFEENGQFRRAPPVVRVEKMFELVQSKLPGAPQFLLCLLPERKNSDLYGPWKKKNLAEFGIVTQCIAPTRVNDQYLTNVLLKINAKLGGLNSILGVEHSPSIPIVSRAPTIIIGMDVSHGSPGQTDIPSIAAVVSSREWPLISKYRASVRTQSPKMEMIDNLFKKVSDKEDEGIMRELLLDFYTSSGNRKPDNIIIFRDGVSESQFNQVLNIELDQIIEACKFLDEKWNPKFLVIVAQKNHHTKFFQPGAPDNVPPGTVIDNKICHPRNYDFYMCAHAGMIGTSRPTHYHVLLDEIGFSPDDLQELVHSLSYVYQRSTTAISVVAPICYAHLAATQMGQFMKFEDKSETSSSHGGSGMPAPPVPQLPRLQENVSSSMFFC

SEQ ID NO: 233 - protein, 947 aa, Glycine max
MNQRSPTHGTEPQRIIALLTHKRERETMTKEAMDSFEPDGNGKESLPPPPPVVPSDIVPLKAEEVLCTPTEHNKKKASRLPIARSGLGSKGNKIQLLTNHFKVNVAKNDGHFFHYSVAFTYEDGRPVEGKGVGRKIIDRVQETYHSDLNGKDFAYDGEKSLFTVGSLPQNKLEFEVVLEDVTSNRNNGNCSPDGLGDNESDRKRMRRPYRSKSFKVEISFAAKIPMQAIASALRGQETENFQEAIRVLDIILRQHAAKQGCLLVRQSFFHNNPNNFADVGGGVLGCRGFHSSFRTTQSGLSLNIDVSTTMIISPGPVVDFLISNQNVRDPFQLDWAKAKRTLKNLRIKTSPSNQEFKISGLSELPCREQTFTLKGKGGGDGEDGNEEITVYDYFVKVRKIDLRYSADLPCINVGKPKRPTFFPIEVCELVSLQRYTKALSTLQRASLVEKSRQKPQERMKILSDALRTSNYGAEPMLRNCGISISTGFTEVEGRVLPAPRLKFGNGEDLNPRNGRWNVSRVKFVEPSKIERWAVANFSARCDVRGLVRDLIRIGDMKGITIEQPFDVFDENPQFRRAPPMVRVEKMFEHIQSKLPGAPQFLLCLLPDRKNCDIYGPWKKKNLADFGIINQCMCPLRVNDQYLTNVMLKINAKLGGLNSLLGVEHSPSLPVVSKAPTLILGMDVSHGSPGQTDIPSIAAVVSSRHWPLISKYRACVRTQSAKMEMIDNLFKLVSEKEDEGIIRELLLDFYTTSGRRKPENIIIFRDGVSESQFNQVLNIELDRIIEACKFLDENWEPKFVVIVAQKNHHTRFFQPGSPDNVPPGTVIDNKICHPRNYDFYLCAHAGMIGTSRPTHYHVLLDQVGFSPDQLQELVHSLSYVYQRSTTAISVVAPICYAHLAATQLGQFMKFEDKSETSSSHGGLSGAGAVPVPQLPPLQENVRNTMFFC

SEQ ID NO: 234 - protein, 915 aa, Glycine max
MDSFEPDGNGKESLPPPPPVVPSDIVPLKAEEVLCTPTEHNKKKASRLPIARSGLGSKGNKIQLLTNHFKVNVAKNDGHFFHYSVAFTYEDGRPVEGKGVGRKIIDRVQETYHSDLNGKDFAYDGEKSLFTVGSLPQNKLEFEVVLEDVTSNRNNGNCSPDGLGDNESDRKRMRRPYRSKSFKVEISFAAKIPMQAIASALRGQETENFQEAIRVLDIILRQHAAKQGCLLVRQSFFHNNPNNFADVGGGVLGCRGFHSSFRTTQSGLSLNIDVSTTMIISPGPVVDFLISNQNVRDPFQLDWAKAKRTLKNLRIKTSPSNQEFKISGLSELPCREQTFTLKGKGGGDGEDGNEEITVYDYFVKVRKIDLRYSADLPCINVGKPKRPTFFPIEVCELVSLQRYTKALSTLQRASLVEKSRQKPQERMKILSDALRTSNYGAEPMLRNCGISISTGFTEVEGRVLPAPRLKFGNGEDLNPRNGRWNVSRVKFVEPSKIERWAVANFSARCDVRGLVRDLIRIGDMKGITIEQPFDVFDENPQFRRAPPMVRVEKMFEHIQSKLPGAPQFLLCLLPDRKNCDIYGPWKKKNLADFGIINQCMCPLRVNDQYLTNVMLKINAKLGGLNSLLGVEHSPSLPVVSKAPTLILGMDVSHGSPGQTDIPSIAAVVSSRHWPLISKYRACVRTQSAKMEMIDNLFKLVSEKEDEGIIRELLLDFYTTSGRRKPENIIIFRDGVSESQFNQVLNIELDRIIEACKFLDENWEPKFVVIVAQKNHHTRFFQPGSPDNVPPGTVIDNKICHPRNYDFYLCAHAGMIGTSRPTHYHVLLDQVGFSPDQLQELVHSLSYVYQRSTTAISVVAPICYAHLAATQLGQFMKFEDKSETSSSHGGLSGAGAVPVPQLPPLQENVRNTMFFC

SEQ ID NO: 235 - protein, 881 aa, Glycine max
MEVSKRVPMARKEVGSKGEPRQLLANHFGVCLVKPKDDIDGYFYHYDVAMSYEDGNPVEAKGVGRKVLNQVCETYVELRNMSFAYDGEKSLFTLGPLASQRLQYPVVLEDVSSRRVGKNGNPAESPKGGYTKRMRIRHQFRPKTINVDIKYAAKIPLQAIEDALRGRDSEKSQEAVRVLDIILRQHSANQGYLLVRQSFFHDNRRTCTDIGGGVQGCRGFHSSFRVTQGGLSLNMDVTTTMIVKPGPVVDFLLQNQSVQNPNYIDWTKAKRMLKNLRIRANGVEFKISGLSDNTCRNQKFLLRQKGTNGEVQEREITVHDYFTRQKLIGLNYSADMPCINVGKPKRPSYFPIELCEMVSLQRYTKALTNLQRAQLVEKTRQKPQVRRQALEDALRSSRYDDEPMLRSSGITIEPNFVRLVGRVLEPPKLIVGGEKSIIPRNGRWNFNNKKLYEPLMIGRWAIVNFSSRCDTRLLIELIRRCAAAKGMTMSNSLFDKVIEEDGCFIREPPNVRVERMYAKLRTTLPHEKPHFLLCILPEKKNSDIYGPWKKKSLVEEGIVTQCIAPTKINDQYITNVLLKINAKYGGMNSYLSVELCNSIPFVSAVPTLILGMDVSHGSPGRSDVPSIAAVVSSRCWPQISRYRASVRTQSSKVEMIQSLFKPVANTNKDEGIIREVLLDFEITSFKRKPQQIIIFRDGVSESQFNQVLNIELSQIIEACKHLDEKWDPKFTLIIAQKNHHTRFFQANARDQTNVPPGTVIDNTVCHPKNNDFYLCAQAGMIGTTRPTHYHVLHDEIGFSADEVQELVHSLSYTYQRSTTAVSLVAPICYAHLAAAQMAQFMKFDEHSETSSTHGGLTSASAPLVPQLPRLHKQVINSMFFC

SEQ ID NO: 236 - protein, 874 aa, Glycine max
MEVSKRVPMARKEVGSKGEPRQLLANHFGVCLVKPKDDIDGYFYHYDVAMSYEDGNPVEAKGVGRKVLNQVCETYVELRNMSFAYDGEKSLFTLGPLASQRLQYPVVLEDVSSRRVGKNGNPAESPKGGYTKRMRIRHQFRPKTINVDIKYAAKIPLQAIEDALRGRDSEKSQEAVRVLDIILRQHSANQGYLLVRQSFFHDNRRTCTDIGGGVQGCRGFHSSFRVTQGGLSLNMDVTTTMIVKPGPVVDFLLQNQSVQNPNYIDWTKAKRMLKNLRIRANGVEFKISGLSDNTCRNQKFLLRQKGTNGEVQEREITVHDYFTRQKLIGLNYSADMPCINVGKPKRPSYFPIELCEMVSLQRYTKALTNLQRAQLVEKTRQKPQVRRQALEDALRSSRYDDEPMLRSSGITIEPNFVRLVGRVLEPPKLIVGGEKSIIPRNGRWNFNNKKLYEPLMIGRWAIVNFSSRCDTRLLIELIRRCAAAKGMTMSNSLFDKVIEEDGCFIREPPNVRVERMYAKLRTTLPHEKPHFLLCILPEKKNSDIYGPWKKKSLVEEGIVTQCIAPTKINDQYITNVLLKINAKYGGMNSYLSVELCNSIPFVSAVPTLILGMDVSHGSPGRSDVPSIAAVVSSRCWPQISRYRASVRTQSSKVEMIQSLFKPVANTNKDEGIIREVLLDFEITSFKRKPQQIIIFRDGVSESQFNQVLNIELSQIIEACKHLDEKWDPKFTLIIAQKNHHTRFFQANARDQTNVPPGTVIDNTVCHPKNNDFYLCAQAGMILCHFGQPLSPFGHGGIHRRDPPGTPLRHRRGPGPLRRHLGGREPGVPWFPLLSPLTSNIEMCISHIGWWGQLDLLTTMFYTMKSDSQLMKCKN

SEQ ID NO: 237 - protein, 393 aa, Glycine max
MSNSLFDKVIEEDGCFIREPPNVRVERMYAKLRTTLPHEKPHFLLCILPEKKNSDIYGPWKKKSLVEEGIVTQCIAPTKINDQYITNVLLKINAKYGGMNSYLSVELCNSIPFVSAVPTLILGMDVSHGSPGRSDVPSIAAVVSSRCWPQISRYRASVRTQSSKVEMIQSLFKPVANTNKDEGIIREVLLDFEITSFKRKPQQIIIFRDGVSESQFNQVLNIELSQIIEACKHLDEKWDPKFTLIIAQKNHHTRFFQANARDQTNVPPGTVIDNTVCHPKNNDFYLCAQAGMIGTTRPTHYHVLHDEIGFSADEVQELVHSLSYTYQRSTTAVSLVAPICYAHLAAAQMAQFMKFDEHSETSSTHGGLTSASAPLVPQLPRLHKQVINSMFFC

SEQ ID NO: 238 - protein, 913 aa, Glycine max
MEVAITRAKGGMTEEVPGIVEAAEPPTSSQSPADVPHNLETEQMTPTKYSIISRNGVGTTGKHIPLLVNLFEVAVNVPDTVFFQYSVAITFEDKQAVESKGIGRKVIDRLYQTYSSELGGKRFVYDGGKTLYTVGPLPLNKYEFKVLLEKSFTKRSAKSPGANGSLHEETKRSKHSFQSKTFMVEISFATKIPLQSIVISLKEVESDTNSQDALRVLDTILRQRAANCGCLLVRQSFFHDDSRNFNDVGAGVTAVSGFHSSFRSTQRGLSLNIDVSTTIIIKPGPVIDFLLSNQQVKEPRYIDWEKAKKMLKNLRVQATHHNQEFKISGLSEKPCIQQLFSMKVKNDDNNSRGQTVDITVYEYFAKHCGIELTSSAYLPCLDVGKPKRPVYLPLELCSLVSLQRYTKVLSLMQRASLVEKSRQKPQDRIKILKSAVGKCYDDDPVLAACGISIEKQLNLIEGRVLETPKLKVGKNDDCIPHNGRWNFNKKTLLQASHIDYWAVVNFSASCDTSYISRELIRCGMSKGINIERPYTLIEEEPQLRKSHPVARVERMFDLLASKLNREPKLILCVLPERKICDIYGPWKKKCLSEIGVVTQCIAPVKITNQYLTNVLLKINSKLGGINSLLAIEHSGHLPLIKDTPTMILGMDVSHNSLGRLDSPSIAAVVGSRHWPLISRYRASVRMQASKVEMIDALYKPLENGSDDGIIRELLLDFYDSSNGRKPTQFIVFRDGVSESQFEQVLTIELNQIIKAYQHLGEVNVPQFTVIVAQKKHHIKLFLPNGPENVPPGTVVDTTITHPRNYDFYMCAHAGMLGTSRPVHYHVLLDEIGFSADGLQNLIHSLSYVNQRSTIATSVVAPICYAHHAAAQMGQLLNFDDSSETGSSPASEGGIPIPELPRLHRNVRSSMFFC

SEQ ID NO: 239 - protein, 911 aa, Glycine max
MSLGNAKGGMTEEVPGIVEAAEPPTSSQSPADVPHNLETEQMTPTKYSIISRNGVGTTGKHIPLLVNLFEVAVNVPDTVFFQYSVAITFEDKQAVESKGIGRKVIDRLYQTYSSELGGKRFVYDGGKTLYTVGPLPLNKYEFKVLLEKSFTKRSAKSPGANGSLHEETKRSKHSFQSKTFMVEISFATKIPLQSIVISLKEVESDTNSQDALRVLDTILRQRAANCGCLLVRQSFFHDDSRNFNDVGAGVTAVSGFHSSFRSTQRGLSLNIDVSTTIIIKPGPVIDFLLSNQQVKEPRYIDWEKAKKMLKNLRVQATHHNQEFKISGLSEKPCIQQLFSMKVKNDDNNSRGQTVDITVYEYFAKHCGIELTSSAYLPCLDVGKPKRPVYLPLELCSLVSLQRYTKVLSLMQRASLVEKSRQKPQDRIKILKSAVGKCYDDDPVLAACGISIEKQLNLIEGRVLETPKLKVGKNDDCIPHNGRWNFNKKTLLQASHIDYWAVVNFSASCDTSYISRELIRCGMSKGINIERPYTLIEEEPQLRKSHPVARVERMFDLLASKLNREPKLILCVLPERKICDIYGPWKKKCLSEIGVVTQCIAPVKITNQYLTNVLLKINSKLGGINSLLAIEHSGHLPLIKDTPTMILGMDVSHNSLGRLDSPSIAAVVGSRHWPLISRYRASVRMQASKVEMIDALYKPLENGSDDGIIRELLLDFYDSSNGRKPTQFIVFRDGVSESQFEQVLTIELNQIIKAYQHLGEVNVPQFTVIVAQKKHHIKLFLPNGPENVPPGTVVDTTITHPRNYDFYMCAHAGMLGTSRPVHYHVLLDEIGFSADGLQNLIHSLSYVNQRSTIATSVVAPICYAHHAAAQMGQLLNFDDSSETGSSPASEGGIPIPELPRLHRNVRSSMFFC

SEQ ID NO: 240 - protein, 902 aa, Glycine max
MTEEVPGIVEAAEPPTSSQSPADVPHNLETEQMTPTKYSIISRNGVGTTGKHIPLLVNLFEVAVNVPDTVFFQYSVAITFEDKQAVESKGIGRKVIDRLYQTYSSELGGKRFVYDGGKTLYTVGPLPLNKYEFKVLLEKSFTKRSAKSPGANGSLHEETKRSKHSFQSKTFMVEISFATKIPLQSIVISLKEVESDTNSQDALRVLDTILRQRAANCGCLLVRQSFFHDDSRNFNDVGAGVTAVSGFHSSFRSTQRGLSLNIDVSTTIIIKPGPVIDFLLSNQQVKEPRYIDWEKAKKMLKNLRVQATHHNQEFKISGLSEKPCIQQLFSMKVKNDDNNSRGQTVDITVYEYFAKHCGIELTSSAYLPCLDVGKPKRPVYLPLELCSLVSLQRYTKVLSLMQRASLVEKSRQKPQDRIKILKSAVGKCYDDDPVLAACGISIEKQLNLIEGRVLETPKLKVGKNDDCIPHNGRWNFNKKTLLQASHIDYWAVVNFSASCDTSYISRELIRCGMSKGINIERPYTLIEEEPQLRKSHPVARVERMFDLLASKLNREPKLILCVLPERKICDIYGPWKKKCLSEIGVVTQCIAPVKITNQYLTNVLLKINSKLGGINSLLAIEHSGHLPLIKDTPTMILGMDVSHNSLGRLDSPSIAAVVGSRHWPLISRYRASVRMQASKVEMIDALYKPLENGSDDGIIRELLLDFYDSSNGRKPTQFIVFRDGVSESQFEQVLTIELNQIIKAYQHLGEVNVPQFTVIVAQKKHHIKLFLPNGPENVPPGTVVDTTITHPRNYDFYMCAHAGMLGTSRPVHYHVLLDEIGFSADGLQNLIHSLSYVNQRSTIATSVVAPICYAHHAAAQMGQLLNFDDSSETGSSPASEGGIPIPELPRLHRNVRSSMFFC

SEQ ID NO: 241 - protein, 902 aa, Glycine max; identical to SEQ ID NO: 240

SEQ ID NO: 242 - protein, 882 aa, Glycine max
VTTVTKKVDPSLSLETNVPARVAILKKICFSFAQTLFCPHLFSFAQRYATMAKRKTSDASDAQDDTVSLLPSQRNKAKHPNSNSNACFAGKPIPPAEALAKWPHRYPSEGKKKGSARTSKEATSENSEVMPARCHYRQAKVDGVVYNLYDDAYVKAEDGKPDYIARIVEMFETVDKEQCFTAQWFYRAEDTVIKNHGDLVDKKRIFISDVKDVNPLDCIVSKVKIYKKSPSVDLTSKKGKLPSCDYYYDMKYTVPYLTFSNIVNETVKTESDASSTISSESGSNGCVSNANLANGKTTQNNSSGSSEWTLLDLYSGCGAMSTGLCFGASLAGIKLVTRWAVDINAHACESLKLNHPETQVRNEPAEDFLNLIKSWAKLCEEFALLGSERLDSDPDMDEDENEAVRKEESGNQSDSEEFEVEKLLAVCYGDPNDVKKPGLYFKVRWLGYASSYDTWEPIEGLSDCKEAMKDFVTKGYKKRLLPLPGDANFICGGPPCQGVSGFNRFRNAAAPLEDTKNKQLLVYMDIIDFLKPKYVLMENVVDILRFSGGYLGRYAICRLVAMNYQARMGMMAAGSYGLPQFRMRVFLWGARPTEKLPPYPLPTHEVVSRGSVPTEFEEITVAYDKKDTCHLAGALLLEDAISDLPHVTNDENQDERNYEAPSETEFQKYIRLKKNEMVGSMASAQSAPDRILYDHRPLQLNKDDYERVCQIPQKKGANFRDLPGVLVNGNKVQWDPSVQRVMLDSGKPLVPDYAMTFVRGTSSKPFGRLWWDEIVSTVVTRAEPHNQAILHPTQNRVLTIRENARLQGFPDCYKLCGPVKERYIQVGNAVAVPVALALGYTFGLACQGLLSDDNPLTTLPFKYPSCLALSSLAETENDNESS

SEQ ID NO: 243 - protein, 833 aa, Glycine max
MAKKRSASDATDDAQNDTVSLLPSQRKKPKHSAPNPDACFVGKPIPSAEARAKWPHRYPSEVKKKAPARSSEEVTSENSEVMLARCHYRQAKVDGVVYNLYDDAYVKAEDGKPDYIARIVEMFETVDKEQCFMAQWFYRAEDTVIKNHGDLVDKKRVFISDVKDVNPLDCIVSKVKIFKKNPSVDLASKKAKLPFCDYYYDMKYTVPYLTFSNLVNETVKTESDASSTISSESGSIGCVNNANLAKRKTTQNNSSGSSQWTLLDLYSGCGAMSTGLCLGASLAGIKLVTMWAVDINAHACKSLKLNHPETHVRNEPAEDFLNLIKAWAKLCEEFALLGSERSDSDPDMDEDENEAVQKEESGNQSDLEEFEVEKLLAVCYGDPNGVKKPGLYFKVRWLGYDSSYDTWEPIDGLSDCKEVMKDFVTKGYKKRLLPLPGDANFICGGPPCQGVSGFNRFRNAEAPLEDTKNKQLLVYMDIIDFLKPKYVLMENVVDILKFSGGYLGRYAIGRLVAMNYQARMGMMAAGSYGLPQFRMRVFLWGARPTEQLPPYPLPTHEVVSRGFVPTEFEEITVAYDKKDTCQLAGALLLDDAISDLPPVTNDENQDERNYGAPARTEFQRYIRLKKNEMVGSMATAQSTPRRILYDHRPLQLNKDDYDRVCQIPQKKGANFRDLPGVLVNGNKVEWDPSVERVMLDSGKPLVPDYAMTFVRGTSTKPFGRLWWDEIVPTVVTRAEPHNQAILHPRQNRVLTIRENARLQGFPDCYKLCGPVKERYIQVGNAVAVPVALALGYTFGLACQGLSDDKPLTTLPFKYPSCLALSSLAGTENDNESS

SEQ ID NO: 244 - protein, 875 aa, Glycine max
MPSKRKTRSSASPAAAPPSKRASRSSASRVADSAPVKSEAEEVVAASSVVKEEAQASFTDVTDGNVSDGEGTNARFVGEPVPDEEARRRWPKRYQEKEKKQSAGPKSNRNDEDEEIQQARRHYTQAEVDGCMLYKLYDDAHVKAEEGEDNYICKIVEIFEAIDGALYFTAQWYYRAKDTVIKKLAYLIEPKRVFFSEVQDDNPLDCLVEKLNIARITLNVDLEAKKETIPPCDYYCDTQYLLPYSTFVNLPSENGESGSETSSTISSETNGIGKYEVNSQPKEAFLPEESKDPEMKLLDLYCGCGAMSTGLCLGGNLSGVNLVTRWAVDLNQHACECLKLNHPETEVRNESAENFLSLLKEWQELCSYFSLVEKKVSHEKYVNLFSEDDDDTSSNEEVNSEDDNELNEDDEIFEVSEILAVCYGDPNKKKEQGLYFKVHWKGYESALDSWEPIEGLSNCKEKIKEFVSRGFKSQILPLPGDVDVICGGPPCQGISGFNRFRNKESPLDDEKNKQLVVFMDIVQYLKPKFTLMENVVDLVKFAEGFLGRYALGRLLQMNYQARLGIMAAGAYGLPQFRLRVFLWGAAPSQKLPQFPLPTHDVIVRGVIPLEFEINTVAYNEGQKVQLQKKLLLEDAISDLPRVQNNERRDEIKYDKAAQTEFQRFIRLSKHEMLELQSRTKSSKSLLYDHRPLELNADDYQRVCRIPKKKGGCFRDLPGVRVGADNKVEWDPDVERVYLDSGKPLVPDYAMTFVNGTSSKPFARLWWDETVPTVVTRAEPHNQAILHPEQDRVLTIRENARLQGFPDFYKLCGPVKERYIQVGNAVAVPVARALGYTLGLAFEGSTSTSDDPLYKLPDKFPMIRDRVSSVSSEDDV

SEQ ID NO: 245 - protein, 503 aa, Glycine max
MKFLTDFQVEEYYGAKGVDTWSLKMWEKVISNNDTIADCVEALIGAYYVDGGLFASLNVMKWLGIGVELELSSLDEAITAASLSTCVPIESDIASLEKKIEYEFSVKGLLLEAITHLSEKELGIGCCYERLKFLGDSVLDLLITWHLYQSHTDIDPGVLADLRSASVNNDNFAQVAVRHNLHQHLLHSSGLLVSQILEYVKVISESDPRSLPSIRAPKALGDVVESIVGPILIGTKLSLDQVWNVFYPLLSPIVTPDKLELPPFRELNELCDSLGHFVKVKENCEKMGSAMHVEVSVQLPNALLVREGKGPNKKTAKGEAAFHLLKDLEKRGILHGSLMSKGKRDNPDHIYDSFHLKRDSSICSSLIEEHSSEPASHKRHTLDETNLTASIQFCETSELITPAVAFINQIIDNAMSVGGPRTTLYDVCKKLQWPVPAFDSREYKDSFYFVTDLYLNPVKGCKEARDKTVSLSKITLCIPNYGNIECKGEARSDKKSSFDSAAI

SEQ ID NO: 246 - protein, 1674 aa, Glycine max
MNSNIDSTDHSQDQSRKRNLPDADDSPAPNFHIDSSDHNQDQSKKRKQPNDEDSPSLESPCSNMNPRRYQIEVYEVARRRNTIAVLDTGSGKTLIAVMLMKEVGQAIKTSGVKKLIIFLAPTVHLVNQQFKNIKFLTDFQVEEYYGAKGVDTWTLKTWEKEISNNDVLVMTPQILLDALRKAFLRMEMICLIVIDECHRTIGNHPYTKIMKEFYHQANEKPKIFGMTASPVGKKGVSSTMDCEDQISELESILDSQRYTVEDRTEMDRCVPSAKESCRYYDQARFSALSLKPKIEALSFKFDALLSENQSNYKDVENKFKTLSQRMSNELAKILHCLEDLGILCAYEAVKICHENFSKSEGECEIYRKGYLQCITFLEEVIKLIEESLHLADKKILEVDFNYSQAEDLGYISPKLIELIKLFQSFGESSQVLCLIFVDRIITAKVIQRFAKTVPNISHFTVSYLTGNNTSVDALAPKRQKEILDSFRSGKVNLLFTTDVLEEGIHVPNCSCVIRFDLPKTVRSYVQSRGRSRQANSQFVVMLERGNLKQRDQLFDIIRSERSMTDASIYKEHESSLRACMVGKTNAYYVESTGASFTLDSSVSLIHRYCGTLPRDKYSCVKPNFEFLSVEGGYQCKLILPSNSAFQTIIGPSGKDMRLAKHLACFEACKKLHQMGALNEHLVPLIEDSSEDDHIVKNKESSSGAGTTKRKELHGKANIHALSGAWGDKLTRVKFNAYKFEFTCNIVSEIYSGFALLIESELDEDVGNVNLDLYLVSKIVKASVSSCGQVDLDAEQMMRAKCFHELFFNGLFGRLVLKSKSAGEREFLLQKDTNSLWSPKHLYLLLPLEKLNDICEGSLQINWCGINSCASAIKFLRRKFSLVTGDCDDNGTITSPHDTSSSEMECVGANKIHFANCVVDADNIKDRVVLAIHTGKIYCIIEIDSNLSAESPFYGNNEKSKESITFSDYFSKSYGISLRHPGQPMLRLKQSHNPHNLLFNFYEEDARDKSSKIGPAASKLPVHVHIPPELLYILDVKRDVLKSLYLLPSLMYRIESLMLSSQLREEIDGQTSKFNIRSSLILESLTTLRCSESFSMERLELLGDSVLKYVVSCHLFLKYPKKHEGQLSARRSSAVCNSTLHKLGTDRKLQGYIRDSAFEPRRWVAPGQRSIHLVCCDCGLETLEVPLDAKFHTEDPKVVVGKFCDRGHCWMCSKTIADCVEALIGAYYVDGGLFASLNVMKWLGIGAELELSLVDEAITAASLRTCLPKESEIASLEKKIGYEFSVKGLLLEAITHLSEKELGIGCCYERLEFLGDSVLDLLITWHLYQSHTDIDPGVLTDLRSASVNNDNFAQVAVRHNLHQHLLHSSGLLLSQISEYVKVISESDPRSLPSISAPKALGDVVESIVGAILIDTKLSLDQVWNVFYSLLSPIVTPDKLELPPFRELNELCDSLGYFVKVKENCEKVGSAMHVEVSVQLPNALLVREGKGANKKTAKGEAAFYLLKDLEKQGISHGSFMSKGKRDNPDHVYGSSHLKMDSSILIEEHSSEPASHKRHILDETNLTAINLSINMKKGGPRTTLYEVCKKLQWPVPTFDSTEYKDRSLFESCEGLQGSKGQNCFVSKITLCIPNYGNIESKGEARSDKKTSFDSAAVQMLLELQRLGKVEIDPLPSS

SEQ ID NO: 247 - protein, 537 aa, Glycine max
MQFHNYVGSEGDDSSPSDYDWNTDDELEVFGIPPSDPTISSQESCEDSVGESSASCSSAKHSKLIHLFVGMGFSRETVIKAIDENGRDNEEDIMEALLTLTAEKPLTVEKDEALSVLVNMGYPFEEALTAIDKCGPKAHISELADFISASQLEKGLHSPQESPNNKHDASDYTHEKPCQPSGEYYLHTSKKVKLGLGIFNEASQVISRKFPREVANKPYFYFENVALAPKGVWKTISRFLYEIEPEYVDSKYFCAATRKRGYIHNLPTHNRSPLLPIPPLTIQEAFPTTKKWWPSWDRRTKLNCLLTRVAPGPVTERIRKLLEKFGDEPPLHVQENVLVEIRKWNLVWVGKNKLAPLEPDEYEMLLGFPRDHTRGGGVTRTERYKSLGNAFQVNTVAYHLSVLKGRFPNGINVLSLFSGIGGAEVALHRLGMMLKNVVSVEIAEVNRNIIRSWWEQTNQRGNLIEVEDVQKVSSNELSQWITKFGGFDLIIGGSPCNNISGSNRVSRHGLEGEQSSLFYEYFRIVEAVMEIQRDELL

SEQ ID NO: 248 - protein, 531 aa, Glycine max
MGSEGDDSSPSDYDWNTDDELEVFGIPPSDPTISSQESCEDSVGESSASCSSAKHSKLIHLFVGMGFSRETVIKAIDENGRDNEEDIMEALLTLTAEKPLTVEKDEALSVLVNMGYPFEEALTAIDKCGPKAHISELADFISASQLEKGLHSPQESPNNKHDASDYTHEKPCQPSGEYYLHTSKKVKLGLGIFNEASQVISRKFPREVANKPYFYFENVALAPKGVWKTISRFLYEIEPEYVDSKYFCAATRKRGYIHNLPTHNRSPLLPIPPLTIQEAFPTTKKWWPSWDRRTKLNCLLTRVAPGPVTERIRKLLEKFGDEPPLHVQENVLVEIRKWNLVWVGKNKLAPLEPDEYEMLLGFPRDHTRGGGVTRTERYKSLGNAFQVNTVAYHLSVLKGRFPNGINVLSLFSGIGGAEVALHRLGMMLKNVVSVEIAEVNRNIIRSWWEQTNQRGNLIEVEDVQKVSSNELSQWITKFGGFDLIIGGSPCNNISGSNRVSRHGLEGEQSSLFYEYFRIVEAVMEIQRDELL

SEQ ID NO: 249 - protein, 590 aa, Glycine max
MGGDDSGLESDNFDWNTEDELEIQNYNSSSSCLTLPNGDAVTGSGEASSSAVLANSKVLDHFVSMGFSREMVSKVIQEYGEENEDKLLEELLTYKALESSSRPQQRIEPDPCSSENAGSSWDDFSDTDIFSDDEEIAKTMSENDDTLRSLVKMGYKQVEALIAIERLGPNASLEELVDFIGVAQMAKAEDALLPPQEKLQYNDYAKSNKRRLYDYEVLGRKKPRGCEKKILNEDDEDAEALHLPNPMIGFGVPTESSFITHRRLPEDAIGPPYFYYENVALAPKGVWQTISRFLYDVEPEFVDSKFFCAAARKRGYIHNLPIQNRFPLLPLPPRTIHEAFPLTKKWWPSWDIRTKLNCLQTCIGSAKLTERIRKAVEIYDEDPPESVQKYVLHQCRKWNLVWVGRNKVAPLEPDEVETLLGFPRNHTRGGGISRTDRYKSLGNSFQVDTVAYHLSVLKEMYPNGINLLSLFSGIGGAEVALHRLGIPLKNVVSVEKSEVNRNIVRSWWEQTNQKGNLYDMDDVRELDGDRLEQLMSTFGGFDLIVGGSPCNNLAGSNRVSRDGLEGKESSLFFDYFRILDLVKNMSAKYR

SEQ ID NO: 250 - protein, 590 aa, Glycine max; identical to SEQ ID NO: 249

SEQ ID NO: 251 - protein, 580 aa, Glycine max
MGGDDFDWNTDDELEIENYNSSSSCLTLPNGDAGEASSSAVLANSKVLDHFVNMGFSREMVSKVIQEYGEENEDKLLEELLSYKALESSPQPQQRIEPDPCSSENAGSSWDDFSDTDIFSDDEEIAKTMSENDDTLRSLVKMGYKQEEALVAIERLGPNASLEELVDFIGVAQMAKAEDALLPPEEKLQYNDYAKSNKRRFYDYEVLGRKKPRGCEKKILNEDDDEEDEALHLPNPMIGFGVPTESSFITHRRIPEDAIGPPYFYYENVALAPKGVWQTISRFLYDVQPEFVDSKFFCAAARKRGYIHNLPIQNRFPLLPLPPRTIHEAFPLTKKWWPSWDTRTKLNCLQTCIGSAKLTERIRKAVEIYDEDPPESVQKFVLHQCRKWNLVWVGRNKVAPLEPDEVETLLGFPRNHTRGGGISRTDRYKSLGNSFQVDTVAYHLSVLKEMYPNGINLLSLFSGIGGAEVALHRLGIPLKNVVSVEKSEVNRNIVRSWWEQTNQKGNLYDIDDVRELDGDRLEQLMSTFGGFDLIVGGSPCNNLAGSNRVSRDGLEGKESSLFFDYFRILDLVKNMSAKYR

SEQ ID NO: 252 - protein, 679 aa, Glycine max
MSGRRERVRESDFEYYERVYYEDLKSGYYKLKISKSSYKCPFCQDKREYSLNELSKHAVRFERDSRSMKIKDLAKHSALQLYIKKYLDVYDKVGSVVHDKVESVIHDKAGSVVHDRPGKVVLDRSGKVVNDGSGNVYSDRFGKVVNDRPRNVVIANDRSEKVGKDQLFVWPWVGIVANIATEFKNGMRIGDSGSKLRDEFTLKGFHPLKVQPLWNRYGHSGFAIVEFSKDWDGFTNAMNFERSFEAEHCAKRDYDNLRDRGGRLYGWVARDDDYHSKSIIGDHLRKTGDLQSVSGKQAEEKRKTTLLVSDLAKTLIVRNEKLEQVCSKYDDISVSLNRVMDEKEAMIESYNNEIKKMHQITRKYWEVFYRDREKAGLKLHAQRKKLESREKDLQRNQVQNENERKKLYLERKNNEMAIMEQNKADEKVMHLAEEHKKEKEKMHKKILELQNELDAKQKLELEIQQLKGNLQVRNQIGEDDEEEKNKLDAIKTELEDKEEELEDLEALQQALVVKERKTNDELQDARKELIRWLRKTNSSRAFIGVKRMGELDEKPFLSAAKRKYSGDEVNLKAVELCSQYEAYLRDPTWFPFKVLIDKEGKAKEVLDEEDEKLRTLKDEFGDDVFQAVVTALKELNEYNPSGRYPLPELWHSKEGRKALLKEGCSFIIRQWKALKQRKK

SEQ ID NO: 253 - protein, 670 aa, Glycine max
MSGGRERVRESDFEYYEREYYKDLKSDYYKLKISKSSYKCPFCQDKREYSLNELLKHAVRFERDSRSMKTKDLAKHSALQLYIKKYLDENDRPGSVVHDKAGSVVLDRPGKVVHDRSGKVVIDGSGNVYNDRFGKVVNDRPGNVVIVNDRSEKVGKDQLFVWPWMGIVANIATEFKDGRRTGDSGSKLRDEFTLKGFHPLKVQPLWNRYGHSGFAIVEFSKDWEGFTNAMNFGRSFEAEHCGKRDYNKLRDRGDRLYGWVARDDDYHSKSIIGDQLRKTGDLQSVSGKQAEEKRKTSLLVLDLAKTLKVRNETLEQVCSKYDDISVSLNRVMDEKEAMIESYNNEIKKMHQTTQKYWEVFYRGREKARLELHAQRKELEGREKDLQRSQVKNENERRKLYLERKNNEMAIMEQNKADERVMHLAEEHKEEKEKMHKKILELQNELDAKQKLELGIQQLKGNLQVRKQIGEDDEEEKNKLDAIKTELEDKEEELEGLEALQQALVVKERKTNDELQDARKELIRWLGKTNSSRAFIGVKRMGELDGKPFLSAAKRKYSGDEVNLKAVELCSQYEAYLRDPNWFPFKVLIDREGKAKEVLDEEDEKLRTLKDEFGDDVFQAVVTALKELNEFNPSGRYPLRELWHSKEGRKASLKEGCSYIIKQWKTLKRKK

SEQ ID NO: 254 - protein, 1555 aa, Glycine max
MGSASLLNPSQPGVKKNSKSKQKSVVSKTEEKVMVKDKQKKRSLLESSEQPAATRKMPKRAAACKNLKEKSFLISEKSCLIEMEKDQIVEEESLAVRMTAGQDDGRPNRRITEFILHDATGKAQPLEVLEVNELFITGLILPLEVSTGKKKEKGVKCEGFGRVESWDISGYEDGSPVIWLSTDIADYDCQKPAASYKKVYDLFLEKARACIEVYLKLAKSSGGDPDISLDELLAGMVRSMSGSKCFSGTASIKDFVISHGEFIYKQLIGLDMTSKANDRTFADIPALIALRDESKKQANYVHAQVMPSNGSLRIDSGVGDEENKNQMDSVASVNEEDEDAKLARLLQEEEYWQSMKQKKNSRPTSVSNKYYIKINEDEIANDYPLPAYYKTSLQETDEFIVFDNDYDIYDTQDLPRSMLHNWSLYNSDARLVSLELLPMKPCSDIDVAIFGSGIMTSDDGSGFHLDTEAGQSSSVGSGAQVADGMPIYLSAIKEWMIEFGSAMIFISIRTDLAWYRLGKPAKQYAPWYDTVLKTARLAISIITLLKEQSRVSRLSFGDVIRKVSEFNQKDGSYISSDPLTVERYVVVHGQIILQLFAEFPDDNIRKSSFVTGLTNKMEERHHTKWLVKKKKVVPRSEPNLNPRAAVGPVVSKRKAMQATTTRLINRIWGEYYSNHLPEDSKEGIASELKDEDEVEEQEENEDDDNEEETILLEGTPKAHSASKQTKKISADTEIRWEGEPEGKTSSGYPVYKQAIIRGEVISVGRSVLVEVDETDEFPDIYYVEYMFESKIGRKMFHGRMMQCGCQTVLGNAANEREVFLTNECRDLGLHDVKQTVVVNIQNRPWGHQHRKDNIIADRVDRTQAEERKKKGLPTDYYCKSLYWPERGAFFTLPHDTLGLGSGVCPSCKIQDAEKEKDVFKVNSSKSGFLFNGTEYSLDDYVYVSPFEFEEKIEQGTHKSGRNVGLKAYVVCQVLEIVVKKEIKQAEIKSTQVKIRRFFRPEDLSNEKAYCSDIREVYYSDETYIISVESIEGKCQVRKKNDIPECSALGGIFQNVFFCELLYDPATGSLKKLPAHIKVKYSSGQTSDAAARKRKGKCIEGDGVSESTKEGKTLNDKRLATLDIFAGCGGLSEGLQQSGVSSTKWAIEYEEPAGDAFKANHPEALVFINNCNVILRAVMEKCGDTDDCISTSEAAELAAKLDEKEISSLPMPGQVDFINGGPPCQGFSGMNRFNQSSWSKVQCEMILAFLSFADYFRPRYFLLENVRNFVSFNKGQTFRLTLASLLEMGYQVRFGILEAGAFGVSQSRKRAFIWAASPEDVLPEWPEPVHVFSAPELKITLSENVQYAAVRSTANGAPLRAITVRDTIGDLPAVGNGASKGNMEYQNDPVSWFQKKIRGDMVVLTDHISKEMNELNLIRCQKIPKRPGADWRDLPEEKIKLSSGQVVDLIPWCLPNTAKRHNQWKGLFGRLDWQGNFPTSVTDPQPMGKVGMCFHPDQDRILTVRECARSQGFPDSYEFAGNIIHKHRQIGNAVPPPLASALGRKLKEAVDSKSST

SEQ ID NO: 255 - protein, 1551 aa, Glycine max
MGSASLLNPSQPGVKKNDKSKQKSVVSKTEEEVMFKDKQKKRSLSESSEQTAAMRKMPKRAAACKNLKEKSFLIYEKSCLIETEKDHIVEEESLAVRMTAGQDNGCPNRRITEFILHDETGKSQPLEVLEVDDLFITGLVLPLEASSGKKKEKGVKCEGFGRIESWDISGYEDGSPVIWLSTEVADYDCQKPAASYKKVYDLFLEKARACVEVYKKLAKSSGGDPDISLDELLAGMVRSMSGSKCFSGAASIKDFVISQGEFIYKQLVGLDMTSKANDRMFADIPALIALRDESKKQVHAQVMPSNGSLRIDSGVGDEENKNQMDSVASVNEEDEDAKLARLLQEEEYWQSMNQKKNSRSASASNKYYIKINEDEIANDYPLPVYYKTSLQETDEFIVFDNDYDIYDTQDLPRSMLHNWSLYNSDARLVSLELLPMKPCSDIDVAIFGSGIMTSDDGSGFHLDTEAGKSSSVGSGAQVADGMPIYLSAIKEWMIEFGSSMIFISIRTDLAWYRLGKPAKQYAPWYDTVLKTARLAISIITLLKEQSRVSRLSFGDVIRKVSEFDKKDGSYISSDPLTVERYVVVHGQIILQLFAEFPDDKIRKSAFVTGLTNKMEERHHTKWLVKKKKVVPRSEPNLNPRAAVGPVVSKRKAMQATTTRLINRIWGEYYSNHLPEDAKEGIASELKDEDEVEEQEENEDDDNEETILLEGTPKAHSASKQTKKFSAETEIRWEGEPEGKTSSGYPVYKQAIIRGEVISVGRSVLVEVDETDEFPDIYYVEYMFESKIGRKMFHGRMMQRGCQTVLGNAANEREVFLTNECRDLGLHDVNQTVVVNIQNRPWGHQHRKDNIIADRVDRAQAEERKKKGLPTEYYCKSLYWPERGAFFSLPLDTLGLGSGVCPSCKIQDAEKEKDVFKVNSSKSGFLLKGTEYSLNDYIYVSPFEFEEMIEQGTHKSGRNVGLKAYVVCQVLEIVVKKEIKEAEIKSTQVKIRRFFRPEDVSNEKAYCSDIQEVYYSDETHIISVESIEGKCQVRKKNDIPECSALGRMFQNVFFCELLYDPATGSLKKLPAHVKVKYSSGQTSDAAARKRKGKCIEGDDVLESPNEGKTLNEKRLATLDIFAGCGGLSEGLQQSGVSSTKWAIEYEEPAGDAFKANHPEALVFINNCNVILRAVMEKCGDTDDCISTSEAAELAAKLDEKEISSLPMPGQVDFINGGPPCQGFSGMNRFNQSSWSKVQCEMILAFLSFADYFRPRYFLLENVRNFVSFNKGQTFRLTLASLLEMGYQVRFGILEAGAYGVSQSRKRAFIWAASPEDVLPEWPEPMHVFSAPELKITLSENVQYAAVRSTANGAPLRSITVQDTIGDLPAVGNGASKGNMEYQNDPVSWFQKKIRGDMVVLTDHISKEMNELNLIRCQKIPKRPGADWRDLPEEKIKLSTGQVVDLIPWCLPNTAKRHNQWKGLFGRLDWQGNFPTSITDPQPMGKVGMCFHPDQDRILTVRECARSQGFPDSYQFAGNIIHKHRQIGNAVPPPLASALGRKLKEAVDSKSST

SEQ ID NO: 256 - protein, 1454 aa, Glycine max
MDDDLFQRNKTPSGVIKAIKFDVLTEEDIENIAVLEINAAGQVTGSSLGFPNASDECATCGSKDKRFCEGHFGVIKFPTPILHPYFMSEIAHILNKICPVCKSIRHKSKGVRLIYGTKRSNDCNYCSAYPSMKFRVSSNDLFRRTAIIVEVKASKKTLGTEIPADYWNFIPCDAQQEENYVNRRVLSPAQVLNLLNGVDPDFIEKYIPRKNLLYLNCFPVTPNCHRVTEVPYAISSGSRLSFDDRTRSCKKLVDFRGTPNELSSRVLDCLRISKLNPDKTPNSIFADIQQRKIGENACNSSGLRWIKDVVLGKRNDSSLRTVVVGDPDLELSEVGIPCHIAESLQVSEYVNRQNREKLLYCCELRLLEKGKIDVCRNGSKVHLYKKEDLQIGDKIYRPLADGDKVLINRPPSIHQHSMIALTVRVLPISSVVCINPLCCSPLRGDFDGDCLHGYIPQSVTARIELNELVALDRQLINGQSGRNLLSLSQDSLTAAYLLMEDGVLLNVYQMQQLQMLSISDKRLIPPAVVKAPSSNSSLWSGKQIFSMLLPYDFDYSFPSDGVVVSDGELVSSSEASGWLRDSDYNVFQSLVEHYQGKTLNFLYTAQKVLCEWLSMTGFSVSLSDLYLSSDSYARKNMIEEIFYGLQDAEQACNFKQLLLDCYCDFLSGSIQESENAITVDADRLNYERQISAALSQASVDAFRQVFRNIQSLADKYACKDNAFLAMFKAGSKGNLLKLVQHSMCLGMQNSLVRLSYRLPRHLSCAAWNSQKWLDSIQMSSGTLESVQSYIPYAVVESSFLTGLNPLECFVHSVTNRDSSFSDHADLPGTLTRRLMFFMRDLHDAYDGTVRNLYGNQLIQFSYDIEEDSSCDKGFQEYAIGGEPVGAISACAISEAAYSALGQPVSLLETSPLLNLKNVLECGSRKRNGDQTVSLFLSEKLGKQRHGFEYAALEVKNYLERLLFSNIVSTVMIIFTPHDGSSQEKYSPWVCHFHLDKEIVTRRKLKVHSIIDSLYQRYYSQRKDSKVCFTNLKISSKKCSADSMAKEGEDTSIDKKEGDDCITVTIVENSKNPIQLDSVRDLVIPFLLGTAIKGFLDVKKVDVLWNNQSKVKNSCNGFSGELYLRVTLSSEGSRGRFWGVLLNLCHKIMHIIDWTRSHPDNINHFSSAYGIDAGWQYFFNSLASATSDTGKSILPKHLCLVANSLSCSGEFVGLNAKGMALQRKHASVSSPFVQACFANPGSCFIKAAKSGVTDNLQGSLDALAWGNCLSMGTSGMFDIIYSEKVAKSGNVYELLEASFDKPNNKAGTHLHKYSSDKCGSEFRHKNGYALKEGKQWKTILRNFVTVNDIQKLTFASRCILNKYSIDELLSESDRSTMLRVLNFHPRKSEKFGIGPQDIKVGWHPKYKDSRCFHIVRIDGTVEDFSYRKCILGALDIVDPKKSKIQEKKWSGHGNT

SEQ ID NO: 257 - protein, 1454 aa, Glycine max; identical to SEQ ID NO: 256

SEQ ID NO: 258 - protein, 1457 aa, Glycine max
MDDDLLQRNKTPSVVIKAIKFDVLTEEDIENISVLEINAAGQVTGSNLGLPNASDECATCGTKDKKFCEGHFGVIKFPTPILHPYFMLEIAHILNKICPVCKSIRHKSKGARLIYGTKRSNDCNYCSVYPSMQFRVSSNDLFRRTAIIVEVKASKKTLGTEIPADFWNFIPCDAQQEENYVNRRVLSPVQVNYLLNDVDPDFIEKYIPRKNLLCLNCFPVTPNCHRVTEVPYAISSGSRLSFDDRTRSCKKLVDFRGTANELSSRVLDCLRISKLNPDKTPNSIFADIQQRKIGENAFNSSGLRWIKDVVLGKRNDSSFRTVVVGDPDLELSEIGIPCHIAESLQVSEYVNRQNREKLLYCCELHLLEKGKINVCRKGSIVHLYKKEDLQIGDKFYRPLADGDKVLINRPPSIHQHSMISLTVRVLPISSVVCINPLCCSPLRGDFDGDCLHGYIPQSVTARIELNELVALDRQLINGQSGRNLLSLSQDSLTAAYLLMEDGVLLNVYQMQQLQMLSISNKRLIPPAVVKAPSSNSSLWNGKQLFSMLLPYDFDYSFPSDGVVVSDGELVSSSEASGWLRDSDYNVFQSLVEHYQGKTLNFLYAAQKVLCEWLSMTGFSVSLSDLYLSSDSYARENMIEEIFYGLQDAERACNFKQLLLDYYCDFLSGSLQESENAITVNADRLNYERQISASLSQASVDAFRQVFRNIQSLADKYACKGNSFLAMFKAGSKGNLLKLVQHSMCLGMQNSLVRLSYRLPRHLSCADWNSQKWVDSIQMSSGTLESVQSYIPYAVVESSFLTGLNPLECFVHSVTNRDSSFSDHADLPGTLTRRLMFFMRDLYDAYDGTVRNLYGNQLIQFSYDIEEDSSCNKGFQQYALGGESVGAISACAISEAAYSALGQPVSLLETSPLLNLKNVLECGSRKRNGDQTVSLFLSEKLGKQRHGFEYAALEVKNYLERLLFSNIVSKVMIIFTPHDSRSQEKYSPWVCHFHLDKEIVTRRKLKVHSIIDSLYQRYYSQRKDSKVCFTNLKISSRKCSADSMVKEGEDTSIDKEEGDDCIMVTIVENSKNPIQLDSVRDLVIPFLLGTAIQGFLDVKKVDILWNNQSKVTNSRNGFSGELYLRVTLSSEGSRGRFWGVLLKLCHKIMHIIDWTRSHTDNINHFSSAYGIDAGWQYFFNSLACATSDTGKSILPKHLCLVANSLSCSGEFVGLNAKGMALQRKHASVSSPFVQACFANPGSCFIKAAKSGATDNLQGSLDGLAWGNCLSMGTSGMFDVIYSEKGHQVAKSVDVYELLEASFDKPNNKIGTHLHKYSSDKCGSEFRHKNGYALKEGKQWKTILRNFVTVNDIQKLTFASRCILNKYSIDELLSESDRSTMLRVLNFHPHKSEKFGIGPQDIKVGWHPKYKDSRCFHIIRTDGTVEDFSYRKCILGALDIVDPKKSKIQEKKWSGHGDT

SEQ ID NO: 259 - protein, 1454 aa, Glycine max
MDDDLLQRNKTPSVVIKAIKFDVLTEEDIENISVLEINAAGQVTGSNLGLPNASDECATCGTKDKKFCEGHFGVIKFPTPILHPYFMLEIAHILNKICPVCKSIRHKSKGARLIYGTKRSNDCNYCSVYPSMQFRVSSNDLFRRTAIIVEVKASKKTLGTEIPADFWNFIPCDAQQEENYVNRRVLSPVQVNYLLNDVDPDFIEKYIPRKNLLCLNCFPVTPNCHRVTEVPYAISSGSRLSFDDRTRSCKKLVDFRGTANELSSRVLDCLRISKLNPDKTPNSIFADIQQRKIGENAFNSSGLRWIKDVVLGKRNDSSFRTVVVGDPDLELSEIGIPCHIAESLQVSEYVNRQNREKLLYCCELHLLEKGKINVCRKGSIVHLYKKEDLQIGDKFYRPLADGDKVLINRPPSIHQHSMISLTVRVLPISSVVCINPLCCSPLRGDFDGDCLHGYIPQSVTARIELNELVALDRQLINGQSGRNLLSLSQDSLTAAYLLMEDGVLLNVYQMQQLQMLSISNKRLIPPAVVKAPSSNSSLWNGKQLFSMLLPYDFDYSFPSDGVVVSDGELVSSSEASGWLRDSDYNVFQSLVEHYQGKTLNFLYAAQKVLCEWLSMTGFSVSLSDLYLSSDSYARENMIEEIFYGLQDAERACNFKQLLLDYYCDFLSGSLQESENAITVNADRLNYERQISASLSQASVDAFRQVFRNIQSLADKYACKGNSFLAMFKAGSKGNLLKLVQHSMCLGMQNSLVRLSYRLPRHLSCADWNSQKWVDSIQMSSGTLESVQSYIPYAVVESSFLTGLNPLECFVHSVTNRDSSFSDHADLPGTLTRRLMFFMRDLYDAYDGTVRNLYGNQLIQFSYDIEEDSSCNKGFQQYALGGESVGAISACAISEAAYSALGQPVSLLETSPLLNLKNVLECGSRKRNGDQTVSLFLSEKLGKQRHGFEYAALEVKNYLERLLFSNIVSKVMIIFTPHDSRSQEKYSPWVCHFHLDKEIVTRRKLKVHSIIDSLYQRYYSQRKDSKVCFTNLKISSRKCSADSMVKEGEDTSIDKEEGDDCIMVTIVENSKNPIQLDSVRDLVIPFLLGTAIQGFLDVKKVDILWNNQSKVTNSRNGFSGELYLRVTLSSEGSRGRFWGVLLKLCHKIMHIIDWTRSHTDNINHFSSAYGIDAGWQYFFNSLACATSDTGKSILPKHLCLVANSLSCSGEFVGLNAKGMALQRKHASVSSPFVQACFANPGSCFIKAAKSGATDNLQGSLDGLAWGNCLSMGTSGMFDVIYSEKVAKSVDVYELLEASFDKPNNKIGTHLHKYSSDKCGSEFRHKNGYALKEGKQWKTILRNFVTVNDIQKLTFASRCILNKYSIDELLSESDRSTMLRVLNFHPHKSEKFGIGPQDIKVGWHPKYKDSRCFHIIRTDGTVEDFSYRKCILGALDIVDPKKSKIQEKKWSGHGDT

SEQ ID NO: 260 - protein, 2020 aa, Glycine max
MEDNPPSSVLDGTVVGIKFGMATRQEICTASISESSISHASQLSNPFLGLPLEFGRCESCGTSEVGKCEGHFGYVELPVPIYHPSHISELKRMLSVVCLNCLKMRKTKFPASSSGLAQRLISPCCQDVNAALVSIREVKTSDGACYLALKVSKSKIHDGFWSFLEKYGYRYEGDETRALLPCEAMEIIKRIPIETKKKLAGKGFFPQDGYVLKYLPVPPNCLSVPEVSDGASVMSSDPSMTILRKLLRKVEIIKSSRSGEPNFESHHVEANDLQSVVDQYFQIRGTSKPARDIETHFGVNKELTASSTKAWLEKMRTLFIRKGSGFSSRNVITGDCYKRINEVGIPVEVAQRITFEERVNIHNIRYLQKLVDEHLCLTYKEGVSTYSLREGSKGHIYLKPGQIVHRRIMDGDIVFINRPPTTHKHSLQALYVYIHEDHTVKINPLICGPLGADFDGDCVHLFYPQSLAAKAEVVELFAVENQLLSSHSGNLNLQLSTDSLLALKMLVKRCFLGRAAANQLAMFLLLPLPRPALLKASSDDACWTSIQILQGALPMGFDCTGGRYLIRQSEILEFDFSRDALPATINEIAASIFFGKGPMEALKFFDVLQPFLMESLFAEGFSVSLEEFSISRAIKRIIRRSIGKASSLLYQLRSLYNELVAQQLEKHIQDVELPIINFALKSTKLGDLIDSKSKSTIDKVVQQVGFLGQQLFDRGRFYSKGLVDDVASHFHAKCCYDGDGYPSAEYGLLKGCFFNGLDPYEEMVHSISTREIMVRSSRGLSEPGTLFKNLMAILRDVVICYDGTVRNICSNSIIQFEYGIQAGDKTEHLFPAGEPVGVLAATAMSNPAYKAVLDASPNSNSSWELMKEILLCKVNFRNEPVDRRVILYLNDCDCGGSCCRENAAYSVKNQLRKVSLKNAAVEFIIEYQQQRTQKENSETDAGLVGHIYLDEMMLEELKISMANVFEKCLERLKSFSRKKKVNQYLKNIELSFSESCSSSHPAAPCLTFWLKNHDSDLDNAVKVLSENICPVLFETIIKGDPRISSASIIWVSPDTNTWVRNPYKSSNGELALDIVLEEEAVKQSGDAWRIVLDSCLPVLHLIDTRRSIPYAIKQIQELLGISCTFDQAIQRVAASVKMVAKGVLREHLILLASSMTCGGNLVGFNTGGYKALSRQLNIQVPFTDATLFTPKKCFERAAEKCHTDSLSSIVASCSWGKHVAVGTGSKFDIVWDSSEIKSNEIEGMDVYSFLHMVKSVTNGEEETDACLGEDIDDLLEEEYMDLGMSPQHNSGFEAVFEENPEVLNGSTSNGWDVSSNQTQSKTNEWSGWASSNKDGRSETAQENSWGKTVNQEDSSKSNAWNTSTTADQTKTKSNEWSDWGSNKSEIPAGGSKAVQEDSSKSNAWNTSTTSNQTKTKSKEWSAWGSNKSEIPACGSKAVQEDSSKSNTWNTSTTADQTKTKSNEWSAWGSNKSEIPAGGSKAVQEDSSKSNAWNRSTTADQTKTKSNEWSAWGSNKSEIPAGGSKAVQEDSSKSNAWNTSTTADQTKTKSNEWSAWGSNKSEIPAGGSKAVQEDSSKAWNTSTTADQTKTKSNEWSARVSNKSEIPAGGSKAVQEDSWGSSKWKADVAQEDNSRLGAWDANAADQTKSNEWSGWGKKKDVTQEDNVQHSWGSGKRKDKVTQEDNSGSGDWGANRTDLAITKSSEWSSWGKNKTEIPAGGSANVQNDSWGLGKLNDTQKDNSGCGAWGENSGSAWVRNKAETIDGGSEKPQEDAWNSGNWKAESKVGNTTWGKPKSSESHAWDSHNQSNQNSSSQGWESHIASANSENEKGFQWGKGRDSFKKNRFEGSQGRGSNAGDWKNRNRPPRAPGQRLDIYSSEEQDVLKDIEPIMQSIRRIMQQQGYSDGDPLAAEDQLFVLENVFEHHPDKETKMGAGIDYVMVNKHSSFQESRCFYVVCKDGQSKDFSYRKCLANYISKKYPDLAESFLGKYFRKPRARGDQTATLGGDQTATPAQDEAATSGE

SEQ ID NO: 261 - protein, 2020 aa, Glycine max; identical to SEQ ID NO: 260

SEQ ID NO: 262 - protein, 2098 aa, Glycine max
MEDNPPSSVLDGTVVGIKFGMATRQEICTASISDSSISHASQLSNPFLGLPLEFGRCESCGTSEVGKCEGHFGYIELPIPIYHPSHISDLKRMLSMVCLNCLKLRKTKLPASSSGLAQRLISPCCQEDKAALVSIREVKTSDGACYLALKVSKSKMQNGFWSFLEKYGYRYGGDHTRALLPCEAMEIIKRIPIETKKKLAGKGYFPQDGYVLKYLPVPPNCLSVPEVSDGVSVMSSDPSITILRKLLRKVEIIKSSRSGEPNFESHHVEANDLQSVVDQYFQIRGTSKPARDIETHFGVNKELTASSTKAWLEKMRTLFIRKGSGFSSRNVITGDCYKRINEVGIPVEVAQRITFEERVNIHNIRYLQKLVDEHLCLTYKEGGSTYSLREGSKGHIYLKPGQIVHRRIMDGDIVFINRPPTTHKHSLQALYVYIHEDHTVKINPLICGPLGADFDGDCVHLFYPQSLAAKAEVVELFSVENQLLSSHSGNLNLQLSTDSLLSLKMLVKRCFFDRAAANQLAMFILLPLPRPALLKASSGDACWTSIQILQCALPLGFDCTGGRYLIRQSEILEFEFSRDVLPATVNEIAASVFFGKGPKEALNFFDVLQPFLMESLFAEGFSVSLEEFSISRAIKRIIRKSIGKVSSLLYQLRSLYNELVAQQLEKHIRDVELPIINFALKSTKLGDLIDSKSKSAIDKVVQQIGFLGQQLFDRGRFYSKGLVDDVASHFHAKCCYDGDGYPSAEYGLLKGCFFNGLDPYEEMVHSISTREIMVRSSRGLSEPGTLFKNLMAILRDVVICYDGTVRNICSNSIIQFEYGIQAGDKSEHLFPAGEPVGVLAATAMSNPAYKAVLDASPSSNSSWELMKEILLCKVNFRNELVDRRVILYLNDCDCGGSYCRENAAYSVKDQLRKVSLKDAAVEFIIEYQQQRTQKENSETDVGLVGHIYLDEMMLEELKISMAYVFDKCHERLKSFSQKKKVNQSLKNIELSFSLFVGLYHFLIMFHLSSESCSSSHPAAPCLTFWLKNYDSDLDNAVKVLAEKICPVLFKTIIQGDPRISSASIIWVSPDTNTWVRNPYKSSNGELALDIILEKEAVKQSGDAWRVVLDACLPVLHLIDTRRSIPYAIKQIQELLGISCTFDQAIQRVAASVKMVAKGVLREHLILLASSMTCGGNLVGFNIGGYKALSRQLNIQVPFTDATLFTPKKCFERAAEKCHTDSLSSIVASCSWGKHVAVGTGSKFDVVWDANEIKSNEIEGMDVYSFLHMVKSFTNGEEETDACLGEDIDDLLEEEYMDLGMSPQHNSGFEAVFEENPEVLNGSTSNGWDVSSNQGESKTNEWSGWASSNKAEIKDGRSEIAPKNSWGKTVNQEDSSKSNPWSTSTIADQTKTKSNEWSAWGSNKSEIPVGWASSNKTEIKDGRSETAQENSWGKTVNQEDSSKSNAWNTSTTVDHANTKSNEWSAWGSNQSEIPAGGSKAVQEDSWGSSKWKADVAQEDNSRLGAWDANAADQTKSSEWSGWGKKKDVTQEDNSRLGAWDANAADQTKSRDWSGWGKKKDITQEDNSRLGAWDANAADQTKSSEWSGWGKKKDVTQEDNSRLGAWDANTADQTKSNEWSGWGKKKEVTQEDNSRLGAWDANTADQTKSNEWSGWGKKKEVTQEDNSRFGAWDANAEDQTKSNEWSGWGKKKDVTQEDNSRLGAWDANAADQTKSNEWSDWGKKKEVTQEDNVQDSWGSGKRKDKVTQEDNSGSGGWGANRTDLAKSKSSEWSSWGKNKSEIPAGGSENVQNDSWGSGKLEDDTQKENSGSAWVRNKAETIDGGSEKPQEDAWNSGNWKAESKVGNASWGKPKSSESQAWDSHNQSNQNSSSQGWESHIASANSESEKGFQWGKQGRDSFKKNRFEGSQGRGSNAGDWKNRNRPPRAPGQRLDIYSSGEQDVLKDIEPIMQSIRRIMQQQGYNDGDPLAAEDQLFVLENVFEHHPDKETKMGTGIDYVMVNKHSSFQESRCFYVVCKDGESKDFSYRKCLANYISKKYPDLAESFLGKYFRKPRARGDQTATPGRDEAATPGEQTATPGRDEAATPAEQISTPTPMETNE

SEQ ID NO: 263 - protein, 2082 aa, Glycine max
MEDNPPSSVLDGTVVGIKFGMATRQEICTASISDSSISHASQLSNPFLGLPLEFGRCESCGTSEVGKCEGHFGYIELPIPIYHPSHISDLKRMLSMVCLNCLKLRKTKLPASSSGLAQRLISPCCQEDKAALVSIREVKTSDGACYLALKVSKSKMQNGFWSFLEKYGYRYGGDHTRALLPCEAMEIIKRIPIETKKKLAGKGYFPQDGYVLKYLPVPPNCLSVPEVSDGVSVMSSDPSITILRKLLRKVEIIKSSRSGEPNFESHHVEANDLQSVVDQYFQIRGTSKPARDIETHFGVNKELTASSTKAWLEKMRTLFIRKGSGFSSRNVITGDCYKRINEVGIPVEVAQRITFEERVNIHNIRYLQKLVDEHLCLTYKEGGSTYSLREGSKGHIYLKPGQIVHRRIMDGDIVFINRPPTTHKHSLQALYVYIHEDHTVKINPLICGPLGADFDGDCVHLFYPQSLAAKAEVVELFSVENQLLSSHSGNLNLQLSTDSLLSLKMLVKRCFFDRAAANQLAMFILLPLPRPALLKASSGDACWTSIQILQCALPLGFDCTGGRYLIRQSEILEFEFSRDVLPATVNEIAASVFFGKGPKEALNFFDVLQPFLMESLFAEGFSVSLEEFSISRAIKRIIRKSIGKVSSLLYQLRSLYNELVAQQLEKHIRDVELPIINFALKSTKLGDLIDSKSKSAIDKVVQQIGFLGQQLFDRGRFYSKGLVDDVASHFHAKCCYDGDGYPSAEYGLLKGCFFNGLDPYEEMVHSISTREIMVRSSRGLSEPGTLFKNLMAILRDVVICYDGTVRNICSNSIIQFEYGIQAGDKSEHLFPAGEPVGVLAATAMSNPAYKAVLDASPSSNSSWELMKEILLCKVNFRNELVDRRVILYLNDCDCGGSYCRENAAYSVKDQLRKVSLKDAAVEFIIEYQQQRTQKENSETDVGLVGHIYLDEMMLEELKISMAYVFDKCHERLKSFSQKKKVNQSLKNIELSFSESCSSSHPAAPCLTFWLKNYDSDLDNAVKVLAEKICPVLFKTIIQGDPRISSASIIWVSPDTNTWVRNPYKSSNGELALDIILEKEAVKQSGDAWRVVLDACLPVLHLIDTRRSIPYAIKQIQELLGISCTFDQAIQRVAASVKMVAKGVLREHLILLASSMTCGGNLVGFNIGGYKALSRQLNIQVPFTDATLFTPKKCFERAAEKCHTDSLSSIVASCSWGKHVAVGTGSKFDVVWDANEIKSNEIEGMDVYSFLHMVKSFTNGEEETDACLGEDIDDLLEEEYMDLGMSPQHNSGFEAVFEENPEVLNGSTSNGWDVSSNQGESKTNEWSGWASSNKAEIKDGRSEIAPKNSWGKTVNQEDSSKSNPWSTSTIADQTKTKSNEWSAWGSNKSEIPVGWASSNKTEIKDGRSETAQENSWGKTVNQEDSSKSNAWNTSTTVDHANTKSNEWSAWGSNQSEIPAGGSKAVQEDSWGSSKWKADVAQEDNSRLGAWDANAADQTKSSEWSGWGKKKDVTQEDNSRLGAWDANAADQTKSRDWSGWGKKKDITQEDNSRLGAWDANAADQTKSSEWSGWGKKKDVTQEDNSRLGAWDANTADQTKSNEWSGWGKKKEVTQEDNSRLGAWDANTADQTKSNEWSGWGKKKEVTQEDNSRFGAWDANAEDQTKSNEWSGWGKKKDVTQEDNSRLGAWDANAADQTKSNEWSDWGKKKEVTQEDNVQDSWGSGKRKDKVTQEDNSGSGGWGANRTDLAKSKSSEWSSWGKNKSEIPAGGSENVQNDSWGSGKLEDDTQKENSGSAWVRNKAETIDGGSEKPQEDAWNSGNWKAESKVGNASWGKPKSSESQAWDSHNQSNQNSSSQGWESHIASANSESEKGFQWGKQGRDSFKKNRFEGSQGRGSNAGDWKNRNRPPRAPGQRLDIYSSGEQDVLKDIEPIMQSIRRIMQQQGYNDGDPLAAEDQLFVLENVFEHHPDKETKMGTGIDYVMVNKHSSFQESRCFYVVCKDGESKDFSYRKCLANYISKKYPDLAESFLGKYFRKPRARGDQTATPGRDEAATPGEQTATPGRDEAATPAEQISTPTPMETNE

SEQ ID NO: 264 - protein, 2082 aa, Glycine max; identical to SEQ ID NO: 263

SEQ ID NO: 265 - protein, 2065 aa, Glycine max
MEDNPPSSVLDGTVVGIKFGMATRQEICTASISDSSISHASQLSNPFLGLPLEFGRCESCGTSEVGKCEGHFGYIELPIPIYHPSHISDLKRMLSMVCLNCLKLRKTKLPASSSGLAQRLISPCCQEDKAALVSIREVKTSDGACYLALKVSKSKMQNGFWSFLEKYGYRYGGDHTRALLPCEAMEIIKRIPIETKKKLAGKGYFPQDGYVLKYLPVPPNCLSVPEVSDGVSVMSSDPSITILRKLLRKVEIIKSSRSGEPNFESHHVEANDLQSVVDQYFQIRGTSKPARDIETHFGVNKELTASSTKAWLEKMRTLFIRKGSGFSSRNVITGDCYKRINEVGIPVEVAQRITFEERVNIHNIRYLQKLVDEHLCLTYKEGGSTYSLREGSKGHIYLKPGQIVHRRIMDGDIVFINRPPTTHKHSLQALYVYIHEDHTVKINPLICGPLGADFDGDCVHLFYPQSLAAKAEVVELFSVENQLLSSHSGNLNLQLSTDSLLSLKMLVKRCFFDRAAANQLAMFILLPLPRPALLKASSGDACWTSIQILQCALPLGFDCTGGRYLIRQSEILEFEFSRDVLPATVNEIAASVFFGKGPKEALNFFDVLQPFLMESLFAEGFSVSLEEFSISRAIKRIIRKSIGKVSSLLYQLRSLYNELVAQQLEKHIRDVELPIINFALKSTKLGDLIDSKSKSAIDKVVQQIGFLGQQLFDRGRFYSKGLVDDVASHFHAKCCYDGDGYPSAEYGLLKGCFFNGLDPYEEMVHSISTREIMVRSSRGLSEPGTLFKNLMAILRDVVICYDGTVRNICSNSIIQFEYGIQAGDKSEHLFPAGEPVGVLAATAMSNPAYKAVLDASPSSNSSWELMKEILLCKVNFRNELVDRRVILYLNDCDCGGSYCRENAAYSVKDQLRKVSLKDAAVEFIIEYQQQRTQKENSETDVGLVGHIYLDEMMLEELKISMAYVFDKCHERLKSFSQKKKVNQSLKNIELSFSLFVGLYHFLIMFHLSSESCSSSHPAAPCLTFWLKNYDSDLDNAVKVLAEKICPVLFKTIIQGDPRISSASIIWVSPDTNTWVRNPYKSSNGELALDIILEKEAVKQSGDAWRVVLDACLPVLHLIDTRRSIPYAIKQIQELLGISCTFDQAIQRVAASVKMVAKGVLREHLILLASSMTCGGNLVGFNIGGYKALSRQLNIQVPFTDATLFTPKKCFERAAEKCHTDSLSSIVASCSWGKHVAVGTGSKFDVVWDANEIKSNEIEGMDVYSFLHMVKSFTNGEEETDACLGEDIDDLLEEEYMDLGMSPQHNSGFEAVFEENPEVLNGSTSNGWDVSSNQGESKTNEWSGWASSNKAEIKDGRSEIAPKNSWGKTVNQEDSSKSNPWSTSTIADQTKTKSNEWSAWGSNKSEIPVGWASSNKTEIKDGRSETAQENSWGKTVNQEDSSKSNAWNTSTTVDHANTKSNEWSAWGSNQSEIPAGGSKAVQEDSWGSSKWKADVAQEDNSRLGAWDANAADQTKSSEWSGWGKKKDVTQEDNSRLGAWDANAADQTKSRDWSGWGKKKDITQEDNSRLGAWDANAADQTKSSEWSGWGKKKDVTQEDNSRLGAWDANTADQTKSNEWSGWGKKKEVTQEDNSRLGAWDANTADQTKSNEWSGWGKKKEVTQEDNSRLGAWDANAADQTKSNEWSDWGKKKEVTQEDNVQDSWGSGKRKDKVTQEDNSGSGGWGANRTDLAKSKSSEWSSWGKNKSEIPAGGSENVQNDSWGSGKLEDDTQKENSGSAWVRNKAETIDGGSEKPQEDAWNSGNWKAESKVGNASWGKPKSSESQAWDSHNQSNQNSSSQGWESHIASANSESEKGFQWGKQGRDSFKKNRFEGSQGRGSNAGDWKNRNRPPRAPGQRLDIYSSGEQDVLKDIEPIMQSIRRIMQQQGYNDGDPLAAEDQLFVLENVFEHHPDKETKMGTGIDYVMVNKHSSFQESRCFYVVCKDGESKDFSYRKCLANYISKKYPDLAESFLGKYFRKPRARGDQTATPGRDEAATPGEQTATPGRDEAATPAEQISTPTPMETNE

SEQ ID NO: 266 - protein, 2049 aa, Glycine max
MEDNPPSSVLDGTVVGIKFGMATRQEICTASISDSSISHASQLSNPFLGLPLEFGRCESCGTSEVGKCEGHFGYIELPIPIYHPSHISDLKRMLSMVCLNCLKLRKTKLPASSSGLAQRLISPCCQEDKAALVSIREVKTSDGACYLALKVSKSKMQNGFWSFLEKYGYRYGGDHTRALLPCEAMEIIKRIPIETKKKLAGKGYFPQDGYVLKYLPVPPNCLSVPEVSDGVSVMSSDPSITILRKLLRKVEIIKSSRSGEPNFESHHVEANDLQSVVDQYFQIRGTSKPARDIETHFGVNKELTASSTKAWLEKMRTLFIRKGSGFSSRNVITGDCYKRINEVGIPVEVAQRITFEERVNIHNIRYLQKLVDEHLCLTYKEGGSTYSLREGSKGHIYLKPGQIVHRRIMDGDIVFINRPPTTHKHSLQALYVYIHEDHTVKINPLICGPLGADFDGDCVHLFYPQSLAAKAEVVELFSVENQLLSSHSGNLNLQLSTDSLLSLKMLVKRCFFDRAAANQLAMFILLPLPRPALLKASSGDACWTSIQILQCALPLGFDCTGGRYLIRQSEILEFEFSRDVLPATVNEIAASVFFGKGPKEALNFFDVLQPFLMESLFAEGFSVSLEEFSISRAIKRIIRKSIGKVSSLLYQLRSLYNELVAQQLEKHIRDVELPIINFALKSTKLGDLIDSKSKSAIDKVVQQIGFLGQQLFDRGRFYSKGLVDDVASHFHAKCCYDGDGYPSAEYGLLKGCFFNGLDPYEEMVHSISTREIMVRSSRGLSEPGTLFKNLMAILRDVVICYDGTVRNICSNSIIQFEYGIQAGDKSEHLFPAGEPVGVLAATAMSNPAYKAVLDASPSSNSSWELMKEILLCKVNFRNELVDRRVILYLNDCDCGGSYCRENAAYSVKDQLRKVSLKDAAVEFIIEYQQQRTQKENSETDVGLVGHIYLDEMMLEELKISMAYVFDKCHERLKSFSQKKKVNQSLKNIELSFSESCSSSHPAAPCLTFWLKNYDSDLDNAVKVLAEKICPVLFKTIIQGDPRISSASIIWVSPDTNTWVRNPYKSSNGELALDIILEKEAVKQSGDAWRVVLDACLPVLHLIDTRRSIPYAIKQIQELLGISCTFDQAIQRVAASVKMVAKGVLREHLILLASSMTCGGNLVGFNIGGYKALSRQLNIQVPFTDATLFTPKKCFERAAEKCHTDSLSSIVASCSWGKHVAVGTGSKFDVVWDANEIKSNEIEGMDVYSFLHMVKSFTNGEEETDACLGEDIDDLLEEEYMDLGMSPQHNSGFEAVFEENPEVLNGSTSNGWDVSSNQGESKTNEWSGWASSNKAEIKDGRSEIAPKNSWGKTVNQEDSSKSNPWSTSTIADQTKTKSNEWSAWGSNKSEIPVGWASSNKTEIKDGRSETAQENSWGKTVNQEDSSKSNAWNTSTTVDHANTKSNEWSAWGSNQSEIPAGGSKAVQEDSWGSSKWKADVAQEDNSRLGAWDANAADQTKSSEWSGWGKKKDVTQEDNSRLGAWDANAADQTKSRDWSGWGKKKDITQEDNSRLGAWDANAADQTKSSEWSGWGKKKDVTQEDNSRLGAWDANTADQTKSNEWSGWGKKKEVTQEDNSRLGAWDANTADQTKSNEWSGWGKKKEVTQEDNSRLGAWDANAADQTKSNEWSDWGKKKEVTQEDNVQDSWGSGKRKDKVTQEDNSGSGGWGANRTDLAKSKSSEWSSWGKNKSEIPAGGSENVQNDSWGSGKLEDDTQKENSGSAWVRNKAETIDGGSEKPQEDAWNSGNWKAESKVGNASWGKPKSSESQAWDSHNQSNQNSSSQGWESHIASANSESEKGFQWGKQGRDSFKKNRFEGSQGRGSNAGDWKNRNRPPRAPGQRLDIYSSGEQDVLKDIEPIMQSIRRIMQQQGYNDGDPLAAEDQLFVLENVFEHHPDKETKMGTGIDYVMVNKHSSFQESRCFYVVCKDGESKDFSYRKCLANYISKKYPDLAESFLGKYFRKPRARGDQTATPGRDEAATPGEQTATPGRDEAATPAEQISTPTPMETNE

SEQ ID NO: 267 - protein, 2049 aa, Glycine max; identical to SEQ ID NO: 266

SEQ ID NO: 268 - protein, 1205 aa, Glycine max
MGHVGSSKDGTEAGPSAAAMGIDDDEDIDLGDVDLDPTNAEILEELGEDIVKYWCKKASMLFFNEYGLISHQINSFNHFIHTGLQKTFESFGDLVVTPGFDPSKKGENEHFRYASVKFGNVKLDKPMFWGGEGNAQEFKMLPRHARIQRMTYASKVKIQVKVQVYVPKKVRSDKFKTGKAEFLDREVMKEDEREIIIGRLPVMVKSDLCWMKEAEKEDDEFDHGGYFIVKGAEKTFIAQEQLYLKRLWVMNSPGWMIAYKSQMKRNRMVIKLVGNSRGEEVENGDMSLAVYFLSVEVPVWVLFFALGVSSDKEIVDLIGCGNDDVRIQNILFASVRDADEKCGAFRRGRHAVQYLEKCVKSVQFPPSESMQECLEMYVFPGISGLNRKARFLAYMVKGLLLAYTGRRKCDNRDDFRNKRLELASELLDRELKVHIAHARKRMAKALQRDLYGDRDVRPIEHYLDASIITNGLQRAFSTGAWSHPYKRMERISGVVANVGRTNPLQTMAELRRARQQVQYTGKVGDARYPHPSHWGKVCFLSTPDGENCGLVKNLAVTGLVSTDVSAVSEYILPKLLDCGMEELVDDTSTHLGNKDKVLLNGDWVGVCPDSSSFVAELRSRRRRNELPHQVEIKRDQSQHEVRIYSDAGRILRPLLVVGNLLKIKGFKSDCNSFQSLLDKGVIELIGPEEEEDCCTAWGVEYLFGKEGKRSVKYTHCELDMSFLLGLSCSLVPFANHDHARRVLYQSQKHSSQAIGFSTTNPNIRVDTLSHQLHYPQKPLFRTMASDCLGKPDNSLGQNKISKIPPKAEFYNGQNAIVAVNVHLGYNQEDSLVMNRASLQRGMFRSEHIRSYKSEIDNKESSDKKRKPEDIVNFAKLQSKIGRVDSLDDDGFPYVGANLQSGDIIIGKGAESGADNSVKLKHTERGYVQKVVLSSNDEGKNFAVVSLRQVRSPVLGDKFSSMHGQKGVLGFLESQENFPFTRQGIVPDIVINPHAFPSRQTPGQLLEAALGKGIACGGILRQATPFSTPSVDAITEQLHRAGFSRWGNERVYNGRTGEMVRSLIFMGPTFYQRLHHMSEDKVKFRNTGPVHPLTRQPVADRKRFGGIKFGEMERDCLIAHGASANLYERLFTLSDSSQIHICSKCKNVANVILRPVSGGRKIRGPYCRHCESADDIVVAHVPYGAKLLCQELFSMGINLKFETQLC

SEQ ID NO: 269 - protein, 1205 aa, Glycine max
MGHVGSSKDGTKVGLSAAAMDIDDDDDDDDDDLGDVDLDPTNSEILEELGEDMVKYWCKKASMLFFDEYGLISHQINSFNHFVAIGLQNTFDSFGDLVVTPGFDPSKKGENEHFRYASVKFGKVKLDKPMFWGGEGNAQEFKMLPRHARIQRMTYASKVKIQVKVQVYVPKKVRSDKFKTGKEEFLDREIMKEDEREIIIGRLPVMVKSDLCWMKDAEKDDDEFDHGGYFIVKGAEKTFIAQEQLYLKRLWVMNSPGWMIAYKSQMKRNRMVIKLVGNSRSEEVENGDMCLTVYFLSVEVPVWVLFFALGVSSDKEIVDLIGCGNDDVRIQNILFASVRDADEKCGAFRRVRNAVQYLEKCVKSVQFPPSESMQECLEMYVFPGISGLNRKARFLAYMVKGLLLAYTGRRKCDNRDDFRNKRLELASELLDRELKVHVAHARKRMAKALQRDLYGDRDVRPIEHYLDASIITNGLQRAFSTGAWSHPYKRMERISGVVANVGRTNPLQTMAELRRARQQVQYTGKVGDARYPHPSHWGKVCFLTTPDGENCGLVKNLSVTGLVSTDVTDVTESILLKLVDCGMQELVDDTSTHLGSMDKVLLNGDWVGVCPDSSSFVAELRSRRRRNELPHQVEIKRDQSQHEVRIYSDAGRILRPLLVVGNLLKIKGFKSDRYSFQSLLDKGVIELIGPEEEEDCCTAWGVEYLFGKEGKRSVKYTHCELDMSFLLGLSCSLVPFANHDHARRVLYQSQKHSSQAIGFSTTNPNIRVDTLSHQLHYPQKPLFRTMTSDCLGKPDHSLGQSKIPPKAEFYNGQNAIVAVNVHLGYNQEDSLVMNRASLQRGMFRSEHIRSYKSEIDNKESSDKKRKPEDIVNFAKLQSKIGRVDSLDDDGFPYVGANLQSGDIIIGKCAESGADNSVKLKHTERGYVQKVVLSSNDEGKNFAVVSLRQVRSPVLGDKFSSMHGQKGVLGFLESQENFPFTRQGIVPDIVINPHAFPSRQTPGQLLEAALGKGIACGGILKQATPFSTPSVDAITEQLHRAGFSRWGNERVYNGRTGEMVRSLIFMGPTFYQRLHHMSEDKVKFRNTGPVHPLTRQPVADRKRFGGIKFGEMERDCLIAHGASANLYERLFTLSDSSQIHICSKCKKVANVILRPVSGGRKIRGPYCRHCESADDIVVAHVPYGAKLLCQELFSMGINLKFETQLC

SEQ ID NO: 270 - protein, 1120 aa, Glycine max
MGTTTTPLSHTVRVSNIPQSATAKDLLDFLESTLGSSTVFALEIFSDNPNWKSRGFGRVQFETLDARSRALSLSQLNQLLFNRHFLRLSETDSDIIFRPQHRLQNGVLYAGFMLSDHRMSVLESWEGIAGWVLPQRKRLDFWVWHNGDCYRLEFLFEDILESHGYCLGEDARLNALLLKMKFGPRIYKKKTGTDVAANFRGDRYRFLKEDFEFLWVRTTDFSPLKSIGHSTSFCWEIVEEHLASDVFTSFPLYKENLRDLALEDREELCSLTEAVPLVKHATQSKLPYEAVFQLNSLVHTQKISLASVDDELIDLLADLDEETRAVVFQKLHKMSFTCYEPLKFVKTQLHVLSNKKKGLLQSPQNRLTDSNIMSCHRALITPTKIYCLGPELETSNHVVKHFASLASDFMRITFVEENWNKLPTNAVSTGVQKGIFSKPLKTEIYKRILTILRDGIVIGSKRFEFLAFSASQLRSNSVWLFASNDNLKAADIREWMGCFNNIRSVSKCAARMGQLFSSSMQTFEVASEDVEMIPDIEVTSDGVSYCFSDGIGKISQCFARQVAQKLNLDHTPSAFQIRYGGFKGVIAIDRHSFRKLSLRSSMLKFESNNRMLCVTKWSESMPCFLNREIISLLTTLGVKDEVLLAMQQDQLDLLGRMLTDSKAALDVLESLNGADSKSILVKMLHEFNEPNSEPYLSMMLKAYYAYQLSDLKSRCRIFVPKGRVLVGCLDETGLLNYGQVFVRITVAKTRENFGDENLRKVDGDDSTRIIVGKVVVTKNPCLHPGDIRVLDAIYSKELEENGLRDCLVFPQKGHRPHPNECSGGDLDGDLFFLSWDKDLIPCQTEAPMDYTGRRPRIMDHKVTLEEIQQFFVDYMINDTLGAISTAHLVHADREQDKAKSRKCLELAELHSMAVDFAKTGAPAAMPRVLKPREFPDFMERVDKPMYISKGVLGKLYHAIIESQMQIRYSFVWSEKHAEEAYDRSLEVNGFEAFLETASTHKEMYAEKMSSLMDFYGAETEDEMLLGNVQNRASYLQRDNRRYGDMKDRILLSVKNLQREAKEWFETSCQPREYKPMASAWYHVTYHRSHYCQESPCFLSFPWIVGDILLQIRSVNSFVNR

SEQ ID NO: 271 - protein, 1121 aa, Glycine max
MGTTTTTTLSNTVRVSNIPQSATAKDLLDFLESTVGPSTVFALEIFSDNPNWKSRGFGRVQFETLDARSRALSLSQLNHLLFHRHFLRLSETDADIIFRPQHRLHNGVLYAGFVLSDHRMSVLESWEGVAGWVLPLRKRLDFWVWHNGDCYRLEFLFEDILESHGYCLGEDAKLNALLLKMKFGPRIYKKKTGADVAAKFRGDRYRFCKEDFEFLWVRTTDFSPLKSIGHSTSFCWEIVEEHLALDVFKSFPLYKENLRDLALEDGEEFCSSTEAVPLVKRASQSKLPYEALFQLNSLVHTQKISLASVDDELIDLLAGLDEETRAVIFLKLHKMSFTCYEPLKFVKTQLHVLSNKKKGLPQSSQKRLTDSNIMSCHRALITPTKIYCLGPELETSNHVVKHFASHASDFMRITFVEENWNKLPTNAVSTGVQKGLFSKPLKTEIYKRILTILRDGIVIGSKRFEFLAFSASQLRSNSVWLFASNDNLKAADIREWMGCFNNIRSVSKCAARMGQLFSSSMQTFEVVSQDVEIIPDVEVISDGVSYCFSDGIGKISQSFARQVAQKLKLDHTPSAFQIRYGGFKGVIAVDRRSFRKLSLRSSMLKFESKNSMLCVTKWSESMPCFLNREIISLLSTLGVKDEVLLAMQHDQLDLLGRMLTDSKAALEVLESLNGADSKSILVKMLHEFNEPNSEPYLSMMLKAYYAYQLSDLKSRCRIFVPKGRVLVGCLDETGLLNYGQVFVRITVTKTREKFGDENLRKVDGDDNTCIIVGKVVVTKNPCLHPGDIRVLDAIYSEELEEKGLRDCLVFPQKGHRPHPNECSGGDLDGDLFFISWDKDLIPCQTEAPMDYTGRRPRIMDHKVTLEEIQQFFVDYMINDTLGAISTAHLVHADREQDKAKSRKCLELAELHSMAVDFAKTGAPAAMPRVLKPREFPDFMERVDKPMYISKGVLGKLYRAIIESQMQIRYSFVWSEKHAEEAYDRSLEVNGFEAFLETASTHKEMYAEKMSSLMDFYGAETEDEMLLGNLQNRASYLQRDNRRYGDMKDRILLSVKNLQREAKEWFETSCEPHEYKPMASAWYHVTYHPSYYCRESPCFLSFPWIVGEILLQIRSVSKGVHK

SEQ ID NO: 272 - protein, 941 aa, Glycine max
MKFGPRIYKKKTGADVAAKFRGDRYRFCKEDFEFLWVRTTDFSPLKSIGHSTSFCWEIVEEHLALDVFKSFPLYKENLRDLALEDGEEFCSSTEAVPLVKRASQSKLPYEALFQLNSLVHTQKISLASVDDELIDLLAGLDEETRAVIFLKLHKMSFTCYEPLKFVKTQLHVLSNKKKGLPQSSQKRLTDSNIMSCHRALITPTKIYCLGPELETSNHVVKHFASHASDFMRITFVEENWNKLPTNAVSTGVQKGLFSKPLKTEIYKRILTILRDGIVIGSKRFEFLAFSASQLRSNSVWLFASNDNLKAADIREWMGCFNNIRSVSKCAARMGQLFSSSMQTFEVVSQDVEIIPDVEVISDGVSYCFSDGIGKISQSFARQVAQKLKLDHTPSAFQIRYGGFKGVIAVDRRSFRKLSLRSSMLKFESKNSMLCVTKWSESMPCFLNREIISLLSTLGVKDEVLLAMQHDQLDLLGRMLTDSKAALEVLESLNGADSKSILVKMLHEFNEPNSEPYLSMMLKAYYAYQLSDLKSRCRIFVPKGRVLVGCLDETGLLNYGQVFVRITVTKTREKFGDENLRKVDGDDNTCIIVGKVVVTKNPCLHPGDIRVLDAIYSEELEEKGLRDCLVFPQKGHRPHPNECSGGDLDGDLFFISWDKDLIPCQTEAPMDYTGRRPRIMDHKVTLEEIQQFFVDYMINDTLGAISTAHLVHADREQDKAKSRKCLELAELHSMAVDFAKTGAPAAMPRVLKPREFPDFMERVDKPMYISKGVLGKLYRAIIESQMQIRYSFVWSEKHAEEAYDRSLEVNGFEAFLETASTHKEMYAEKMSSLMDFYGAETEDEMLLGNLQNRASYLQRDNRRYGDMKDRILLSVKNLQREAKEWFETSCEPHEYKPMASAWYHVTYHPSYYCRESPCFLSFPWIVGEILLQIRSVSKGVHK

SEQ ID NO: 273 - protein, 1204 aa, Glycine max
MDLEGSEKDSVVTQISIGGFGSEVKASDLVNYLEDKIGLVYRCRLKTSWTPPESYPEFNIIDTANIRRTDNYKKVEPHAFVHFASPESVTAALNASGCCDLFLKNQPLKVSCGPENPYFLNQRRRTTTPFKMSDVLVEIGTLVSPGEFFVSWRGPDKGVKFLVDPFDGMCRFCFSRDTAFSFKGIEKKAVIKCDFQVGFLVRDINEIKRYNDTSYLVVLLHLASSPWVWYRTADDDIEESVPFDLLDDDDPWIRTTDFTPSGAIGRCNFYRISIPPRHGAKLMKAMLYLKGQRVQMQELALKQTLRTLNEPDFGVPMSDAFFYIHFQKDIAFDIMFLVNAIVHKGIFNQHRLSDRFFELLKNQPKELNVAALKHLCSYKRPVFDATKRLKIVQEWLLRNPKLYQISKQLDDIVEVRRLVITPSKAYCIPPEVELSNRVLRKFREVSDCFLRVTFMDEGMQTINVNALNYYVAPIVKEITSNSFSQRTKIYKRVKTILEQGFYFCGRKYSFLAFSSNQLRDRSAWFFAEDKIRCDDIRNWMGKFNQRNVAKCAARMGQCFSSTYATVEVAANEVNSMLPDVERNNYIFSDGIGVITHDLAREVAEKLKLDNVPSAYQIRYAGFKGVVASWPAKGDGVRLSLRPSMNKFQSTHNILEICAWTRFQPGFLNRQIITLLSALGVPDEVFWQMQEAMLLKLNQMLVDADIAFDVLTKSCAEHGNAAAIMLSCGFSPLTEPHLRGMLTSTRAAQLWGLREKSRIFVSSGRWLMGVLDESGVLEQGQCFVQVSTPSLENCFSKHGSRFSETKNLHVVKGFVIIAKNPCLHPGDVRVLEAVDAPDLHHLNDCLVFPQKGDRPHTNEASGSDLDGDLYFVTWDENLIPPSKRSWIPMEYAPQESKLKTRQVMTRDIIEFFVRNMVNEHLGAICNAHVVHADSSDYGALDEKCIHLAELAATAVDFPKTGKLVTMPPHLKPKLYPDFMGKERHQSYRSKKILGRLYRRIKDAYDEDIDAPYLNFVTGDIPYDKDLEVPGSADFIADAWEQKCSYDGQLSGLLGQYKVKREEEVVTGQIWSMPKYNSRKQGELKERLKHSYSALKKEFRHTFEKLNSDVGELSEEEKNLFYEQKASAWYQVTYHPEWVKKSLDLQDKSSENQEADSLGSTVMLSFPWIAVDYLARTKIRQRHQRCGNFDSTKPVDSLAKYLSERL

SEQ ID NO: 274 - protein, 1204 aa, Glycine max; identical to SEQ ID NO: 273

SEQ ID NO: 275 - protein, 1204 aa, Glycine max
MDLEGSEKGSVVTQISIGGFGSEVKASDLLNYLEDKIGLVYRCRLKTSWTPPESYPEFKIIDTAKIRRTEDYKKVEPHAFVHFASPESVTAALNASGCCDLFLKNQPLKVSCGPKNPYFLNQRRRTTTPFKMSDVLVEIGTLVSPGEFFVSWRGPDKGVKFLVDPFDGMCRFCFSRDTAFSFKGIDKKAVIKCDFQVGFLVRDINEIRRYNDTSYLVVLLHLASSPWVWYRTADDDIEESVPFDLLDDDDPWIRTTDFTPSGAIGRCNFYRISIPPRHGAKLMKAMLYLKGQRVQIQELPLKQTLRTQNEPDFGMPMSDAFFYVHFQKDIAFDIMFLVNAIVHKGIFNQHRLSDRFFELLRNQPKELNVAALKHLCSYKRPVFDATKRLKIVQEWLLRNPKLYQISKQLDDIVEVRRLVVTPSKAYCIPPEVELSNRVLRKFREVSDCFLRVTFMDEGMQTINVNALNYYVAPIVKEITSNSFSQKTKIYKRVKTILEEGFYFCGRKYSFLAFSSNQLRDRSAWFFAEDKIRCDDIRNWMGKFNQRNVAKCAARMGQCFSSTYATVEVAANEVNSMLPDVERNNYIFSDGIGVITHDLAREVAEKLKLDNVPSAYQIRYAGFKGVVASWPAKGDGVRLSLRPSMNKFQSTHNILEICAWTRFQPGFLNRQIITLLSALGVPDEIFWQMQEAMLLKLNQMLVDADIAFDVLTKSCAEHGNAAAIMLSCGFSPLTEPHLRGMLTSTRAAQLWGLREKSRIFVSSGRWLMGVLDELGVLEQGQCFVQVSTPSLENCFSKHGSRFSETKNLHVVKGFVVIAKNPCLHPGDVRVLEAVDAPDLHHLNDCLVFPQKGDRPHTNEASGSDLDGDLYFVTWDENLIPPSKRSWIPMEYAPQESKLLTRQVMTRDIIEFFVRNMVNEHLGAICNAHVVHADSSDYGALDEKCIHLAELAATAVDFPKTGKLVTMPPHLKPKLYPDFMGKERHQSYRSNKILGRLYRHIKDAYDEDIEAPYLNFVTGDIPYDKDLEVPGSADFIADAWEQKCSYDGQLSGLIGQYKVKREEEVVTGQIWSMPKYNSRKQGELKERLKHSYSALKKEFRYTFEKLNSDVGELSEEEKNLLYEQKASAWYQVTYHPEWVKKSLDLQDKSSENQEADSLGSTVMLSFPWIAVDYLARTKIRQRHQRSGNFDSTKPVDYLAKYLSERL

SEQ ID NO: 276 - protein, 1204 aa, Glycine max; identical to SEQ ID NO: 275

SEQ ID NO: 277 - protein, 638 aa, Glycine max
MSSKRGGGRPVTVANNDMSKGKSISEAHPKVEQLTQGIADTKLNSGQDDGEWEVYARKSKNKAGSSAAKPWAPPAHNSNPRAWGNAEMAQKPGIRGHGGLGRSSGNPWQTQNANFRRPAGRGNGRPQLATSGYESNYVPNPAIRPPLEHGWNWQSRPGALQSNARDEISPEDLQKNDDVDDDDGEEDSDAFEDTDDDLMSDDYDSDASQKSHETRKKIKWFKKFFEILDGLTVEQINEPERQWHCPACQGGPGAIDWYRGLQPLVTHAKTKGSKRVKIHRELAILLDEELRRRGTSVIPAGEVFGKWKGLKEEEKDHDIVWPPMVVIQNTKLEQDENDKWIGMGNQELLDYFSTYDAVRARHSYGPQGHRGMSVLIFEASASGYLEAERLHKHFAEQGTDKDSWFSRPILYLPGGNRQLYGYMATKEDMDFFNRHSQGKSRLKYDIRSYQEMVVHQIRQMNEDNQQLLYFKNKAVKGAKHTKALEESIGIMSEKLRKTMEENRIVRRRTKMQHEETKEEMYMQEQFFKDQIKIIHDSRDAKEEDFERMQQEEREKVKQSSTTGHVNAEEYRLKVEEYLKFVEVQDKEMENFVAEKEKLLHAHGTGYAAMKRRHWEEEVQYEQKFDEELANLMEKYSPS

SEQ ID NO: 278 - protein, 638 aa, Glycine max; identical to SEQ ID NO: 277

SEQ ID NO: 279 - protein, 645 aa, Glycine max
MSLKRGGGRPVTVANNDMSKGKSISEPQPKVEQLTQGIADTKLNSEQDDGEWEVYARKSKNKAGSSAAKPWGPPVHNSNPRAWGNAEMVQKPGIRSHGGVGRSSGNPWQTPNANFRRPAGRGNGRPQLGTSGYESNYVTPNPVIRPPLEHGWNWQSRPGAMQSNVRDEISPEDLQKNYGVDDDGEEEESDDLEDTDDDLMSDDDDSDASQKSHETRKKSKWYKKFFEILDGLTVEQINEPERQWHCPACQGGPGAIDWYRGLQPLVTHAKTKGSKRVKIHRELAILLDEELRRRGTSVIPAGEVFGKWKGLKEEEKDHEIVWPPMVVIQNTKLEQDENDKWIGMGNQELLDYFSTYAAAKARHSYGPQGHRGMSVLIFEASASGYLEAERLHKHFAEQGTDKDAWFNRPILYLPGGNRQLYGYMATKEDLDFFNRHSQGKSRLKYDIMSYQEMVVHQIRQMNEDNQQLLYFKDKAVKGAKHTKALEESIGIMSEKLRKTMEENRIVRRRTKMQHEETKEEMYMQEQFFKDQIKIIHDSRDAKEEDFEKMQQEEREKVKQSSSTGHVNAEEYRLKVEEYLKFVEVQDKEMENFVAEKEKLLHAHGMGYAAMKRRHWEEEVQYEQKFDEELANLMEKYSPLEKFNGI

SEQ ID NO: 280 - protein, 645 aa, Glycine max; identical to SEQ ID NO: 279

SEQ ID NO: 281 - protein, 611 aa, Glycine max
MADDGADPFPKLTSVYRVSGSKNNKLSWNVANSQQSVDSSVNNSRQLQSISDGSASRSWFSQNSRPNAWEVPSVIQKLRLGKRGNDGLTNNSNLQDKSNSPDALALTGSGILNDSKLPPESAISPTSETCLNSSVDVVDTTTSKDLKNVECKDERIPEPHCEDNGSDIVFDSDDDCFLDNIDLDTGERSHEQCKKSKWLRNFFDKLNALTNEEISSLDRQWHCPACQGGSGAIDWYKGLQPLLDHSRTIQTTRARLHRMFAETLEEECFRRRAPLTTVGEVHNIWEGLDKKVKDHEIVWPPMVIIMNTRYEQDESNKWNGMGNQELVDCFSDYAALKARHSYGPQGHRGMSALIFEETTAGYLEAVRLHKHFKEQGRDREAWDCCQNPFLPGGKRQLYGYLASKEDLDIFNKHSGGKTKLKFEMRSYQEMVERKIKHINDDSRKLDYYKSMVAKEQIKSQVGADSLCKSSEKLSMTTEKNRVDQQDKEMDALEKNFQSQIQDIQQAIAAKEDKFVKLQLQAMQEKVKESCKESSEKEDKVENISSFLKPQDKEMKQFEAEREKIKKIHEEKKLALKKKQWQEQVELEKELENELTQLMDKYNCNQSQEKNC

SEQ ID NO: 282 - protein, 611 aa, Glycine max; identical to SEQ ID NO: 281

SEQ ID NO: 283 - protein, 611 aa, Glycine max; identical to SEQ ID NO: 281

SEQ ID NO: 284 - protein, 611 aa, Glycine max; identical to SEQ ID NO: 281

SEQ ID NO: 285 - protein, 687 aa, Glycine max
MPSQLKVHLAISPFVLLHTTAGDRLRISEKRNSKRGCERPFTMADIGDSSSKGKNVLESLPKIEQLTQGVADVNIESGQDDGEWVVYAKKSKNRARSTTVKPWSPPVHNSRPTGNTKMAHKPVTRNDGGVGRASGSGNPWQSQNANFKRPAGRGNGRPQLTASESESSNNVTSNPVIRPPLEHGWNWQSISGSKQSKSVDDSLVKGEITEESPMKNDSVDDEGDEEEGFDAMEDTDDDLMSDDYDSDTSQKSHETRKKSKWFKDFFENLDGLSIEKINEPERQWHCTACRGGPGAIDWYRGLQPLITHAKTKGSKRVKIHREFAELLEEELRKRGSAVIPPGEVFGKWKGLKDEEKDHEIVWPPMVVIQNTRLEQDENDKWLGMGNQELLNYFSAYDAVKARHAYGPQGHRGLSVLIFEASAIGYLEAERLHKHFAEQGTDRDAWFSHHRRLFLPGGRRQLYGYMAIKEDLDFFNRHCQGKSRLKYDMRSYQEMVVNQLRQMNEDNQLLIYLKDRDAKKQKQTKALEESLGIVTEKLRRTMEENRIVRLRTKMQHEENKEEMYMQEEFFKEQIRIIHDSRAAKEEEFERMQQEKREKVKPSSTSPLNEEEGRVKVDEYLKFVEFQDKEMENFVAEEEKLRQAHKDNVDAMTRRHWEEKVQLEERFNEELAKLMEKYSLSHPEKSNGI

SEQ ID NO: 286 - protein, 609 aa, Glycine max
MADDGADPFPVLTSVYRVSGSKNSQLGWNVANSQQTVDSSVNNSRQLQSISDGSAPRPWFSQNFRPNAWEVPGVIQKLRPAKRGNDGLALTGSGILNDKLPPESVISPTSETERGTGLNSSVGVVTTTSKDCENVECKDKDKRIPEPQCENNNDQIVDNGSDIVFDSDDDCFLDDIDSDTGERSHEQCKKSKWLRNFFDKLNALTNEEISSLDRQWHCPACQGGSGAIDWYKGLHPLLDHSRTIQTKRARLHRMFAETLEEECFRRRAPLTTVSDVHDIWEGLDKKVKDHEIVWPPMVIIMNTRYEQDESNKWNGMGNQGLLDCFCDYAALKARHSYGPQGHRGMSALIFEESTAGYLEAVRLHKHFKEQGRDREAWDCYRNPFLPGGKRQLYGYLASKEDLDIFNKHSRGKTKLKFEMRSYQEMVESKIKHINDDSRKLDYYKSMVAKEQIKSQVGADSLLRLSEKLSLTTEENRVDQQNKEMDALEKNFQSQILDIQQAIAAKEDKFVKLQQAMQEKVKESCGESSEKEDKVENISCFLKPQDKEMKQFEAEREKIIKIHEEKRLALKKKHWQEQVELEKELENERTQLMDKYTCNQTQEENCYVDH

SEQ ID NO: 287 - protein, 716 aa, Glycine max
MNSLFSPENLPPPPGIPIPATIAAASTTTPNPILIPKLEPFDEWLNTHTPQQQQQSQDPNSSNGSLDLDLKLFGDESPEDFSGDPNLLSDFNRLSQLFRTAFSNNNAVPDPITQGIQQLGNDAVSNPFAKPPQNETTVVPPPSFQNGTVSDPGMLLQQQQQYPNGAVSDPDSRAIVPVPEDGRSSSVAVTTPRQPRRCKELVRLMDVGGPEQRHFRDVVRRTRMLYDSLRVLATVEDEGRVDARRGRSDLRASAVMRNCGLWLNRDKRIVGAIPGVCIGDVFLYRMELCVVGLHGQPQAGIDYLPASMSSNGEPIATSVIVSGGYEDDVDEGDVIIYSGHGGQDKHSRQVFHQKLEGGNLAMERSMHYGIEVRVIRGVRYEGAASATGRLYVYDGLYRIHECWFDVGKSGFGVYKYKLCRIDGQAKMGTVVMKEALMLRKDPLSFKPMCCLSLDVSNRKENVAIRLFNDIDRNYDPLQYEYLVKTNFPQFVFHQSGRGTGCECVDGCVEGCFCAMKNGGDFPYNQSGILLRGKPLVFECGPFCHCPPHCRNRVTQKGLKNRLEVFRSRETGWGVRSLDLIQAGAFICEYTGVVLTRDQAQLLTMNGDSLIYPNRFTDRWAEWGDLSMIDSNYVRPSYPSIPPLDFAMDVSRMRNVACYMSHSSTPNVLVQFVLYDHNNLMFPHLMLFAMESIPPMRELSLDYGVADEWTGKLSIGN

SEQ ID NO: 288 - protein, 709 aa, Glycine max
MNFLFSRENLPPPPGIPIPATIAAANTTPNPILIPKLEPFDELLNTHTPQQQQQSQDPSFSNGSLDLDLDLDLKLVCDETPGAFSGDPSLLSDFNRLSQLFKTAFTNNNAVLDPIAQGLQQLQNDAVSDPLDGTTVVPPQSFQNSDPGMQQQQQYPNGAVSDPDSRAIVPVPEEGRSSSVAVTTPRQRRFKELVRLTDVGGPEQRHFRDVVRRTRMVYDSLRVLATVEDEGRVDARRGRSDLRASAVMRNCGLWLNRDKRIVGAIPGVCIGDVFLYRMELCVVGLHGQPQAGIDYLPASMSSNGEPIATSVIVSGGYEDDVDEGDVIIYSGHGGQDKHSRQVFHQKLEGGNLAMERSMHYGIEVRVIRGVRYEGAASATGRLYVYDGLYRIHECWFDVGKSGFGVYKYKLCRIDGQAKMGTVVMKEALMLRKDPLSFKPTCCLSLDVSNRKENVAVRLFNDIDPNYDPLQYEYLVKTNFPQFVFHQSGRGTGCECADGCVEGCFCAMKNGGDFPYNQSGILLRGKPLVFECGPFCRCPPHCRNRVTQKGLKNRLEVFRSRETGWGVRSMDLIQAGAFICEYTGVVLTREQARLLTMNGDSLIYPNRFTDRWAEWGDLSMIDSNFVRPSYPSIPPLDFAMDVSRMRNVACYMSHSSTPNVLVQFVLYDHNNLMFPRLMLFAMESIPPMRELSLDYGVADEWTGKLSICNE

SEQ ID NO: 289 - protein, 588 aa, Glycine max
PKPEPFWDTHIETSDELDLYSEFNRVTELFHFAFGATNVVDPFGATNVACPEQTPLVPVPQELDSAAQPDPNSPSEDVLRAIVPVPPEQQDGAVATATVPRRKQSRQKELVRVMDLSPRDEAHLRETVRRTRLIYDSLRVLTSVEEEKRVASVALRRLRGDLRAASLMRERGLWLNRDKRIVGAIPGIMVGDLFLFRMELCVVGLHGQIQAGIDFLPASMSSTGEPIATSVIVSGGYEDDMDDGEVIVYTGHGGQEKNSSRQISHQKLESGNLALERSMHYGVEVRVIRGMKYEGSAAGSGKVYVYDGVYRIVDCWFDVGRSGFGVYKFKLWRIEGQAKMGSAILKEARNVRRSELDLNPTSADMANRKENVAVRLFNDFDDDRGPLCYEYLVRTCFPKFVFHQSGKATGCDCVDGCGDGCFCAMKNGGEFPYTLQGHLVRGKPLIFECGPFCSCPPHCRNRVAQKGLKYRLEVFRSKQTSWGVRSLDLIQAGSFICEFAGVVLTREQAQLLTMNDISLDVSTMRNVACYMSHSSTPNVWVQFVLHDHNNLMFPHLMLFAMENIPPMRELSLDYGVADEWTGKLSICN

SEQ ID NO: 290 - protein, 1125 aa, Glycine max
MGKTIELYGFPTSVNVSDVKTFVEQYTGEGTVFAIKLRHGKGRVPRAFAIIQFTTANSATSMMSRANNILRTLRYGTSYLKAREMERDIVPRPRVFLHSLDDVKLSFGCQISKGRFSVLWKKQDVIVNFGSGMRKMHFLFSHNNVQYKLELSYENIWKIELHRPRNETTRYLLIQLLGAPRVFENDVPTSTNIFDDPLFNFFKDAPDEQWIRAIDFTPESRIGQSSAICLELPNGRQLPNFRENFAYYEESERQYTLQTGVPFSQNWGLVPIVAPPLGVKISYDILFKVNSLVQHACLAGPALDGDFYRLVDPRRMPREFIEYALEKIYYSKEFCYEPTKWLTDQYKTYLESKNHPRSPAISLDTGLVYVRRVQITPCKVYFCGPEMNVSNRVLRHFREHIDNFLRVSFVDEELDKLFSTDLSSRSQNKKTEIYTRILSILKNGIVVGDKKFEFLAFSSSQLRENSLWMFAPTETGCTAAYIRKWMGNFSQIRNVAKYAARLGQSFGSSTETLSVHRDEVEIIPDVKKLTYDGNEYVFSDGIGKISLEFAQKVAKKCGYDCTPSAFQIRYGGYKGVVAVDPKSCYKLSLRKSMRKYDSDNTKLDVLARSKFQPCYLNRQLISLLSTLGIKDDVFEKKQRETVNQLNTILTDSLKAQEVLDLMSAGEITNVLKEMLICGYKPNEEPFLSMMLQTFRASKLLELRLKSRIFIPKGRAMMGCLDETRTLEYGQVFVQFSNNRLQNLSDDFFSYDLPKNYMVKGKVVVAKNPCLHPGDVRVLQAVDVPDLYHMVDCVVFPQKGPRPHPNECSGSDLDGDIYFVCWDHELIPSRPIDPMDYTAPATVELDHDVMIEEVEEYFANYIVNDSLGIIANAHTVFADKEHLKAMSDQCVKLARLFSTAVDFPKTGVPAVIPPELHVKEYPDFMEKPDKPTYKSHNVIGKLFREVKEISTSAGSITSFTKLVARDSYDHEMEVDGFMDYVDDAFYHKTNYDYKLGNLMDYYGIKTEAEILGGNIMKMSKSFNKRRDAEAINMAVRSLRKEARAWFNENSSGDVDSGSSDVYAKASAWYHVTYHPSYWGCYNEGMNRDHYLSFSWCVYPLLVQIKKEKLSIRRSSLEYSFSGLRLS

SEQ ID NO: 291 - protein, 1125 aa, Glycine max; identical to SEQ ID NO: 290

SEQ ID NO: 292 - protein, 1125 aa, Glycine max; identical to SEQ ID NO: 290

SEQ ID NO: 293 - protein, 1636 aa, Glycine max
MPDGESSVVVAGGQASMEPSLSVSNQLQSLSLSQDKNHDDSVKKDPRKIARKYQLELCKKAMEENIIVYLGTGCGKTHIAVLLMYGMGHLIRKPQKNICVFLAPTVALVHQQAKVIADSTNFKVGTYCGSSKRLKRHQDWEQEIGQYEVLVMTPQILLHNLSHCFITMEMIALLIFDECHHAQVKSNHAYAVIMKVFYKSNSSKVPRIFGMTASPVVGKGASSEANLAKSINSLEHILDAKVYSVEDKELQSFVTTPVINIYHYVSTASGETSLYLKIEEIKRQCIANLGRSIEDHQKRMNAKKLLNRMHDNVIFGLQNLGIWGALQASHILLSGDRSERHELVEAEGNSSDDSLCDKYLAQAAELFTSQCMIGDRVTDLSSVEILKEPFFSAKLLRLIGILSNFRLQKNMKCIIFVNRIVTARSLSYILQKLKLLRQWRSDFLVGVHAGLKSMSRKTMNIIVDKFRSGELNLLVATKVGEEGLDIQTCCLVIRFDLPETVASFIQSRGRARMPQSEYAFLVDSGNKKELDIIDGFEKDEYRMNMEITFRTSKETYIIPEERIFRVDSSGASVSSGYSISLLHQYCSKLPHDEYFDPKPCFYYLDDSGGISCHITLPSNAPINQILGTPQLSMEASKRDACLKAIEELYNLGTLSDCLLPKQDDAEPEAQVSGSSDEDECEDAISRGELHEMLVPSAFGQSWINEDNIVRLNSYYIKFCPYPEDRVYKEFGLFIMVRLPMEAEKLELDLHLAHGRSVMTKFVPFGVVEFDKDEIKMAENFQEMFLKIILDRLEFVSEFVDLGMGAESHTGTSTFYLLLPVVLQEYGNAMKVDWKTVKRCLCSPIFRHPADTMDKKVFPLDIHLQLANGYRSVRDVENSLVYAPHKKNFYFVTNVNYQKNGYSPHNDSGTSSYVDYFIEKFSIHLKCPEQPLLHVKPVSNLHNLLHNRKHEDAEPQELDEYLIYLPPELCELKIIGFSKDIGSSISLLPSIMHRLGNLLVAIELKHRLSSSFPEAAEISALRVLEALTTEKCQERFSLERLEVLGDAFLKFAVARHFFLMHDSLHEGDLTKRRSNAVNNSNLFKLAIKRNLQVYICDQTFDPTQFYALGRPCPRLCSNETKESIHFCLNSVKEQGKVTETQCNKNHHWLHRKTIADVVEALVGAFLVDSGFKAAIAFLSWIGIQVDFEASQVVDICIASASYLPLSSEVDIPSLEGKLGHHFFHKGLLLQAFVHPSYNKLGGGCYQRLEFLGDAVLDYLITSYVFSAYPKLKPGQLTDLRSLSVNNKAFACLAVDRSFDKFLLCDSSGLSEAIKKYVDYIRRPVSDNSIKEGPKCPKALGDLVESCVGAILLDSGFNLNKVWKIMTSFLDSIMKFSSSLQLSPVRDLRELCQSHNMELEFLPVPSKLTKRFSVEAKVSGNGVCETASATGQNKKEACRIASLLLFSKFKAQGWKAKSKTLEEVLESTSKMEPKLIGYDETPIDVTDTNKHIVVNADPYNKSNPEIRPMQETDEICSPCVKPFGQRLQSSAKGKLSQIFENRDCSSDLSGTGTARSRLYELCASYCWKPPSFECCKAEGPDHLKQFTCKVTLEIEEAQNLILEFVGEPLSKKKDAAESAAEGAFWYLQHEGYLPSSGN

SEQ ID NO: 294 - protein, 1637 aa, Glycine max
MPDGESSAVAGGQVSMEPSLSLSDQLQSLSLSQVKNHDDSVKKDPRKIARRYQLELCKKAMEENIIVYLGTGCGKTHIAVLLMHEMGDLIRKPQKNICVFLAPTVALVHQQAKVIADSTDFKVGTYCGSSKRLKHHQDWEQEMGQYEVLVMTPQILHHNLSHCFITMEMIALLIFDECHHAQVKSNHAYAVIMKVFYKSNSTKVPRIFGMTASPVVGKGASSEANLAKSINSLEHILDAKVYSVEDKELQSFVTTPVINIYHYVSTASGETSLHLKIEEIKRQCIATLGRSIEDHQKRMNTKKLLNRMHDNVIFGLQNLGIWGALQASHILLSGDHSERHELVEADGNSSDDSLCDKYLAQAAELFTSQCMIGDRVTDLSSVEILKEPFFSAKLLRLIGILSNFRLQKNMKCIIFVNRIVTARSLSYILQKLKLLRQWRSDFLVGVHAGLKSMSRKTMNIIVDKFRSGELNLLVATKVGEEGLDIQTCCLVIRFDLPETVASFIQSRGRARMPQSEYAFLVDSGNKKEIDVIDGFKEDEYRMNMEVTFRTSKETYIIPEERIFRIDSSGASVSSGYSISLLHQYCSKLPHDEYFDPKPSFHYLDDSGGISCHITLPSNAPINQILGTPQLSMEASKREACLKAIEELYNLGALSDCLLPKQDDAEPEVQVSGSSDEDECEDAISRGKLHEMLVPSAFGQSWINEDNIVRLNSYYIKFCPYPEDRVYKEFGLFMMTCLPMEAEKLELDLHLAHGRSVMTMFVPFGVVEFNKDEIKMAENFQEMFLKIILDRLEFISEFVDLGMSAESHSGTSTFYLLLPVVLQEYGNAMEVDWKIVKRCLCSPIFRHPADTMDKKVFPLDIHLQLANGYRSVRNVENSLVYAPHKKNFYFVTNVNYEKNGYSPHNDSGTSSYVDYFIEKFSIHLKCPKQPLLHVKPVSNLHNLLHNRKREDAEPQELDEYLIYLPPELCELKVIGFSKDIGSSISLLPSIMHRLGNLLVAIELKHMLSSSFPEAAEISAIRVLEALTTEKCQERFSLERLEVLGDAFLKFAVARHFFLMHDSLHEGDLTKRRSNAVNNSNLFKLAIKRNLQVYICDQTFDPTQFYALGRPCPRVCSNETEESIHFCLNSVMQQGKATETRCSKNHHWLHRKTIADVVEALVGAFLVDSGFKAAIAFLSWIGIQVDFEASQVVDICIASASYSPLSSEVDIPSLEGKLGHHFFHKGLLLQAFVHPSYNKLGGGCYQRLEFLGDAVLDYLITSYLFSAYPKLKPGQLTDLRSLSVNNKAFACLAVDRSFDNFLLCDSSGLSEAIKKYVDYVRRPVSDNGIKEGPKCPKALGDLVESCVGAILLDSGFNLNKVWKIMTSFLDPIMKFSSSLQLSPVRDLRELCQSHNLELEFLPVPSKLTKRFSVEAKVSGNGVCETASATGQNKKEACRIASQLLFLKFKAQGWKAKSKTLEEVLESTSKMEPKLIGYDETPIDVTDTNTAKHIVVNADPYNNSNPEICPMQLTDEICSPCVKPFGQRLQSSAKGKLSQIFENRDCGSDSSGTGTARSRLYELCAAYCWKPPSFECCKKEGPDHLKQFTCKVTLEIEEAQNLILEFVGEPLSKKKDAAESAAEGALWYLQHEGFLPSIGN

SEQ ID NO: 295 - protein, 1635 aa, Glycine max
MPDGESSAVAGGQVSMEPSLSLSDQLQSLSLSQVKNHDDSVKKDPRKIARRYQLELCKKAMEENIIVYLGTGCGKTHIAVLLMHEMGDLIRKPQKNICVFLAPTVALVHQQAKVIADSTDFKVGTYCGSSKRLKHHQDWEQEMGQYEVLVMTPQILHHNLSHCFITMEMIALLIFDECHHAQVKSNHAYAVIMKVFYKSNSTKVPRIFGMTASPVVGKGASSEANLAKSINSLEHILDAKVYSVEDKELQSFVTTPVINIYHYVSTASGETSLHLKIEEIKRQCIATLGRSIEDHQKRMNTKKLLNRMHDNVIFGLQNLGIWGALQASHILLSGDHSERHELVEADGNSSDDSLCDKYLAQAAELFTSQCMIGDRVTDLSSVEILKEPFFSAKLLRLIGILSNFRLQKNMKCIIFVNRIVTARSLSYILQKLKLLRQWRSDFLVGVHAGLKSMSRKTMNIIVDKFRSGELNLLVATKVGEEGLDIQTCCLVIRFDLPETVASFIQSRGRARMPQSEYAFLVDSGNKKEIDVIDGFKEDEYRMNMEVTFRTSKETYIIPEERIFRIDSSGASVSSGYSISLLHQYCSKLPHDEYFDPKPSFHYLDDSGGISCHITLPSNAPINQILGTPQLSMEASKREACLKAIEELYNLGALSDCLLPKQDDAEPEVQVSGSSDEDECEDAISRGKLHEMLVPSAFGQSWINEDNIVRLNSYYIKFCPYPEDRVYKEFGLFMMTCLPMEAEKLELDLHLAHGRSVMTMFVPFGVVEFNKDEIKMAENFQEMFLKIILDRLEFISEFVDLGMSAESHSGTSTFYLLLPVVLQEYGNAMEVDWKIVKRCLCSPIFRHPADTMDKKVFPLDIHLQLANGYRSVRNVENSLVYAPHKKNFYFVTNVNYEKNGYSPHNDSGTSSYVDYFIEKFSIHLKCPKQPLLHVKPVSNLHNLLHNRKREDAEPQELDEYLIYLPPELCELKVIGFSKDIGSSISLLPSIMHRLGNLLVAIELKHMLSSSFPEAAEISAIRVLEALTTEKCQERFSLERLEVLGDAFLKFAVARHFFLMHDSLHEGDLTKRRSNAVNNSNLFKLAIKRNLQVYICDQTFDPTQFYALGRPCPRVCSNETEESIHFCLNSVMQQGKATETRCSKNHHWLHRKTIADVVEALVGAFLVDSGFKAAIAFLSWIGIQVDFEASQVVDICIASASYSPLSSEVDIPSLEGKLGHHFFHKGLLLQAFVHPSYNKLGGGCYQRLEFLGDAVLDYLITSYLFSAYPKLKPGQLTDLRSLSVNNKAFACLAVDRSFDNFLLCDSSGLSEAIKKYVDYVRRPVSDNGIKEGPKCPKALGDLVESCVGAILLDSGFNLNKVWKIMTSFLDPIMKFSSSLQLSPVRDLRELCQSHNLELEFLPVPSKLTKRFSVEAKVSGNGVCETASATGQNKKEACRIASQLLFLKFKAQGWKAKSKTLEEVLESTSKMEPKLIGYDETPIDVTDTNTAKHIVVNADPYNNSNPEICPMQLTDEICSPCVKPFGQRLQSSAKGKLSQIFENRDCGSDSSGTARSRLYELCAAYCWKPPSFECCKKEGPDHLKQFTCKVTLEIEEAQNLILEFVGEPLSKKKDAAESAAEGALWYLQHEGFLPSIGN

SEQ ID NO: 296 - protein, 1598 aa, Glycine max
MPDGESSAVAGGQVSMEPSLSLSDQLQSLSLSQVKNHDDSVKKDPRKIARRYQLELCKKAMEENIIVYLGTGCGKTHIAVLLMHEMGDLIRKPQKNICVFLAPTVALVHQQAKVIADSTDFKVGTYCGSSKRLKHHQDWEQEMGQYEVLVMTPQILHHNLSHCFITMEMIALLIFDECHHAQVKSNHAYAVIMKVFYKSNSTKVPRIFGMTASPVVGKGASSEANLAKSINSLEHILDAKVYSVEDKELQSFVTTPVINIYHYVSTASGETSLHLKIEEIKRQCIATLGRSIEDHQKRMNTKKLLNRMHDNVIFGLQNLGIWGALQASHILLSGDHSERHELVEADGNSSDDSLCDKYLAQAAELFTSQCMIGDRVTDLSSVEILKEPFFSAKLLRLIGILSNFRLQKNMKCIIFVNRIVTARSLSYILQKLKLLRQWRSDFLVGVHAGLKSMSRKTMNIIVDKFRSGELNLLVATKVGEEGLDIQTCCLVIRFDLPETVASFIQSRGRARMPQSEYAFLVDSGNKKEIDVIDGFKEDEYRMNMEVTFRTSKETYIIPEERIFRIDSSGASVSSGYSISLLHQYCSKLPHDEYFDPKPSFHYLDDSGGISCHITLPSNAPINQILGTPQLSMEASKREACLKAIEELYNLGALSDCLLPKQDDAEPEVQVSGSSDEDECEDAISRGKLHEMLVPSAFGQSWINEDNIVRLNSYYIKFCPYPEDRVYKEFGLFMMTCLPMEAEKLELDLHLAHGRSVMTMFVPFGVVEFNKDEIKMAENFQEMFLKIILDRLEFISEFVDLGMSAESHSGTSTFYLLLPVVLQEYGNAMEVDWKIVKRCLCSPIFRHPADTMDKKVFPLDIHLQLANGYRSVRNVENSLVYAPHKKNFYFVTNVNYEKNGYSPHNDSGTSSYVDYFIEKFSIHLKCPKQPLLHVKPVSNLHNLLHNRKREDAEPQELDEYLIYLPPELCELKVIGFSKDIGSSISLLPSIMHRLGNLLVAIELKHMLSSSFPEAAEISAIRVLEALTTEKCQERFSLERLEVLGDAFLKFAVARHFFLMHDSLHEGDLTKRRSNAVNNSNLFKLAIKRNLQVYICDQTFDPTQFYALGRPCPRVCSNETEESIHFCLNSVMQQGKATETRCSKNHHWLHRKTIADVVEALVGAFLVDSGFKAAIAFLSWIGIQVDFEASQVVDICIASASYSPLSSEVDIPSLEGKLGHHFFHKGLLLQAFVHPSYNKLGGGCYQRLEFLGDAVLDYLITSYLFSAYPKLKPGQLTDLRSLSVNNKAFACLAVDRSFDNFLLCDSSGLSEAIKKYVDYVRRPVSDNGIKEGPKCPKALGDLVESCVGAILLDSGFNLNKVWKIMTSFLDPIMKFSSSLQLSPVRDLRELCQSHNLELEFLPVPSKLTKRFSVEAKVSGNGVCETASATGQNKKEACRIASQLLFLKFKAQGWKAKSKTLEEVLESTSKMEPKLIGYDETPIDVTDTNTAKHIVVNADPYNNSNPEICPMQLTDEICSPCVKPFGQRLQSSAKGKLSQIFENRDCGSDSSGTGTARSRLYELCAAYCWKPPSFECCKKEGPDHLKQVHRTFTCICLLFHF

SEQ ID NO: 297 - protein, 1584 aa, Glycine max
MPDGESSAVAGGQVSMEPSLSLSDQLQSLSLSQVKNHDDSVKKDPRKIARRYQLELCKKAMEENIIVYLGTGCGKTHIAVLLMHEMGDLIRKPQKNICVFLAPTVALVHQQAKVIADSTDFKVGTYCGSSKRLKHHQDWEQEMGQYEVLVMTPQILHHNLSHCFITMEMIALLIFDECHHAQVKSNHAYAVIMKVFYKSNSTKVPRIFGMTASPVVGKGASSEANLAKSINSLEHILDAKVYSVEDKELQSFVTTPVINIYHYVSTASGETSLHLKIEEIKRQCIATLGRSIEDHQKRMNTKKLLNRMHDNVIFGLQNLGIWGALQASHILLSGDHSERHELVEADGNSSDDSLCDKYLAQAAELFTSQCMIGDRVTDLSSVEILKEPFFSAKLLRLIGILSNFRLQKNMKCIIFVNRIVTARSLSYILQKLKLLRQWRSDFLVGVHAGLKSMSRKTMNIIVDKFRSGELNLLVATKVGEEGLDIQTCCLVIRFDLPETVASFIQSRGRARMPQSEYAFLVDSGNKKEIDVIDGFKEDEYRMNMEVTFRTSKETYIIPEERIFRIDSSGASVSSGYSISLLHQYCSKLPHDEYFDPKPSFHYLDDSGGISCHITLPSNAPINQILGTPQLSMEASKREACLKAIEELYNLGALSDCLLPKQDDAEPEVQVSGSSDEDECEDAISRGKLHEMLVPSAFGQSWINEDNIVRLNSYYIKFCPYPEDRVYKEFGLFMMTCLPMEAEKLELDLHLAHGRSVMTMFVPFGVVEFNKDEIKMAENFQEMFLKIILDRLEFISEFVDLGMSAESHSGTSTFYLLLPVVLQEYGNAMEVDWKIVKRCLCSPIFRHPADTMDKKVFPLDIHLQLANGYRSVRNVENSLVYAPHKKNFYFVTNVNYEKNGYSPHNDSGTSSYVDYFIEKFSIHLKCPKQPLLHVKPVSNLHNLLHNRKREDAEPQELDEYLIYLPPELCELKVIGFSKDIGSSISLLPSIMHRLGNLLVAIELKHMLSSSFPEAAEISAIRVLEALTTEKCQERFSLERLEVLGDAFLKFAVARHFFLMHDSLHEGDLTKRRSNAVNNSNLFKLAIKRNLQVYICDQTFDPTQFYALGRPCPRVCSNETEESIHFCLNSVMQQGKATETRCSKNHHWLHRKTIADVVEALVGAFLVDSGFKAAIAFLSWIGIQVDFEASQVVDICIASASYSPLSSEVDIPSLEGKLGHHFFHKGLLLQAFVHPSYNKLGGGCYQRLEFLGDAVLDYLITSYLFSAYPKLKPGQLTDLRSLSVNNKAFACLAVDRSFDNFLLCDSSGLSEAIKKYVDYVRRPVSDNGIKEGPKCPKALGDLVESCVGAILLDSGFNLNKVWKIMTSFLDPIMKFSSSLQLSPVRDLRELCQSHNLELEFLPVPSKLTKRFSVEAKVSGNGVCETASATGQNKKEACRIASQLLFLKFKAQGWKAKSKTLEEVLESTSKMEPKLIGYDETPIDVTDTNTAKHIVVNADPYNNSNPEICPMQLTDEICSPCVKPFGQRLQSSAKGKLSQIFENRDCGSDSSGTGTARSRLYELCAAYCWKPPSFECCKKEGPDHLKQ

SEQ ID NO: 298 - protein, 961 aa, Glycine max
MSPRGGSKQQPDSRRQAPPSAAAAVPSPPGRGRGRGRGESSVPAPSLVNAPSAPPPASTIGVPSGAAPFRAALPPPAVESLTSAVEKQLTMQPSAPSSSKAVRFKERPGFGLAGEKIKVRANHFQVQVAEQDLFHYDVSINPEITSKKVSRDVMTLLVQAHREKILGNRIPAYDGGKSLFTAGSLPFESKDFVIVLKDDDEPGSSSSSSPTRKKREREYRVTIRLASRTDIHHLSQFLRRRQLDCPYETIQALDVVLRATPSERFVVVGRSFFSPSLGKPGSLGSGTEYWRGYYQSLRPTQMGLSLNINVSARAFYEPIPVIDFIESHFRANPSRPLPDQDRIKLKRVLRGVKVEVTHGKNLRRYKITGVTKEQLRKLMFTLDDNRTKSSVVQYFHEKYNIVLKHTLLPALQAGSDIKPIFLPMELCQIVAGQRYTKRLNEEQVTNLLRASCQRPRDRENSIRQVVRQSNFSTDKFVSHFGIQVREDPALLDARVLPAPMLKYHDTGRESSVEPKMGQWNMIDKKMFNAGVVEHWTCLNFSGKINREFPSAFCHKLARMCSNKGMRFNSKPLLPITSAQSSQIESALVNLHKQSITRLANQGRLQLLIIILPDFEGSYEKIKRICETELGIVSQCCQPRHVCQMKPQYLENVALKINVKVGGSNTVLNDAIARIIPRVSDRPTLILGADVTHPQPGEDSSPSIAAVVASMDWPYVTRYRGVVSAQTHREEIIQDLYNTCEDPVKGKVHSGIIRELLRAFRLSTNQKPERIIFYRDGVSEGQFSQVLLYEMDAIRRACASLQEGYLPRVTFVVVQKRHHTRLFPVDHGSHDQTNKSGNIMPGTVVDTHICHPREFDFYLNSHAGMQGTSRPTHYHVLFDENNFTADGLQMFTNNLCYTYARCTRSVSIVPPVYYAHLAAFRARCYIEVATSDSGSASGGRAANCEVRLPSVKENVKDVMFFC

SEQ ID NO: 299 - protein, 890 aa, Glycine max
MSRRGGSKQQPDSRHPAPPSAAPSPAGRGRGRGRGEFSSVPAPSPVNAPSAPPPASTIGVPSGAAPVRAASPSPAAESLTSAVEKQLTLQPSAPSSTKAVRFSERPGFGLVGKKIKVRANHFQVKVAEQDLFHYDVSINPEINSKKVCRDVMTLLVQAHREKFLGNRIPAYDGRKSLFTAGPLPFESKDFVIVLKDEDEPGSSSSAPARKKREREFRVTIRFASRTDLHHLGQFLRRRQLDCPYETIQALDVVLRATPSERFDVVGRSFFSPFLGKPGTLGSGTEYWRGYYQSLRPTQMGLSLNIDVSARAFYEAIPVIDFIQIHFRLNPSKPLPDQDRIKLKRALRGIKVEVNHGKNLRRYKITGVTKEPLRELMFTLDDKRTKSSVVQYFHEKYNIVLKHTHLPALQAGSDSKPIFLPVELCQIVAGQRYTKRLNEEQVTNLLRATCQRPHDRENSIKQVVKQSNFSTDKFVCHFGIQVKEEPALLDARVLPPPMLKYHGTGRESCVQPRTGQWNMIDKKMVNGGAVQHWTCLNFSGKTNRGLAASFCQELAKMCNNKGMRFNLDPLLPITSVHSSQVESALGNVHKQAIAKLANEGRLELLIIILPDLKGSYGKIKRICETELGIVSQCCLPRHVYQMKPQYLENVALKINVKVGGSNTVLNDAFTRRIPHVSDLPTIILGADVTHPQPGEDYSPSIAAVVASMDWPYVTKYRGVVSAQTHREEIIQDLYNTHEDPVRGKTHSGIIRELLRAFRLSTKTKPERIIFYRDGVSEGQFSQVLLYEMDAIRRACASLQEDYMPRVTFVVVQKRHHTRLFPAEHGSRDQTDKSGNILPGTVVDTQICHPREFDFYLNSHAGIQGTSRPTHYHVLFDEITSLLTSCKCLQIT

SEQ ID NO: 300 - DNA, 2769 bp, Brassica rapa
  source 1..2769: mol_type = genomic DNA
atggatgctactaccggtaatggagctgagctcgagtcagcaaatgggagtggggtttccgacgcgctgcctcctcctccaccggtcataccgcccaacgtggagcctgtgagggttcaaaccgaagttgctgtgaagaagaacctaagagtacctatggctcgtccaggctttggatcaaagggtcaaaagattcagcttttgactaatcacttcggagtcaaagttgcaaatcttcagggattcttctaccactacagtgtggcgctcttctatgatgatgggcgtcctgttgagcagaaaggggttggaaggaaagttcttgacaaggttcatgagacgtaccactcggatcttgatggcaagcagttcgcctacgatggagagaagacgctgttcacttttggagctttgcccagcaacaaaatggatttctccgtggtccttgaggaagtttcttccgccaggactaatggaaacgcaagccccaatgggaatgaagagccaagtgacggtgatagaaaaagacttcgtcagcctaaccgttccaagagcttcagagtcgagatcagttacgcagcaaaaattcctctccaagctcttgctaacgctatgcgtgggcaagaatccgagaattcacaggaggcaataagggtgttggacatcatccttcgacagcatgctgctagacaaggttgcctgcttgtgagacagtccttcttccacaatgacccgagcaactgtgaacctgttggtggtaacatcttgggatgtagagggttccattcgagtttccggacaacacaaggtggaatgtcactcaacatggatgttacaaccactatgataatcaagcctggtccgcttgttgactttgtcattgctaaccaaggtgcaaaggatccctttacggttgactggtctaaggctaaaagaacacttaagaatctgaggattaaagtcagcccctcaaaccaggagtacaggatcactggcatgagtgacaagccttgcagggaacaaacgtttgagtatagaccaaggaacgcacccaagaatgagaatggagagtctgaaaccgttgaaataacggtgtatgactacttcctcagagaacggaacctagagttgcagtactctgcggatttgccttgcgtcaatgttgggaggccaaagcgacccacctatatcccccttgagcactgcacattgattccccttcagaggtacacaaaggctctgaacactttccaaagatctgccctggttgagaaatctagacagaagccgcaagagaggatgaatgttctgtcaaaggcgctgaaagtgagcaactatgacgctgaacctctcctgcgttcatgtgggatttctatcagctccaactttactcaggtggagggtcgtgttctgccagctcccaagctgaaaatgggacgtggagatgaactgtttccgagaaatggtcgctggaatttcaacaacaagcaatttgtggagccaaccaagattgataaatgggctgtagcaaatttctctgctcgctgtaacgtgcgtcaactggttgatgatctaatccgaattggtggaatgaaaggaattgaaattgctgccccatttgatgtgtttgaggagggtcatcagtttcgccgtgctcctcctatgattcgtgtagagaagatgtttgaagagatccagtctaagctccctggtgctcctcagttccttctgtgtctcctccccgaaaggaagaactgcgacatctacgggccatggaagaagaaaaacttaactgaatacggcatcgttacacaatgcatggctccggtgaggcagcctaatgatcagtatcttaccaactgtcttctgaagatcaatgcaaagcttggtggcctcaactccatgttgagtgtggagcgtactccagcctttaccgtcatttccaaggttccaaccatcatccttgggatggatgtttcacatggatctcctggacagtctgatgttccctccattgctgcggtggtgagttcaaggcagtggcctctagtctcgaaatacagagcatctgtacgcacacagccttcaaaggctgagatgattgagtcactcgtcaagaaaaatggaactgaagatgatggcataatcaaggagttgctggtagatttctacaccagctcgggtaagagaaagccagagcatatcataatcttcagggatggtgttagtgaatctcagttcaaccaggttctgaacattgagctcgatcagatcattgaggcctgcaagcttctagatgagaactggaacccaaagttcctcttgttggtggctcagaagaatcaccacaccaagtttttccagccaaactctcctgacaacgttcccccagggactatcatcgacaacaaaatctgccacccaaagaacaacgacttctatctctgtgcccacgctgggatgattggaacaacacgtcctacgcattaccacgtcctgtatgatgagattcatttctcacctgatgagcttcaagagctcgtccactcgctctcttacgtgtaccaaagaagcacaaccgccatctctgttgttgcaccgatctgctatgcgcacttggcagctgctcagctaggaacgttcatgaagtttgaagatcagtctgagacgtcctcgagccatggtggcgtgacagctccaggaccagtctctgttgcgcagctccctaaactcaaagacaacgtcgccaactccatgttcttctgttag

SEQ ID NO: 301 - DNA, 1842 bp, Brassica rapa
  source 1..1842: mol_type = genomic DNA
atgaggaaccacaactacaactccttgaacaacgtgaacgcacctggaaatgatgcatggtctgattcggatcgtggctcaagttctttccggacgcgaagcccaggtgctgttctgcctctctccgcttcatttgggagaatgactactctagtcccgttccccgaccttaatctcatgccggattccccaccccccgaaacctcctccaacacaagaatcaccgccgtacggtcattggctccgacactaggtgttgagagaaactccctcgcgatcttccccgtaccgggtcacgaaaaccaccatgctcgggtggttcaaacactccaccaagacaaccaggaacttgcccggtatgtcttcaaacggactcgaatgatctacgactctctcctgcttcagctcactgtggagtacggacctaatcccaagccagccgtcaatgtcagggcttcgaaactgatggaagaacgtgggttgtggctgaacaagggccaacacttggtaggtccagtccccggggttgagatcggggacatattcttttaccgcaaggagctttgcatgtacggcttacaccgccattcacaagccgggattgaatacacaaaggctaggctaagctcctttggcgtgcctatagcaaccagcatcatcgcatcgggtggctacgaggacaatgaggacagaggagatgtactggtttattcgggccagggtggtcgggacaaatccgggcagcaacgtcagcaccagaagctagtacgtgggaatcttgctatggtacaaagcatgcaactcggtgtcccggtacgcgtcattcgcgggtttcactacaaaaacgaagtcagctcgaatgtgttcatctacgacggcctgtacaggatcgtaaagtccagccgtgttagaaagtcagggtttgatatcttcaagtttacacttgttagaatccaaggacagcccgagatgggcagtgcaagactgatgcgtgcgctaacacttagaaacacaccattggcttggatgcctgctgggtatataagctttaacctttatggtaaaaacgagggtgtcccggtgtatctgtataacgacattgactatgaccgctcaccgctgaactatggctacatctcgcaatctgacattagtagtgtgattcttgctcaaggagggaacaacggtggatgcgattgtaacctctcatgcactgatgattgtatatgcgtgaggaagaatggtggtgagcttccttacagcccttatggatctttgttgagagggaaacacgttattttcgaatgcggggttacttgcaagtgcacttctggttgcacgaaccgtgtcgcgcaaagggggttgatgaagaagatggaagttttccgaaccagggaagctggttggggtgttaggtcgctggatttgattcacgcgggcgagtttatctgtgagtatgctggtactgtggtcacaaaagagctaggggagattatgtcgatgaacggggatggtctggtctatccgggacggtttgctgcaaactggaagttgtggggtgatttatctgatgtttacccgggtaatgtcccgccgagttatcctactattccgccagttgattatgcaattgacgtgtcgagggtgagaagcgtggctgctttcattcgtcacagcagagaaccaaatgtgatggctcagtttgtgttccatgaccataacaacttgaagtttcctcgcgtcatgctttttgcactggagaacatctcaccgttaaccgagctaagcctggactatgtggtggtcgatgaagtggacgagagactcgccatccgtggctga

SEQ ID NO: 302 - DNA, 1896 bp, Brassica rapa
  source 1..1896: mol_type = genomic DNA
atgacttctcacatacctatggtgatccctaagccggagccagtcactgattcctccccacaaactccgattccaccctcatccttcttcaatttcaacaccaccaccacccaatctcccctcgaacctaacttgtacaccgagttcaccaacgtcgccgagactttccgctccgccttcgcacagcgcctcaaacgccacgaggacgtcacggtcctcgattccctaaccggcgccatcgtacccgttcccgaggagcaagatccggatccggatccggtcagttacccttcgcagtccctcaagccgcgtaaacctcaggagcgctcgtctgagctcgtgaggatcaccgacgtcggccccgagggagagaggcagtttcgggaagtggtgaggaagacgaggatgatctacgattctctccggatcttcttgatcctcgaggagactcgtgaagtgctcggaaggaggagaggcaggcccgatagcaaagccgcctcgatgatgaaagagcgtttcctttggcttaatcgggacaaacgcatcgtcggttcgatccccggcgtccaggtcggagacatcttcttcttcaggctcgagctctgcgtcatggggttgcacggacagacgcaggctgggattgactatctcattggctcccgcagctctaacggagagccgatcgccaccagcgtgattgtctcaggtggttatgaggatgatgatgatcaaggggatgtgattatctacacgggacatggagggcaggacaagctcgggaggcaggctgagcatcagaagctcgaaggtgggaatctcgctatggagaggagtatgtactacgggattgaagtgagagtggttagaggttttaagtacgagaacgctgtttctagcaaggtttatgtttatgatgggctgtttaggatcgttgattcttggttcgatgtggggaagtccgggttcggtgtttttaaatttaggctggagaggatcggagggcaggtggagatggggacgtcggtgttgaagttcgccaagacgcttaaaaccaaccctttgtctgtgagaccgagcgggtacatcagcttcgatatctccaacaggaaggagaacgctcctgtgtatttgttcaacgacgttgatgacgatcaggagccgttgtactatgagtatctcgccactacttctttccctcgcggcatattgggtggtagtaatggtgataatgcgagtggatgcgaatgtgtcagcggttgtagcagcggctgcatctgcgagaggaagaacggtggcgagtttgcttatgattacaacgggaatttgataagaatgaggccgttggtgcatgagtgtggaccggggtgtaagtgccctccgacgtgtcggaaccgcgtgacgcagaaggggttgaggagtagactcgaggtgtttaggtcggtggagactggctggggggttcggtgtttggatatattgcacgctggcgcttttatttgcgagtatgttggggttgctttgacgagggagcaagccaacattctgacaatgaacggcgatactttggtgtaccctgctcggttttgttctgataggtggaaagattggggagatttgtctcaggtgtttccggattacgagcggccttcgtatcgtcagatccctcctgttgattatgcgatggatgtttcaaagttgaggaacgttgcttgttacataagccacagtaatgattcgaatgtgattgtacagatggtactgcatgatcacaacaatctgatgttccctcgtgttatgcttttcgctgctgagaacattccgcccatgactgagctcagccttgattatggagtctctgatgatgaatggagccccaagctcgccatttgtaattaa

SEQ ID NO: 303 - DNA, 1914 bp, Brassica rapa
  source 1..1914: mol_type = genomic DNA
atgaatactctattcgcatttccagaacttaaccgcacgccctccgccgccgcgatgatgtcactgcctccgagactacgcgtcaaggccgaaccaattgacgatcctacccctcctcctactcctactcctactccaactcccaccctcaccccctccgatatctacgccgagtactacagcctctgcgaacgtgtcgcttccgcattggctaaccgtaacaacgacctcctcgcgatcgtccccgtaccggaagaaaaacctcccctcctccactctcctccaccgatcccaaccccgccgggatcaggagacaaccgcgctctctcctcccgcctcccgccgaggttccagagaccgcatgagctcgctcgcgtcgccgacctagggcgcgaagaccatatacaccgcagagagatcctgaaacggactcgagcgatctacgactccctccgcctccatataatcgcggaggcgatgcggcttcccggtcggcggcgtaaacctagagccgattacaacgcctcgactctgatgagggagcgcggactgtggctgaaccaggacaaacacgtcgtgggttcgattcctggggttgagattggagacatgtttctttaccgtttggagctctgtgtgattggcttacacggccagccgcaagctgggattgattttctaacggctaaccgaagctcaaacggtgagccgatagctactagcattatcgtctcgggtggttacgaggacgatgaggatacaggggaggttcttgtttactcagggcacggtgggcaggacaaagtccacaggcagtgtcagcaccagaggctggaaagtgggaaccttgcgatggagaggagtatgcattacggtatcgaagttagggtgattcgtgggtttaagtatgataatgtggttagctcgaaggtgtatgtgtacgatgggttgtataggattgtacagtattggtttgatgttggcaggtcagggtttggtgtgtttaagtttaagttagttaggattgaagggcagggtgagatggggagtaggaggatgaagtttgctcaagcgcttaggactaagccgttggcggttaggcctaatgggtatataacgtttaacctttctggtggtaaggagaatgttccggtttatctgtataacgacattgattttgatcgtgaaccggaggggtatgactacattgtgagatctgcgattccctgtgtgatttctgctcgcggaggggctaacaggggctgtgattgtaactattcgtgtggtagtgattgtttttgcgcgaggaggaatggtggtgagcttccttatgatgacgacgggactctgttgaagggtaagcctgtggtgtttgagtgtggggttttgtgtgggtgtggtccgagctgtaagaaccgtgtgactcagaaggggttgagtaagacgctggaggttttcaggtccagggaaacaggttggggtgttaggacattggatttcattcaagccggggccttcatctgtgagtatgctggggtggttctcacaagagagcaagccaagattgtatcaatgagtggggatcctcttctctatccgggtcggttcacagagaaatggagtagtttgggtgatttatctcaagtgtacccggagtatgttcagccgagttatccttctctgccgccggttgattttgggatggatgtgtcgaagtttagaaacgtggcttcttacattagtcacagcaaagaatcaaatgtgatggcgcagtttgtattgcatgaccatagtaacttgatgtaccctcgggtcatgctttttgccctggagaatatctctccgttgaccgagctaagcctggactatgggttggacgataagctggaagagcggctcgccatctgtaattga

SEQ ID NO: 304 - DNA, 1821 bp, Brassica rapa
  source 1..1821: mol_type = genomic DNA
atgggttcaaggggtgataagggaaagaacgtctcttcgggtggctctaacgcagaggttgaacagctggcgaaaggcttttcggagacgaagctgggtccttcacaagacggtggaggagagtgggaggtcatctccaaacggaacaagaacaagcctggaaacgctgctgggaagtcatgggccacagctcctaaccagaaccctcctagagcgtggggtggtcagcagcagcagcaagggaggggtaacaatggctacgggagaggaaggggaacgcaagtctctactggtcgcggagctgggcgtggacaagcgatgaacagagggtatggtggtgcttcggctcctgttgctcgacctcctctggaaggaggatggaattggcagtctagaccgggtgctgctcagcagactgtgactgaggaggttccagaggtggatgatgatgatgtttctgagggagaggaggaggatgattgcgatgctttggatgattctgatgaagacctggcgagtgatgactacgactccgatgtgagccagcaaagccatgggacgaggaagcagaacaagtggtttaagaagtttttcgacagcttggatagcttgtctatcgagcagataaacgagccgcagaggcagtggcattgccctgcttgccagaacgggcctggtgctattgactggtacaaccttcagccgcttctagctcacgcgaggacaaagggagctagacgtgttaagctccacagggaactggctgaggttctggacagggatctgcagatgaggggagcatctgtcattccctgcggtgaaatttacgggcagtggaagggtttgggtgaggaggaaaaggatcatgagattgtctggccgccaatggttgtcattatgaatactaaactggacaaggacgagaatgacaagtggctaggcatgggcaacccggagctgctggagtactttaacgagtatcctgctattagagcacgccattcgtatggtccgcaggggcatcgtgggatgagtgttctgatctttgagagtacagcgactggctactttgaggctgaccgcctacacagggacttagctcaaaaggggttagatagagacgcatgggagcgtcgccgcagttggttttctggaggtgttcgccagctttatggcttccttgcgatcaagcgagatttggatttattcaatcagcattgtcaagggaaagcaaggctcaagtacgagatgaaatcgtaccaggagtatgttgtgaaggagctgaggcagatagctgaagacaatcagcagctgaactggttcaagaacaagctgacgaaacagaacaagcacgccaaggtgcttgaggaatcgctgggaattttgagcgagaagctgcgtaaaactgcagaagataaccgtatcgtgagacagagaacaaagatgcagcatgagcagaacagagaagagatggattcacaagacaagtttttcaaagagtccatcaagcagatacatgagaaaagagacgcaaaggaagaaaacttcgagatgctgcagcagcaggagcgtgctaaagttgttgatttgcgaaagagggctgaggaggtatccagcttcatagagtgtcaagagaaagagatgaaagagtttgtggaggagagggagaagctgatagaagagcaggagaagaagatggcagagttgaagaaaaagtatttcgaggagatgcttgatctagagaggggatttgataaggcgttggagcagctcatgagcaagcacggcctccacgatgcagatgacacagatgactactag

SEQ ID NO: 305 - DNA, 3597 bp, Brassica rapa
  source 1..3597: mol_type = genomic DNA
atggggtcagagggaaacatgaagaactcggttgtgacacaagtaagcattggtgggtttggggagtcaactactgcaaaagagcttacagattaccttgaagaagaagtaggactcgtttggcgatgcagattaaaaacttcttggactcctcctggttcttatcctgatttcgagatcactgacacttcaaacatccccacatttgatggttacaagagagtggagcctcatgcgtttgtccatttcgcggtccctgagtcagcaggtcgtgcaatggatgctgcggggcagtccaagctcatcctcgacggccagcctttgaaagtcagcttggggcctaagaacccgtacacacttaaccagagaagaagaacgacaacaccttataagctgactggtgtttcgattgagattgggaccttgattgcccgggatgagtttcttgtttcttggagagctgaaggggttgatttcctcgtagacccttttgacaacacctgcagattttgcttcacaaagagcactgccttctcgttgaaggacacaatgatgtatgctgtgatcaactgtgattataagttggagttattggtgagagacatacgaacagtaaggcagtatagaactctggatggctatgtgctactcttgcagctggcttcatcaccccgtgtctggtacagaactgctgatgatgatatatatgaaactgtccctgtcgatctcttggatgatgatgacccttggatccgtaccactgattttacccaagctggggccattgggcggtgcctttcatatcgagtgctcatctctcctcggtatgagaagaaaatgaatacagcattggactatctaagggcgcggagagtgcaagaggaacgtgtgaggtggcctcccaggattcgtgatgagccctgttttggggagcctattacagatcatttcttctgcattcaccacagggaaggaatctcctttgagatcatgttcctggtaaatgcggtgctgcacagaggggtttttaaccagtttcacttgactgagcgcttctttgatcttcttagaaaccaacccaaggatgtcaacattgcttctctcaagcatctctgtacctataaacgacctgtttttgatgcgtacaagaggctgaagcttgttcaggaatggattcagaaaaatccaaagcttttagggagtcacgtacagttggatgatatctctgagatcagaaggctagcgatcactccaaccagagcgtattgcctacccccagaagttgagctctccaacagggtactcaggaaatacaaagcattgtctgatagatttttgcgcgtaactttcatggacgaaagcatgcagaccatgaactcaaatgttctttcttactttgttgctccgattgtgaaggaccttacatcaagctctttctctcagaagacccacgttttcaaaagagtgaagaccatattaaccgatgggtttaaactatgtggtagaagatacagttttctagcattctcggccaatcagctcagagaccgctctgcatggtttttcgctgaagacgggaaaacaagagtgtcggatataaagacatggatggggaagttcaaagacaagaatgtggcaaaatgcgctgctaggatgggcctgtgcttctcctccacatacgccactgtggatgtcatgcctcacgaggttgacaccgagcttccagaaatagagagaaatgggtatactttctctgatggaattggtacaatcacacctgatctcgcgttagaaataatggagaaacttaagttggattcgcactgcagcccttgtgcttaccagatacgttacgccggtttcaaaggagttgttgctcgttggccatcaaaagatgatggaatccggttagcccttcgacacagtatggataagttccactctaagcatacaatcctggagatctgttcatggaccaggtttcaacctgggttcttaaaccggcagataattaccctcttatctgtgcttggtgttccagacgaaatattctgggatatgcaggaaactatgctctgtaaactgaaccgcatccttgatgacacagatgtcgcatttgaagttcttacagcatcatgtgctgaacagggaaacactgcagctatcatgctaagtgcaggtttcaaaccaaaaactgagccacatctacggggaatgctgtcttcagtcaggattgcacagctctggggtctcagagaaaaatctcgtatttttgttacgtcaggaaggtggctaatgggttgcttagacgaagcaggggtacttgaacagggccaatgctttatccaagtctcgaaaccgtctatagaaaattgtttctccaaacatgggtctcgttttaaggagacgaagacagatctgcaagtagtgaaaggttatgtagccattgctaagaatccttgtcttcacccaggggatataaggattctagaagctgttgatgtacccgagctgcatcacatgtatgactgcctactttttcctcagaaaggcgagaggccacatacaaacgaagcttctggcagtgaccttgatggcgacctgtactttgtggcttgggatcagagactcatccctcccagcagaacaagctttcccgcgatgcaatatactgcagctgaagaatcgagtaagggccgtcctgtcaaccaccaggacataatagagttctttgtcaaaaacatggcgaatgagaatctgggtacaatatgccatgcacacgtcgttcatgctgataggagtgagtatggagccagggacgaagaatgtttgctactggcggaactagctgcaacagcagtcgatttcccaaagacagggaagctggtgacaatgcctttccacctgaaaccgaaactctaccctgatttcatgggaaaagaagagtaccagacttacaggtcggagaagatcttgggtcggctttacagacgtgtaaaagaggtttacgacgaagatgcagaagcttcctcagaagaaaactcagacccgagtgacatcccttatgacactgatctcgaagtaccaggatttgaagattttgtccctgaggcatggggtcacaaatgtagctatgacgggcagctaattggtcttctcgggcaatacaaggtgcaaaaagaggaagagattgtgacgggtcacatctggtccatgcctaaatacacaagtagcaaacaaggcgagctgaaagaaagactgaagcattcttataactccctgaagaaagagctgaggaaagtattcgaggaaacaaaaccggagcacgagagtctcagcgaagaagaaaagaacgtcatgtatgagaaaaaagcttcagcttggtatcatgtcacttaccatcccgagtgggtgaagaagtctacagagctgcaagaacctggtgagtcgtctggtcatgcggtgatgctgagctttgcttggatcgcagctgattatcttgcgagaattaaagtccggtcaggggaaatgggaatgaaaatggactcggccaaacctgttgatgctttggctaagtatctttctcaacgtctctaa

SEQ ID NO: 306 - DNA, 3369 bp, Brassica rapa
  source 1..3369: mol_type = genomic DNA
atggtctcagagataacgcgatcgacggttaaactcaccaacgtccctcaaaccatagttgccgacgaactcctccgcttcctagagctccacctcggcgcagactccgtattcgccctcgaaatcccgacctctcgcgataactggaagccacgcgacttcgccctcgtgcagttcacctccctcgaagccaagtctcgcgctcagcacctctcctcccagaccaagctcctcttcaagtcccgtaacctaagagtctccgaagcctacgacgacatcgtccctcgccccgtagatcccaggagaaggctcgacggcgtcgttttgaccgctgggtttccggaatcggaggaagggaggttttgtgccctacagaaatgggaaggcgtgaggtgttgggttatagaggagaagcggagagttgagttttgggtttgggaatgtggtgattgttacaagtgtgaggttaggtttgaggatgtcgttgaaactgttccctcctgcgtcgatggcgtggatgagatcaatgcgtttcttctcaggctgaaatatggaccgaagatatacaaacaagtatcaggacctcatatcgccacaaagttcaaatctggccgctacagtttctgcaaggacgattttgatttcatgtggattcgctcaactgatttctctggtctaaagtcaatcggtacatccacttgcttctgtttagaagtggataacgcctcagcgatgtctgacatcttctcaagcttaccttactacagagaagacactttgagcctaaccctggtgaatgggaatacatttgcctctgctaatcaaattgtccccctcttgaatgcagctaatctggggatagagattccatatgagatccttttccaactcaattcgctggttcatgcgcagaaaatcagtcttttcgcggcttcaaatatgggattgatcagcatcctctgtggtttgagcttggaaaccgcattggtggtcctcaagaaactgcaccagcaaagatctatttgttatgatcctatctcatttgtcaaggctcagtcgcagtatgtggttaagaagacggcgcattcccctgcatcagcctataagagattgactgagcagaacataatgagttgtcagagagcctatgttacgccttcaaagatttatctgctgggtccagagcttgagactgccaattacgttgtgaagaactttgcggagcatgcctcggatttcatgagaattacttttgtggaagaagattggagcaagattccagcgaatgcgctttctgtgaactccaaggaaggctatttcgtgaaaccctttagaaccaacatctatcacagggtgttgtcaatccttggagaagggatcaccgtcgggcctaaaaagtttgagttcttggctttctcagcgagccagctgcgaggaaattctgtctggatgtttgcttctaacgagaaagtgaaagctgaagatataagagaatggatgggttgttttcgtaagatccgaagcatttcgaaatgtgctgctaggatgggccagttgttcagtgcttctcggcagacacttaatgtccgtgcgcaagatgttgagcagattcctgacatagaagtgactactgatggtgctgactactgcttctccgacggcatagggaaaatttcgttggcatttgctaagcaagttgcacagaagtgtggactgagccatatcccttcagcgtttcaaattcgatatggtggctacaaaggcgtgattgccgttgaccgcagttccttcagaaagctgtctctgcgtgatagtatgctaaagttcgattcaaacaacaggatgctcaacgtgaccaggtggacagagtcgatgccttgcttcttaaaccgggagatcatttgccttttgtcgactctcggaatagaagatgcggtgtttgaggcgatgcaagcggggcatctatctatactggggaacatgcttgaagaccgccatgcggcactgaacgttctgcagaaattgagcggagaaagttccaagaatcttctagttaagatgctgctacaaggatacgcaccgagttcagagccttacctctcaatgatgcttcgtgtgcaccacgagagccagctttctgagctaaagagtaggtgcaggatacttgtaccgaaaggacgtatcttgataggttgcatggatgaaatgggtatactggagtatggccaagtgtacgttcgtgtaacactgactaaagcggaattggaatctcgcgagcagagctacttccgcaagattgatgaggaaacatctgtggtggttgggaaagtggttgtgacgaaaaacccatgccttcaccccggagacatcagagttcttgacgcaatatatgaggtcaattttgaacaaaagggttttctcgattgcatcgtctttcctcagaagggagaaaggccacatccaaatgaatgttctggtggtgatctcgatggagaccagttttttgttagctgggatgagaagcttataccgagccaaatggaccctccaatggactacgctggaagcagacctcgtataatggatcatgatgtcaccttggaggaaatccacaaatttttcgttgattatatgataagcgacacactgggggtgatctcaactgcacatttggttcacgcagaccgtgacccggagagagcccggagccagagatgcatagagttagcgaaccttcactctagagccgttgatttcgcgaaaaccggagctccagccgagatgccttacgccttaaagcccagagagttccctgatttcctggaacggttcgagaaaccaatgtacatctctgggtccgtgtttgggaagctctaccgtgctgtgaaaagcactttagcacagagaaagccagaagacgctgagagcgaggacaagaagaagatggcggcttatgactcgacgcttgaagaagctggctttgacaactttatagagacggccaaagctcacagagacatgtacgccgagaagctgagctcgttgatgaactactacggagctgctaacgaagaagagattctcacggggattttgagaaccaaggagatgtatctgcagagagataaccggaggtatggtgatatgaaggataggattacgttgtcggttaaggatttgcagagagaggctatgggatggtttgagaagagctgcgaggatgaacagcagaggaagaagctagcatcggcttggtactatgtaacatacaacccgagctattgcgatgagaagccgagattcttgagctttccgtggatcgtaggcgacgttttgctggggataaaggctgaaagtgcggagagatag

SEQ ID NO: 307 - DNA, 3510 bp, Brassica rapa
  source 1..3510: mol_type = genomic DNA
atgactgatatagacattgaagagattgaggccgccggggaagtcgatttacgcgacctaggggatccttttctccagagcttctgcaagaaagctgcgacgtccttcttcgacgagtacggcctcgtcagccaccagctcaactcctacaacttcttcatcgagcacggtcttcagagcgtgtttgagtcctccggtgagatgctcgttgagccgtcctttgatcctacgaagaacaaggaccatgagtggagatacgcgacggtgaagttcggagaagtcagcgtggataagcctaccttgtactctgatgataaggagcttgtgtttctcccgtggcacgctaggcttcagaacatgacctactctgccaggatgaaagttaatgtcgatgttgaggtgttcgttaagaaagttgttaaaagagacaagttcaagacgggacaagacgaatacgtcgagaagcagatattgtctaagaaaacgcaggacatcccaattggtaggatacctgtgatggtgaagtctgtgctttgcaacacaacggagaaagggaagcatgtggaaagctacagaaagggggagtgtgcatttgaccagggtggatactttgtgataaaaggagctgagaaggtctttattgctcaagaacagatgtgcacaaagagactttggatttctaattcaccatggaccgtctcctacaggtccgaaaccaaaaggaatcgtttcattgtgcgtctatcagagaatcagaaagctgaagactttaagagaaaagagaaagtactgacagtgtacttcctgtcaactgagatcccagtctgggtcctgttctttgcgctgggtgttgcgtcagacaaagaggctgtagatctaattgctttcgatggtggtgatgcaagtattaccaacagcgtcgtagcttcgatccaggaagctgattcggtttgcgaagattttcgccatgggaggaatgctctggcatatgttgaacagcagataaaaggcacaaaattcccacctggtgagagtgtggatgaatgcctaagtctgtacctgtttccaggcctcaagagtttgaagcagaaagcacgtttcctgggctacatggtgaaatgcctttttagcgcatatgctgggaaaagaaagtgtgagaacagagacaactttaggaacaagaggatcgaactagctggagagctgctggaaagggaactaagggtgcatttggcgcatgctagaagaacaatgaccaaagccatgcagagacacctcacgggggatggcgatctgaagcctatcgagcactacttggatgcttccattataacaaatggacttagtagagccttctccactggagcatggtgtcatcctttcaggaagatggaaagggtttcaggtgttgtcgctaatctgggtcgtgcaaatccactccagagtttgattgatctgcggagaacgcggcaacaggtcctgtataccggcaaagttggagatgctagatatccgcatccctctcactggggcagagtatgctttttgtcaaccccagatggcgaaaattgtggtcttgtgaagaacctgtctctccttggacttgtcagcactcaaattatggagcctgtggtggaaaaactcttcgatagtggaatggaagagctggtggacgataccagtacaccactgagcgggaagcacaaggttctcctcaatggagactgggttggagtatgttcagattctgactactttgttgcggagttaaaaagcaggaggcgtcaaagtgaattacctcgtcagatggaaattaagctagataaagatgacaaggaggtacggatttttactgacgctggcagacttctccgtcccctcatggttgtggaaaatctccacaagttgaagcaaagtaaaccatcgaagtacacctttgagcatcttcttgaccaagggattctcgagctgatcgggattgaggaagaagaagactgtaccacagcatggggaaccaagcagcttctgaaacagcagaagagttacactcactgcgaactggatttgtccttcctgttgggtgtgagctgtgcgattgtgccgtttgcgaatcatgatcatggtaggagagttctctaccagtcccagaagcattgccagcaagccattgggttctcctcaacgaaccctaacatccgctgtgataccctgtcccagcagctgttctatccccagaagccacttttcaagacaatggcgtcagagtgtcttcagaaggatgtgttgttcaatggtcagaacgcaattgttgctgtgaatgttcatctcgggttcaaccaggaggactccattgtgatgaacaaggcttcgctggaacgtggtatgttccgttcagaacagatcaggagctataaagctgatgttgacagtaaagactcggagaagaggaaaaagatggacgaggttgttcagtttggaaagacacacagcaagattggcagagtagacagcctagatgatgacgggttcccctttgttggtgctaatatgcacagtggtgatattgtcattggcagatgcaccgagtctgggactgatcacagcgtgaaactgaagcacactgagagagggatagtgcagaaggtggttctatcatccaatgacgatgggaagaattatgctactgtttctctgagacaggttcgttctccatgtcttggagataaattttccagtatgcatggccagaagggtgttttaggctatatagaggagcaggagaattttgctttcacgaatcaaggcatagttcctgacatcgtgatcaacccgcatgcattcccttctcggcaaacaccgggccaactcttggaggctgctctgtccaaaggaatagcttgtcctatgcaaaagaagaagggcaagtctgatgcatactccaaagtgacacgccatgccactcctttctccactcccagtgtcgatgacataaccgaccagcttcacagggctggcttttcaagatcgggaaacgaaagggtctacaatggaagaacaggagagatgatgcgttcactcatcttcatggggccaaatttctaccagagactcatccacatgtcggaggacaaagtcaagttcaggaacaccggaccagttcacccactcacgcgccagccagttgcagacagaaagaggttcggtggaatcaagttcggagagatggagcgagactgcctgattgctcacggtgcatcagcgaacctgcacgagcgtctgttcactctgagtgactcttcacagatgcacatctgcaggaactgtaaaagcgcagcgaacgtgatagagagggtggcgagcagtggaagaaggatcagaggaccgtattgcaggctgtgcgagtctccggactatgtggtgatggtgaacgtgccgtatggagctaagcttctgtatcaggagctgttcagtatgggcatctgtctcaacttcgaaaccaacctctgctga

SEQ ID NO: 308 - DNA, 1437 bp, Brassica rapa
  source 1..1437: mol_type = genomic DNA
atgcctatgagctcgtgggtttgccattttcacatctccaagaaagttctgaagcagaaacaactggatgtcgaatctgttgtctcttcattaaacaagcagtatgcaaacaggaagaaagagctgaagcttgatgtaattgatttggagatacaaagcacaaaccactgttcttgggatgataagtcaatggaagatgatagattctgcatcacagttactgttcttgaagcctccacacacggttctttggaacttgatgctattcgacttgtcttgatcccttttcttctcgactctccggtgaaaggctacggagagattaaaaaggtggagatcttatgggctgacagaccaaaagcgccgaaaaggaacaagaaacatatggcgggtgagcttttcgtgaaggttacaatgcatggagttcgtggcaaaaagaacatctggagcgctcttcttgaaacctgtcttcccattatggatatgatcgattggacaagaagccatcctgataatatccgacaatgctgctcggtttatggaattgacgctggacgtagcatcttcctagcggatttggagtctgctgtggctgatactggtaaggggatgctgcgagaacatctgcttcttgtagcggattgtctctccgttacgggagagtttgtggcattaaaccccaaaggttggagtaaacaaagacaggctgaatccactcctgcaccttttactcaagcttgcttctcgagcccaagtcaatgctttctcaaagctgctaaggaaggtgttacagacgagcttcaaggatctatcgacgcattagcttgggggaaagttccttctttcgggactggagatcagttcgaaatcatcatctccccaaaggatcatgggtttagtagtacaccagtaaaagtgtatgactttctgagtagtacagcaacgcttccaaagagaaaggcaagctccttgcccaaatcagacaacttcacggtccagccgttccccttactcgatactgctctctccaaagcagtgaagacactcgatgggaaaggactcaccaggtcgcagctcagaacgatctttacatgggacgacattgaaaagctttcccggtcactgaaacgtattctctacaattacgagatcgatgctacgttgaatgagagggatgaaagacttttgatgatggctcttctctttcaccccaacagagatgagaagctaggaccaggcttccaaggaatcaaggtggctaattctaagcatgggaatgctcgttgcttcgaggtggtgagaacagacggaacaacagaagatttctcttaccataagtgtgtgttgggagcgacagagatcattgcccctaagagagttaacttctacaaggccaagtaccttagaaacggtacggtgcaggccggtgctatctaa

SEQ ID NO: 309 - DNA, 4332 bp, Brassica rapa
  source 1..4332: mol_type = genomic DNA
atggaggaaaaatgcgaggagcttgaggtgcccatggggactctaaagtcaataagctttagcatttcgaataacaaagaccgaaaaaacatgtctgtcatggaggttgaagcagcgaatcaagtgactgattcccggttagggctcccaaatcgggatgatatatgcaaatcatgtggcagcaaagatagaaaagtttgtgaagggcattttggggttataaacctcaggtacccggtgattaacccgcatttacttaaggaggtagctacattgttgaacaagttctgccctggatgtaaatacacgaagaaaaaacagtctcagtctcagtcaaatacagattaccctctaatgaagttcagggtaacaacaaaagaagcctttaggcgatctggaatcgtttgtgaagtgagtgaagacaatgtgttgaagctcagtaaacggggactatcagcattacctccagattattgggattttatgcctaaagacccaaatatcgacgaaagctgtttgaaaccaagcaggcggattctaactcacgcacaggtttatgcactgttgagtgggattgatgagagggtgatcaggaaggagatccccatgttcgactctcttcctctggcatcttttccagttacaccaaacggtcatcgtgtatccgagatggtcactcagttcaccgggcctcgactagtttttgatgaacggactcgtatctacaagaaactagttggctttgaaggaaatggtcttgagttgagttcacgtgtgatggaatgcatgcaatactcaagactcttttcggaaaacgtgtctccgagtcaagaatccgcgaacccttaccagaagaagtcagatactcccgagctacgcggtctaaggttcatgaaagatgtgcttctcggcaaaagaagcgaccacacgttccgcacagtggttgtcggcgacccttctctcaagctcaacgagatcggcatacctcggagtatcgcagagaggcttcaagtatccgagaatctcaacgactggaacagagatcgtctcgtcacttcctgtttccacaagctcctcgagaaaggagagactcacgtgaggagaggaggtcgcttagttggtatcagagccatcgacgatctccaaacgggagacagcttcttacgcacgttaaaggatggagacacggtgctgatgaacagacctccttccattcatcagcactcgctcatcgcaatgtctgttaaagtcctccccactacctccgttgtctctttaaaccccatctgttgcttaccctttcgtggtgacttcgatggagactgtcttcacgggtacgttcctcagtctatccaagccaaggctgagctcgaggagcttgtggctttggataagcagcttgttaacagacagaacggtcgtaacttgctttcgttaggacaggacagcttgacggctgcgtatctggttaacgtcgagacgaactgttttctgaaccgagctgagatgcagcagcttcaaatgtattgcccctttgagcttcctcggcctgcgatcatccgaggttcgtctacgagcagtgagccgcaatggacggggaagcagctgtttgggatgcttttccctcccgggttcgagtacgcttaccctctgaataatgtggttgtaaccaacggggagcttttgtcttcttccgatgggtctggttggttgcgtgacggagaaggaaacttcatccagggtttgatgaagcacgataaagagaaagttcttgatataatcttctcggctcaagagatgctctctcagtggttactgaatcgaggactgagtgtttctttatctgatttgtacttcgcatctgataaacactctcggagaaacttgacggaggagattagttacggcttgcaagaagctgagcaagtctgcaacaagcagcagctcatggtcgagtcccgcagagacttcctcgcggtcaacggagaagaagatacggtcgtcgctgatgatttggagctgttctgctacgagagacagagatcagctaccttaagcaagctcgcggttagtgccttcaaggacgcgtatagagacgtccaggctctggcgtatagatacggagaccagtcgaacgcgtttctcgtcatgtccaaagctggtagcaaagggaacatggggaagctcgctcagcacagtatgtgcattggtcttcagaactcttctgttgcgttgtcctttgggttcccacgtaagctgacttgcgcctcgtggaacgaccccaacagcccgcttcgaggcgcaaggggagaagaccgaacggctcatgagtcttttgttccctttggtgtcgttgagagttcgtttctgacgggtctgaatcctttggagtcttttgttcattccgtgacgagccgagacagctccttcagcggtaatgctgatcttcccgggacgcttagcaggaagctgatgttctttatgagggatatatacgctgcttacgacgggacggtgaggaactcgtttggtaaccatttggttcagtttcgttatgagagtagtgatgatgcagaagaggacatgactggtgaagcagttggatcactttctgcttgtgcgatcaccgaggctgcttacagcgctcttgaccagcccattagccttcttgagacttcgcctcttctgaatcttaagaatgtgttggagtgtgggtcgaagaaaggtctgaaagaacagacaatgtctctgtacttgtctgaaacactttctaagaaaaagcacgggttcgaatacggggcactggacatcaagaggcacttggagaaactgtgtttctcagagattgtttcaacattctctccgaggactaacacaaggatgcctatgagctcgtgggtttgccattttcatatctccaagaaagtactgaaacagaaccagctggacctcgaatctgttgtctcttcattaaacaagcagtatgcgaacaggaagaaagaactgaagcttgatgtaatagatttagatatacaaagcaaaaaccactgctcttgggatgataaggcaatggaagatgatagagtctgcatcacagttactgttctcgaagcctccaggcacgattctttggagcttgatgctattcgccttgtcttgatcccttttcttctcgactctcctgtcaaaggctaccgagagattaaaaaggtggatatcttatgggttgacagaccaaaagctccccagaggaacaagaaaggcttggcgggtgagcttttcttgaaggttacaatgcatggagttcgtggcaaaaggagcttctggagcgctcttctcgaaacctgtcttcccattatggatatgatcgattggacaagaagccatcctgataatatccgacagtgctgctctgtttacggaatagacgctggacgtagcatcttcctagcggatttggagtctgctgtgtcggatacgggcaaggcgatgctgcgggaacatctgcttcttgtagctgattccctctcagtcaccggagagtttgtggcgctaaaccccaaaggctggagtagacaaagacaggccgagtctactcctgctcctttcgctcaagcgtgcttctcgagcccaagtcagtgctttctcaaagcagctaaggaaggtgtcacagacgagcttgaaggatctatcgacgcattggcttggggcaaagttccttcttttgggactggagatcagttcgagatcatcatctcccctaagaatcatgggtttagtacaccggtggtagacgtgtatggctttctcagtaggacggccacgcttccaaagagaaaggctgtccgtgcaacaagctcctccttgcccaaatcagacgagttcacggtccagccattccccgtgctcgacacggctctctcgaaagcagtcaagacactcgatgggaaaggactcaccaggtcgcagctcagaatgatctttacatggaacgacatggaaaagctttctcggtcgctgaagcgcattctctacaattacgagattgatgctacgttgaatgagttggacgggagacttctgatgatggctcttctcttccatcccaacagagatgagaagataggaccaggcttcaaaggaatcaaggtggctaattctaagcacgggaatgctcgttgctttgaggtggtgagaacagacggaacaactgaagatttctcttaccacaagtgtgtgttgggagcaacagagatcattgcccctaagagggttaacttctacaaggcgaagtaccttagaaacggtacggtgcagcccggtgctatctga

SEQ ID NO: 310 - DNA, 6180 bp, Brassica rapa
  source 1..6180: mol_type = genomic DNA
atggaggaagcatcttcatcagatattctagaagcagagattgttggaatctcattcgctcttgctactcatcgtcagatccgtctagcatccattagtgacgctgggatcaaccatgctagccaactctctaacgcattcttggggttacctctggagtttggtaaatgtgaagcttgcggtgccactgagcctgataaatgtgaaggtcattttgggtatatacatctgccagtgcctatataccatcccgctcatgttagtgagttgaaacagatgctgagccttctctgcttgaagtgtctcaagataaagaagattaagagcacaagttctgggcttgcggagcgcttactaggcgtctgttgtgaggaagcttcgaacatcacaattaaagataaatcatcagatggtgcctcatatcttcaactgaagctcccatctagaacaagacttcaggagggcttctggaatttcctggaaagatacggttaccgctatggaagcgaccatacccggcccctgctagcaagagaggtaaaggaaattttaagacggattcctgaagagacaagaaagaagctcacagcaaagggacatattcctcaagaaggatacatcttagagtatcttccagtcccgcctaactgtctgtcagtgccagaagtttctgatggttccaactccatgtcagtggatccgtctagaatcgagctaaaagacgttctcaggaaagtggtagcgatcaacaactctaggtctggtgagacgaactttgagtcgcatagagctgaagccaatgaaatgtttagagtggtggatacctatcttcaggtgaggggtactgcaaagccaacaagaaacattgacatgagattcggggtgtccaagatctcggacagttcctcctcaaaagcttggacagaaaagatgagaacacttttcattcggaaaggttcaggcttctcttctcgcagcgtcatcactggagatgccttcaggaatgtgaatgaggtggggatccctatggaaattgcacatcggatcacatttgaggagagagttagcgtccacaacattggatatctacaagagttggtggacaacaagatgtgcttaagctatacccaaggttctactacctattctctgagggacggttccaaggggcatacagtccttaaacccgggcagattgtgcatcgcagggtcatggatggagatgttgtgtttatcaaccgtcctcccacaacacataagcattctctgcaagcacttcgagtgtatgttcatgaagacaacacggtgaagatcaatcccctgatgtgtagccctctcagtgctgattttgatggtgattgtgtccatctgttctacccccagtctctcacagctaaggcagaggtactggagctcttttcagtggataagcaacttcgcagctcacatactgggcagctgattctgcagctgggtttggattctttgctgtctctgagggttatgatggagcaggtgtttttggacaaagcatctgctcaacagttagctatgtatggctctcgatctctcccaccaccagctgtagtgaagtccagtaaatctggcccggcttggacatttttccagatattgcagcttgcctttcctgagcgtcttagttgcagaggggacgggttcatagttggtggaagtgatttgctgtcctttgattttggggttgatgcgttggcgtctataatcaatggaattgtaaccgcaatcatggtggagaagggtccaaaggaagcactggcattctttgattcactgcagccgctactgatggaacatctagatcctcagggatttagtttaagtctggaagacttgtccatgtctagggaagacatgggagttattcacaatctcatcgtccgggagatttctcctatggtgtctaggttgaggttatcgtatgaggacgaactccaactagagaacagcatccagaaagtgaaggaagtggctgctaatttcatgctgaagtcgtattcgatgaggaacttgatcgacatcaagagcaactcagcaataaacaagctggtgcagcagattggcttcctgggtcttcagctttcagacaagaagaagttgtacacgaagactctggtggaagacatggctcagttttataagaaaaagtatgtcagtacttcttcctctggagattttggaattgtgaagggctgcttttttcacggacttgatccttatgaagagatggctcattcagttgcggcaagggaggtaattgtccgctcttcaagggggttagctgagcctgggacgctcttcaagaatcttatggctgttctgcgagacatagtcatcaccaacgatggaactgtaagaaatacatgcagtaactccatcgtgcagttcaagtatgagctgagttctgacaatgagaatcaaggtttatttgaagcgggagaccctgttggagtattggcagctaccgccatgtcaaatcccgcctataaagcggtgcttgattcttccccaaatagcaactcttcatgggaactaatgaaggaagttctactctgcaaagtcaacttccagaacaccaccaatgatcggcgcgtgattctttatctgaatgaatgccgctgtgggaaaaagtactgccaggagaattctgcttacacagttaggaacaagctgaagaaagttagtctgaaagatactgcagtggagtttctagtcgaatacagaaagcaacaagcgatttcagaaatttttggaatggatatatgcctacatggccatattcatcttaataagacattgttggaagggtggaacatcagcatgcaggacatacttcagaggtgcgaggatgcaatcaactcactagtccaaaaaaagaagaagaaagctgaggactttaagaaaatgaatttgtctgtcagtgaatgctgctctttccgaggtccaggctcgagcaaagattctgatatgccgtgcttgatgttttcctcctacaatgccactgatcctgatctggaaagaactctggatgttctctgcaatacaatatacccagttctgctcgaaacagtgatcaaaggtgatccacggattgcctcagcaaatataatctggaatagtccagaaacgacaacctggatccggagtcgtcatgcatcccgccgaggggaatgggtattggatgtcaccgttgaaaaatctgatgtcaagcaaagtggtgatgcatggagggttgtgattgactcatgtctttcagttcttcatctaatagacacaaaacggtcgatcccatattccataaagcaagttcaagagctgcttggtttgtcctgcgcctttgagcaagctgttcagcgtctctcagcttcagtgagaaaggtctccaaaggagttctgaaagaacatatcattctcgtggcaaacaacatgacctgttcaggggatatgctaggtttcaattctggaggttacaaggctttgactcggtccttgaacatcaaagctccattcacagaagcaactcttattgcgccaaggaaatgtttcgagaaagcagctgagaaatgccataaagattctctatcaacagtagttggatcttgttcttggggaaaacgcgtggatgttggtacaggttcacagtttgagcttctatggaacaaaaaagagactggtctggagaatgatgatgaaactgatgtattcagctttctccagatggtaagatccaccaaaactgcagatgcatacgtttcttcccctggttttgatgtcacagaggaagaaatggctgaatgggctgagtctcctgagcgagactctgctcttggagagcccaagtttgatgacagtgctgagtttcaaaatctacttgatgaaggcaaggcatcggaatccaagtgggacaacggttctctttgggagaatggttgcagtagtggctcagaatggggagtctcgaaaaacgcaggtggtgaggagaacacgcagtctggttggggaaaggctgcaaacattgagaaggaagatgcttcgtctggttggaacagtaaaaaggatgctcaagaagctaccaatacagattcatggggcgcttggggatcaaagacaaaagatgatgctgaaaatgcaacaccgaactggggaacaaaaccagctcaaaatgattctgttgtcatagaaaacggcgagccttcttctgacgtttggggacccaaagctgtttcagacaaaccttggggtaaaaagaactctgaaactgagccagctcctgctgcatggggtaaaacgaactctgaaagtgaatcagctgctgctgcttggggctctactaacaaaaagaacacgggaactgaatcagacgctgctggttggggctctactaacaaaaagaacccggaaactgaatcagatgctggtgcttggggttctggggccaaaaacaaagaaacagaaccagctcctgctgcatggggttcctggggcaaaaagagctcagaagctgtatcaggtggtgcggattggggtaataggggcaaacgggtttctgaaactgaatcaggtgctggtggttgggcttcccggaacccgagcttggaaactcagtcaggtggtgctacttggggttccagggataaatctaaatttgaaactgaatcaggtggtgctgcttggggctcgcaggctaaaaataattttgagagtgagtcaggctcgggtgctgctgcttggggtaagaagaaaccagaaactgaatcaggtggtgctgcttggggttctcaggctaaaaacaaatctgagattgagtcaggctcaggtgccgctgcttggggtacttgggacaagaagaaatcagaaaccgaatcaggtggtggtgcttggggttctcaggctaaaaagaactctgaaactgagtcaggcgcaggtgcttctacttggggtgcttgggacaagaagaaaccagaaactgaatcaggtggtgatggtgctgcttggggttctcaggccaaaaataattctgaaactgagtcaggctcaggtgctgctgcttggggtaagaagaaaccagaaactgaatcaggtggtggtgctgcttggggttctcaggccaaaaagaactctgaaagtcaattaggtgctgctaattggggttctaaggacacaaacaattcggaaaatggatcagattctgctgcttggggtaaaaagaagaattcagaagctgaaccaacttctgttgcttggggttcttggggacagccaagcccccctgcttcagacaaggatgcccaagaagatgatggaaacccgtgggtatcattgaaggcgaccaacagcggagagaaggaagggaatgagacaagtcagtggggagttccaaacaagagatatccatctgctggctcacagtcacagggtggtggtggcggcgcagattggaagaggaaccgtcctcctaggacccctggatctgagagtattatgggtccaatgttcacagcaacaagacagcgcgtagacatgttcacctctgaggagcaagagcttctctccgatgtcgatccagtcatgagaagactcaggaaaataatgcatcagtccgggtacactgatggagaaccaatctcggatgaagacaagacatatgtactggagcagattttgaactaccatccagagaaagatgctaagcttggtcccggtcttgatttcatcacggttgataagcacacaacgttcacagagtccaggtgcttctttgttgtgtcgactgatgggacaaaacaagacttttcatacaggaagtgcatcaacaactatctggtggagaagttcccaaacctagctgaagagttcatcgcaaagtacttcagaaagagggacaatgaaaacagagacaagaacagccaagaagccacaccacctggtgaaaaagagtctcagactcagcctattgataatggaagccaagactcccagcctcagtctattggtaatgaagatggcgacactcagcctcagtctcaagctgaagacactcagcctcagtctcaaattgaagacactcagcttcagtctcaagttgaagaatctcagcctattggtaatggaggtgaggactatcagacagagcctcagggttag

SEQ ID NO: 311 - DNA, 3099 bp, Brassica rapa
  source 1..3099: mol_type = genomic DNA
atggatgatggaaactcatggatgattgagtatgattcatcaatggtatcgatttcaatacatacagatgtggcctggtatcgacttgggaaaccatcaacgcaataccccccttggcgtgaacctactctgaaaacagcaagggttgcgaaaagcattatttccttgctggtgaagcaagcaagaatggctaggctttcatttcgagatgtcatcaaaaaagtttccgagttccaaaagaacgataataaagcttacatttcttctgatccctcagctgtggagagatatttggtcctccatgggcaagttattttgcagatttttgcaaaacaccctataaaggaactcaaaaagtgtgcatttattactggtcttgcaagtaaaatggaggaaatacaccacacaaaatgggcaatcaagaagaggaggaaaatattgccaacgaaacccaagaataaaatattgccaaagaaaccgaagagcaaactaaggataggtaagggatatgtggcatccaagaggagtgctatgcaagcaacaaaaactcacctggttgatagaatttggggacagtattactcagaatatggggccattggtgcagaaaatggcaaggaaaaggttcaagaggagagaaaaaatgaagaagaagatgatgtagaggaaccttcggtcctggaaacaagatgggaaggtgatattctaggaagaacatctgctggtgagcctctttatcaacaagccctcgttggaggagaggtagtggctgtaggtggtgctgtcctcttggaagtcaatgaaacttcggtcatctactttgtggagtacatgttcgaaagttcagatcactgcaaaatgctacatggaagacacctagaaagaggatccgagactgttctagggaacactgctaacgagagggaactattcctgaccaatgcatgcatgactgttcagcttaaggacataaaaggaacagtcagttttgagattcgatcaaggccatggggacatcagtataggaaagagaacaacgctgctgataagcttgaccgagcaagagcagaagagagaaaagcacaacacttgccggctgaatatttctgcaaatgcttatattcacctgtgagagggggtttctttagtcttcaacccaacaacataagtagcggtacaggatcttgcagtccatgtaagatcagggaggaggaaaaggagcggtcaaaacccaagctgaatgcaacaatgaccgggtttttcttcaacggggttgactattgcatggaggattatgcatatgtcaaccctaaatttatatataaaccgaaaaaggataagaagtttgagaggaacgttgatttaaaatccttcgttgtgtgtcaactacttgaagtagttcttccaaaggtatcgtcattaaatggtttatttgaggttatagtgagaagattttataggcctgaagatacacctttagagaaggcatattcttcaaacatccaagaagtgtattacagtgaggacgtacatattctccctccaggggcttttgaaggcaaatgtgaagtaaggaagaaacatgatatgcccttacgcaatgattatctaacattagacaatatcttcttttgtgagatgcctgtccatatcaaaccgaagttctctaccattaaagacgacacacttctcagaaagcaaaaggggaagggaatagagggtgaaactgattatgatgagttacctaaagagatgcgtctggctacacttgatatcttttccggttgtggtggcctgtctaagggactggaacagtcaggtgtatctgaaacaaagtgggctattgagtatgaagagccagcagggcaggctttcaaacaaaaccatcctgagtcaacggtttttgttaacaactgcaatgtgattcttagggctataatggaaaaatgtggagataaagatgagtgtctctctactacagaggcaaatgaacttgcagctaaacttgatgaagaacagaagcttgctctgccactgcctggtcaagtggatttcatcagcggaggacctccatgccaaggattctctggtatgaacaggttccaggaaggctcatggagtaaagttcagcgtgaaatgatactagcattcttgtcctttgctgagtatttccggccaaggtattttcttctggagaacgtgaggaactttgtgtcattcaatggagggcagacatttaaactcactctggcttctcttcttgaaatgggttaccaggtgaggtttggagtgttggaggcaggtgcatatggagttgctcaatctcgcaaaagagcttttatttgggcagctgcaccaggagaagttcttccagaatggcctgagcctatgcatgtctttggtactccagagttgaaaataaaactatccaaaagatcacactatgctgctgttcgtagtactcaatatggtgcacctttccgctcaatcacagtgagagacaccattaacgatcttccacctataaaaaatggtgaatcagagaccaacagagagtatggagctgatccagtctcttggttccaaaagaagataagaggagacatgttagttctcactgatcatatatgcaaagagatggatgaaacaaacctcatccggtgtgaaaatataccaaagactccaggtgctgattggcgtgacctcaaaaacctcaaaaaaaaaaagattaagttatcaagtgggaagatggtagatatgattccagcctggctgagaaacaaagctaagactcacaacgggtggaaaggactctttgggagattagacatggaaggaagctttgcaacttccatcaccgatcctcggccaatgggtatggttggaatgtgcttccatcctgaacaagacaggattatttctgtccgtgaatgcgcccgatctcaggggtttccggatagctataagttcgtagggggaatactagacaagcataggcagattggaaatgcagtgcctccaccattggcttttgctctaggtcgtaagctcaaagaagccgtacttctcaagaaacctcctcttcaacagaaaccctaa

SEQ ID NO: 312 - DNA, 4587 bp, Brassica rapa
  source 1..4587: mol_type = genomic DNA
atggtgagaaacggaaccaaggctggggagcaaaagaagagacctctcccagagatcaaatcagactctgacggcgaagacctctccacgaggcacactaggccgaagcgcgccgcagcatgcaccaacttcaaggagaagtccgtccgcatctccgagaaatccacaaccgtcgaaaccaagcagcaccagactgtggaggacgaagttgtagctctacacttcacagcatctcctcagggcggcggcgacgagcctcgtcagaccaggaggctgactgatttcatcttgcacgacgagtacggagtcccgcagcctgtggcgatggttgagatcggtgacattttcgtcacgggcgttatcttgccttctggtgaatgcgatgataaggagaaagggaaaggcgtgaagtgtgatggctttggacgcgtggagaattggagtatctcggggtatgatgatggctacccggtggtttggttctcgacggagctggcggattatgactgtggtaagcctgctactagttacaagaagatgtatgactatttctatcagaaggcgtttgcttctgtggaggtttataagagagtggctaagtctgcgggtggggactctggtgttagtcttgatgagttgcttgtggcggtttcgaggtctatgagccttgaaagtaaatgcttttctactgatttcttggttattagaaatttccttatacggcaaggagagtttatatataaccagcttgctggtttggatgagacggcaaagaaagatgaagctagctttgcggagattcctgtgctcgttgctcttagagatgagaatagtagacttgacaatggtgctgttattcagatggaaggaagaccttctaacggggttttgaggattgatggagtttctgaagctgcgaagtgcgaggccttgacatctgatcaagaaatggttgacgaggatcaaagatatgctagaattatgcaagacgaagaggataggaaaactatgcagcggcctaaaagaaaaaacggcgcagctttggcttctaataaaggatatgtaaaaaccactgaggatgagattgctggtgattatcctctcccggcttattacaagaatttcaaagatgaagcagatgagcttatagttgctgatgactatgaggttaactacgaggacctgcctcgcaggatgctgcacaactgggcactgtacaactcggattcaaggttcatatccctggagcttctcccgatgaagccctgtgcggatattgatgtgacgatatttgggtctggtttgatggcagaggacggtgggttctggtttggtctagatgatcctgatacttctacctctggacagccaaagaaggatcttgaggggatgcccgtattcctcagtcaaataaaggaatggatgattgagtgggggtgttcaacaatctctatttcaatacgaacagatgtggcatggtatcgacttgggaagccgtcaaagcaatacgccccttggtttgaacctgttttgaaaacagctagggttacgataggcatttttggtctgctagaggagcaaactagaatgtctaagctctcatttgaagatgtcacgaaaagagtgtctgagttccagaagaacgataaagctttcatttcttctgatcgcttggctgttaacagatttctagtcggccatgggcaaattattttgcagatgttctcagaatttcctaaaaaggatatccagaggtgttcatttgttagtgatcttgcaaggaaaagggctgaaaggcacaacacaagatggaccatcaagaagaagaagattttgtttaaagtaaattgtaatccaagggcaggcatggcacctgtggtatccaagaggaaagctatgcaagcaacaacaactcgtctgatcaacagaatttggggagagttttactccaattactctccagaggaacccgtgcaggcagttggtgcagaaaacgaggaggaagaggttgaagaggagggtgaaattgaagaagatgacgcagaggaaactgttccagaacctgttgaggaggttgaaaagtctcatacccctttgaagaaaattcgaggcgtttctggtaaaacggaatcaagttggagtggcgagagtctaggaaaaacttctgctggtgagcctctctatcgacaagccctcgttggagaagaaattgtggctgtaggtggtgctgtcgtgttggaagatgatggaaacgaggtcatctattttgtggagtacatgtttgaaaaatcaaacaactgcaaaatgcttcatggaagactcttacagagaggatgtgacactgttctgggtaatgctgctaacgagagggaactattcctgaccaatgaatgcaagactgtatcgcttaaggagataaaaggaacggtcagttttgagattcgttcaaggccatgggggcatcagtttagaaaagagaacaccaccgcggacaagcttgaccgggcgagagcagaggaacgaaaaacgaaagacttgcctacggaatacttctgcaagagtttatattcgcctgagagagggggtttctttagccttccattaaatgatatgggctgtgcatctggaacctgcagttcatgtaggataagagaagatgaagagaagaagacagagatcaaactcaactcttcaaagacggggttttcgtgtaatggggttgactattccgttgatgattatgtctacgtaaagccagaagatatagatggatcgaaggaggctaatgggagatttaagtctggtcgtaacattggcttacgaccattcgttgtttgtcaaatactggagatcatcgtcctaaaagaatctagaaaggcttcctttgaggttaaagtgagaaggctttataggcctgaggatgtttctgacgaaaaggcctatgcgtcagatatccaagagttgtattacagcgaggacacagatgttctccaaccagaagctctagagggaagatgtgaagtaaggaagaaaattgatatgccctcacgccgtgagtatccaatatcagataatatcttcttctgtgaacagatctatgacccgtccaaaggttctctcaagcagttgcccgtcaatatcaagccgaagtacactactgttaaggacgaggcacttttaagaaagagaaaggggaaggggttagtgactgaaactgattctgtgactgacaagcctgaagaggtatctaaagagacgcgtcttgctacactagatattttcgctggttgtggtggactgtctcagggacttgaacaggcaggtgtctcggcaacaaagtgggcgatagagtatgaagagccagctgggaaggcttttagaaaaaaccatcccgaaacaacagtttttgttgacaactgcaatgtaattcttagggctataatggagaaatgtggagatcaggatgaatgtatctctactaaagaagctaatgaactcgctgagaaacttgatgaagaccagaaacgtacgctgccactgcccggccaagtggatttcatcaatggaggccctccatgccagggattctccggtatgaatcggttcaaccaaagctcttggagcaaagttcagtgtgaaatgatattggcattcttgtcatttgctgattatttccggccaagatactttctcctggagaacgtgaggacctttgtgtcattcaataaagggcagacgttccaacttactctggcttctcttctcgaaatgggttaccaggtgagatttgggatcttggaggcaggtgcatatggggtttcccaatctcgcaaaagagctttcatctgggcagctgcaccagatgaggttctccccgaatggcctgagccgatgcatgtctttggtgttcctgagttgaaaatctcgctgtctaaaggtgtacattacgctgctgttcgcagtactcaatacggtgcacctttccgcccaatcacagtgagagacacaattggcgatcttccatcagtagttaacggagaatccaacacgaagagagagtataaagctcaaccaatctcgtggtttcaaaaggagataagaggagacaatattgctctcactgatcacatctgcaaagagatgaacgaactaaacctcattagatgtaagaaaatcccaaagaggccaggggctgattggcgtgacctcccagaagaaaaggtgacgttatcaaaagggcaagtggtagatttgataccatggtgtctgccaaacactgcgaagcgacacaaccagtggaaaggactgtttgggagattagattgggaaggcaactttccaacatcaatcactgatcctcagccgatgggtaaggttgggatgtgcttccatcctgaccaagacaggattatcactgtccgtgaatgcgcccggtcacaggggtttccggacagctatgtgtttcaagggaacataatacacaagcataggcagattgggaatgcagtgcctccacctttggcctttgctcttggtcggaagctcaaagaagcggttcaactcaagaaggtcaccaaaacaaactag

SEQ ID NO: 313 - DNA, 4563 bp, Brassica rapa
  source 1..4563: mol_type = genomic DNA
atggtgagaaacggaagcaaggctgcgaagcagaagaagagatctcttccagagagcaaagagaccgaccacgacgatgatctctccacgaggaagacgaggccaaagcgagccgcagcatgcacaaacttcaaggagaaatccatccgtatctccgagaaatccgccaccgttgcagcaaagcaccatcagactgtggatgacgagattgtagctctacacttgacagcttcttctccccagagcggcggcggccacgagcctcaccaaaccaggagactgaccgatttcgttttacatgataccgacggagtttcgcaggctgtggagatggtggaacatgtcgacatgttcatcacaggtgtgatcttgcctactggtgaatgctctgacaaggagagagcaaaaggtgtgaggtgcgaagggttcggacgcgttgataactggagtatctccgggtatgaagatggctccccggtggtatgggtgacgacctctctggcagattacgaatgcgttaagcctgctaccacctacaagaaggtgtatgattatttcttccagaaggcgtatgcctcggtagaggtttacaagaaagtggccaactctgacttgatgagtcttgatgagttgcttgtggcggttgcgagggctatgagcctcgagactaagtgcttctctagcgattacttggccatcaaaaatttcgttatatcccaaggagagttcatatataaccagctcgccggtttagatgatacggccaagaaagatgatgcaagattcgttgagattcctgtactcgttgctctcagggatgctagtagtagtagcatacttgaatatgatgctggtcaaccttctaatggggttctgaggattgatggagctgcggagaggaaggccatgtcatctgatcaacacatggttgacgaggatgaaaaatttgctcgacttgtacaagacgaagagtatatgaaatccatgcaaaggccgaggaaaagcagcagctcagcttctgtttcaaagaacggatacataatgaccactgaagatgagatcgccaatgattatcctctcccagctcattacaagaactcccaagtagaaacagacgagcttttgttataccatgacgacgactacgaggttgacatcgatgacctgcctcgtaagatgcttcagaactgggcgctttacgacatcgattcacggttgatatccctggagcttctcccgatgaagacttgtgctgatatcgatgtgaccatctttggatccggtgtgatggcagatgatcaagggatctggattgatctagatgatcctgctacctctatgccgtcagaggaacatggtgggatacctatattcctcagtcaaataaaggaatggatgattgagtatggggtgtcaacggtctcggtttcgatacgaacagatgcggcctggtatcgacttgggaaaccgtcaaagcagtacgccccttggttcgaacctattctgaaaacagcgagggttgcggtcggcgtttttgctctgctggaggagcaaactagaatggctaagctttcgtttgaagatgtcgtaagaagagtgtgtgagttcgagagtaaccataaggcttacatttcgtctgaccgcgcggctgttgacagatacgtggttggccacgggcagataatcttgcagatgttttcggagtttcctaacaaggagatcagaaggtgtgcgtttattactgggctcgcgaataaaagggcggagaagcacaacacaagatggaccatcaagaagaagaagattttgctgaaagtgaatttgaaccgaagggcgggtgtggcacctgtctccaagaggaaggctatgcaagcgacaacaacgcgtctgatcaacagaatctggggggagttttactccatttactctccagaggagccgttgcaggcagttggtgcggaggaagaggctgaagaggatgaggaggaggacgaggaggaaaatgaagatgacgacgcagaggaaactgaacctgaagctgctgaggtcgaagaggctcatacgcttccaaagaaaattgtaggcaaatgtggaaaaatggaaacaagatgggatggtgagagtgtaggaagaacttctgctggtgagcctctctatcgacaagccctcctcgaaggggaaagagtggctgtaggtggtgctgtcatcgcggaagtcagcggaagtcaggccatctactttgtggagtacatgtttgaaagttcggatcactgcaaaatgctacatggaagacttttacaaagagggtccgagactgttctggagaatgctgctaacgagagggaactctttttgacgaacaaatgcatgactgtacagttcaaggacgtaaaaggaacagtctgtttcgagattcgaacgaggccatggggacatcagtttagaaaagaggacgccgttgcggataagcttgaccgggcaagagctgaagaacgaaaggcgaaagacttgcctacggagtacttctgcaagagtttgtattcgcctgagagaggaggcttctttagtcttccgctcagtgatatgggctgtgcttctggatcatgcacttcatgcagattaagagaggatgaagtgcagaggaaaaagatcaaactaaacgcttcaaagactggtttttcctcctatgggattgactactgcgctgatgattttgtctacgtatacccagactgtatcgatggatcgaagaaggctaatgggaagtttaagccagggcggaacatcggtttaagagcctttgttgtgtgccaacttgttgagatcattgtcccaaagaaatctagaaagggttcctttgaggttaatgtccgaaggttttataggcctgaagatgtatctgaacgaaaggcctatgcttcagatatccgagaggtgtattacagcgaggacacctttgttgtccaaccagaggctctaaagggaaaatgtgaagtaaggaagaagaaagatatgccctcttgtagtgagtttccaatatcggagaacattttcttttgtgaacaaatatacgacccatctaaaggttccgtcaagcagttgcccctcaatatcaaaccgaagtactctacagttaaggacgacgcacttttaagaaagaaaaaggggaagggagtagagagtgaaactgattctggtattgttgtcaagcctaatgagttacctaaagagatgcgtctggcgaccttggatatttttgctggttgtggtggcctgtctcaaggactggaacaagcaggtgtatctgcaacgaagtgggcgatcgagtatgaagggccagctggggaggcttttagaaaaaaccatcccgaaacaacagttattgttgataactgcaatgtgactcttagggctataatggagaaatgtggagatcaagatgagtgtatctctactacagaagctaatgaactcgctgctaaacttgatgagaaccagaagcgtactctgccactgcctggtcaagtggatttcatcaacggaggccctccatgtcagggattctctggtatgaaccggttcagccaaagcccatggagtaaaattcagtgtcaaatggtattagcattcttgtcttttgttgattatttccggccaagatactttctcctggagaacgtgaggaactttgtctcatatagtaaagggcagatgtttaaactcactctggcttctcttctcgaaatgggttaccaggtgagatttggggtgttggaggcaggtgcatatggggtttctcaatctcgcaaaagagcttttatatgggcagctgcaccggaagacgttcttcccgaatggcctgagccgatgcatgtctttaatgtttcacagctgaatatctcactatccaaaggtttacgctatgctgctgttcgtagtactcaacatggagcacctttccgtccaatcaccgtgagagacacaatcggcgatcttccacctgtagagaatggagaatccaatatagacaaagagtatgaaactgatccagtctcgtggttccaaaaggagataagaggaaacaagaatgttcccactgatcaccttagccaaacgatgaacgaacacaacctcatccgatgtaaaagaatcccgaagaggtcaggtgctgattggcgtgacctcccagatgaaaaggtgacgttatctactggactggtggtggatttgattccagggtgtctagcagcgaaacctggtaaaaaaaagcagtggaaaggactgtttgggaggttagattgggaaggcaactttccaacttgcgtcactaaacctggtcccatgggtatggttggtaagtgcttccatcctgaccaagacaggatcgtcactgtccgtgaatgcgcccgatctcaggggtttccggatagctatgagttcgaaggggacatagcacacaagcataggcagattgggaacgcagtgcctccccctttggcctttgctcttggtcgcaagctcaaagaagcagtacagctcaacaacttcgccaaaagtaattag

SEQ ID NO: 314 - DNA, 1920 bp, Brassica rapa
  source 1..1920: mol_type = genomic DNA
atggtgatgaagagcaacaatatgacagattatgaaaacaatctgtacaaaaagctcaagagcggaaagctcgaggtcagagtctcctaccgcactttcctctgtccttactgccccaagcagaaggttggtctctacatcgacatccttcagcacgcctctggagtcggtaacagcagctccaagaaacgaagtctcacggagaaggcttgccaccgtgctctcgccaagtaccttcgtaaagatctcgcggattacgctacggctacagtctctaggcgctcaaaggccttggcatcgttaactggcgatattcctctagcttatgatgatcagttcgagaaacttgtgtggccttggaaaggtattttggttaatataccaacaaagatgggacatgatggtctgtgttgtactggggagagtggaccacagcttaaggatgaactgatcagaagaggattcaaccctattagagtacgtaccgtgtccgtgtgggactgtttcggtcattcaggaaccaggatagttgagtttaacagacactggaatggacttaacgatgctttgctgttcaagaaggcttatcaagaagatggtcatggtaaaaaagattggctgagtagtggtggtggtgctgctgactcgagtctttacgcatggcttgccaatgctgatgattattatagggctaactatgtaggagagtacttgcggaagatgggtgacctcaaaagtgtttctaggtttgcagaagaagaggctaggaaagaccataagcttgtgcagcgtctgaacttaatctctgagaacatacagagtcagttgaggatgctagaggaaaaattctcaaagacttctattgcacttaagtgtgagactgaagaaaaagataagattctccatggttacaatcaagatctcacgggaagacaacaaagatcgactgatcatttcaacagaatctttgctgatcatgaaaagcaaaaggcgcagctggaatctcagatgaaggaacttcaaattagagaatctgttttggcgaaacgtgacgcagagaatgaaacacagaggaaaaacgtggcaaaagagcttgaacagagcgcagctaagtatagttacgttcaactagtagccgtggaacaacaaaaaaccagagagaaagttaagaaaatggctgttgatcacaagatgcaaaaggaaaagcttcgtgagagaatcactgcactggaaagagagcttggtcagaaacaagatcttgaacttgtggttgaacatctgaaacgacagttgagcgtgatgaggcacatggagttggacggtggtactgaaattgtgaacaaggtggagacctacctcagagaccttagtgagaaggaaggagagcttgcgcatgtaaacaaatttaatcaagatcttgtcgtacgggagcggaagaccaatgatgagcttcaagaagctcgaagagcactgatcagcaatttgagagacatgagatcgcatattggtgtaaggagaatgggggagcttgacaccaagcctttcatggaagcaatgagaagaaagtactgtcaagaagatctagaggattgggcagttgaaattatccagctctgggaagaatatctgaaggatccagattggcatcctttcaaacggataaagcttgatgctgcagaaactatagtggaagtgatagatgaggaggacgagaagttgagaacactgaagattgaactgggggatgatgcgtaccaagcagtggcaaatgcattgcaggagataaacgagtataacccgagtggaaggtatgtttcctcagagctgtggaactttagagaagagaggaaggctacgctggaggagggtgttacttgtttgctggagcaatggaatcaggcaaagcgtcataagccttaa

SEQ ID NO: 315 - DNA, 1626 bp, Brassica rapa
  source 1..1626: mol_type = genomic DNA
atggagaagcaggagttttcagttggagattcgtccggagagacaaagaaaagtgagtgtactgaagagaagtttgtgtggccatgggttggtcttgtagctaacatacaaacggaggttgataaaacaggtcggagagttggcagaagcggttcaacgttccgtgatgagctcatcgagaaggggtttgatccaacaagagtccaacccatctggaacttcaagggacactctggtttcgccttggtggagttcaccagagacattaaagggttcgagaacgccatgaacttcgagaggagttacaaatcagacggccatggcaagaaagattgggagaaaggtgttcacttgagagatgataagccctacggatgggtcgctagagaggaagactacaaccgaggtgggattgttggcaagaatgttaagaagaagagagacttgaaaactttatcacagcttcaagaagaggaggaaaggaaaatggttcagcttgttgaaagcatgtctcagtccattgagatgaagataataagcaagcaagagctcgaacacaaagtggatgagacttctcgtgttctggagagtgtggagttgcataactatcagctaaacgaaacgtacaaacaagaggttgagaagatgcacacgaacttgcaagggctgtatcagcagattctggcaggacatgacaagtctatgtctgacctggagacagagagagagaagctggagaatcgtgcgaggcagatctacattaacgaagctgagatggaaaaatccagactcgaaatagaaatgaatcaaaaggcgatgatggagcagaatgaagcgaacatggaagccatgaagcttgcagagaagcaccaggcaaagaaggagaagcttcacgagaagataatggaaatggaagcgaaactaaacgaaacacaagagctggagctggagatagagaagctgaaaggcagcaccaatgtgatgaagcatatggctgggagtgatggagatggggagttgatggagaagatggtcaagactcagatggagctagaggctagagaaacagctctacatgataagataatggctgtgacacaaaaagaacgtatggccaacgacgagtaccaggaggctaggaaagagatgattcagttctggaaggagaatgaggatttggtgagtggggaggagataagagtgaagacgatggggcacttagacacgaagccgtttgtggtagcagtgaagaagaaacttagatgttcagaagcaagggcagggctaaaagctatggagttgtgttcattttgggaaggacaaattggaaatgtgcattggcatccatttaaagtggatgaatctgatggaatcgcaaagctagtggttgataaaaacgatttgaagctggttaggctgaagagtgactacggtgaggagctttacaatgaggtggtgagagcgaaagtggagatagtggaatacaacccgagtggtggctatgtggtttcggagatgtggaaccttgagaagaaccgaaaggccacgatggaggaaggaacggatgtgatgttgaagatgaggaagaagctcgtggctatgaagaacaagcgaaagaggcgttga

SEQ ID NO: 316 - DNA, 1932 bp, Brassica rapa
  source 1..1932: mol_type = genomic DNA
atgggtagcacggtggttttaagctcagacgaagaagattcagacatgagcgaatctgaaatggaagcgcatgcagacaaaatctacccaactcttaaaagcggaaagctgaaagtgaaactctctccacaagctttcaagtgtccttactgtccaaacaagaagaaaccaagtttccagtacaaagatctcctccaacatgcttccggagttggtaacagcaactcagagaaaagaacctcaaaggacaaagctagccaccttgctcttgtcaagtacctccaacaagatctttctgactcagcagctgcagagccttcatctaagcgccaaaagaccggagaccctattcaagactgtgaccaggacgagaagcttgtgtgtccttggaaaggtgttgtggttaacattccaacaagaaagacacaagacggtcgatcggcgggtgagagcgggtccaagcttagagatgagtatattcaaagagggtttaaccctactagggttcgtcctttatggaatcactgggggttttcaggaacagctattgtggatttcaacagagactggaacggactccacaacgctcttctgtttgacaaggcttatcaagtagatggtcatgggaagaaagactggctgaagaaacatgggcctcctaagacagggctttacgcgtggatagctcgtgctgatgattacaacggaagtactctcataggagaagacttgaggaagaagggtgatctcaagactatagctgaggttacggaagaggaggcgaggaaacagcagaagctcgtgcagaatctgacgcagcttgtggaggagaagaagaaaggggtgaaggagtttgaggagctgtgttcagtgaagtccaaggaacttaaagagaggttggaagagaaggagaagagtttgcaaaagcataacagagagctgaatgctatacaggagagaacaatgggtcatgttaacaagatctttgctgatcatgagaggttgaagatgaagctggagttggagaagaagaaacttgaactcaagggtattgagttggctaagcgggaagcacacaatgaaaccgagagaaagaatctctctgaagatctacaacagaatgcctccaagaatagctctcttgaactagcttccatggaacaacaaaaggcggatgaagaagttaaaaagctggctgaatatcaaaggaggcaaaaggaggagctccatgagaaaatcataagactagaaagacagagagatcagaaacaagccatcgagctagagatcgagcagttgaaaggagagctaaacgtgaagaagcacatgggatcagacggcgacgctgagattgtgaaagaagtggaagaaatctataaaggtttaacggagaaagaagaagaactagcagacctggacaagtttaaccaaacgcttatactcagagagcgcagaaccaacgacgagcttcaagaagctcgtaaagagttggttaacattatgaaagagtggaagttaagtatcggtgtaaagagaatgggagagctggtgacgaaaccgttcatggatgcactgcagcagaagtattgtcagcaagacgtggaggacagagctattgacgttctccagctctgggaagactatctcaaagaccctgattggcatccattcaagcggatcaagctcgaaaatcaagaaagagaagtggaagtgattgatgagagggacgagaagctgaaggagctaaaggacgatttaggagatggtccttataatgcggtaacgagagcattgttggagataaacgagtataacccaagtggaaggtacattacaacagagctgtggaacttaaaagaagacaggaaggctacacttgaagaaggtgtcacttgtttgcttgatcaatgggacaagtcgaaacgccgctga

SEQ ID NO: 317 - DNA, 1938 bp, Brassica rapa
  source 1..1938: mol_type = genomic DNA
atggggagcacggtgatcttgagctcagacgaagaagattcagacattagtgattccgaaatggaagagtatggagacaagatctacctatctctcaaaagcggaaagctcaaggtcaaactgtctcctcattctttcacgtgtccttactgtccgaacaagaagaaaccgagtttccagtacaaagatctgctccaacatgcttctggagttggtaatagcaattccgacaaaagaaccgcaaaggagaaagcaagccaccttgctcttgccaaatacctccaacaagatcttgctgatgattcacaagctgagccttcttccaagcgaagaaaaactggtgatcctattcaagattgtgaccaggatgagaagctcgtatgcccttggaaaggtgttgtggttaacattccaactacaaagacagaaaatggtcgaaccgcgggtgagagcgggtctaagctaagagatgagtacattcaaagagggtttaatcccaccagggttcgtactttatggaaccactgggggttttctggaacagcgattgtggagttcaacaaagactggaatggacttcacaatgctcttctcttcgacaaggcttatcttgtagatggtcatggtaagaaagactggttgagaaaagatggtcctcccaagtcaggtctttacgcgtggatcgcacgtgctgatgattacaacgggaataacatcattggagaagacttgaggaagaaaggtgatctcaaaactatagctgaggttacggaagaagaggcgaggaagcagcagaagcttgtgcagaatctgacgcagcttgtggaggagaagaagaaaggagtcaaggaaattgaggagcttcattcagcgaagtcaaaggagcttaaggagaagttggaagagaaggagaagagtctgcagaagcacaacagcgagctgaatgctatacaggagaggacaatgggtcatgttaacaagatctttgctgatcacgagaggttaaagatgcagttggagttggagaagaagaaactggagatcaaaggtgttgagctggcgaagagggaagctcacaatgaaaccgagaggaagaacttggctgaagatctgcaagagaatgcttccaagaatagttctcttgagctagcctccatggaacaacaaaaggcggacgaagaagttaaaaaactggctgagaatcagaggaggcaaaaggaggagcttcatgagaagatcataagactggaaagacaaagagatcagaaacaaatgatagagctagagattgagcggttgaaaggagagttgaacgtgaagaagcacatgggatcagacggagacgctgagattgtgaaagaagtggagaatatctataaaggtttaactgagaaggaagaagaactcgctgacctcgacaagtttaaccaaactcttatactcagagagcgcagaaccaacgatgagcttcaagaagcacgtaaagaattgattatgaaagagtggaaacaaaatatcggtgtaaagagaatgggagagctggtgacgaaaccattcatggatgcactgcagcagaagtattgtcagcaagatgtggaggacagagcaatagacgttctccagctctgggaagactatctcaaagatccagattggcatccattcaagcggatcaagcttgaaaatcaagaaagagaagtggaagtgatagatgatagagacgagaagctgagggagcttaaggaagatctaggagatggtccttataatgcggtaacgagagctttgttggagataaatgagtataacccaagtggaaggtacattacaacagagctatggaacttaaaagaagacaggaaggctacacttgaagaaggtgtcacttgtttacttgatgaatgggaaaaggctaaacgcaagcgtggaatggcttaa

SEQ ID NO: 318 - DNA, 2184 bp, Brassica rapa
  source 1..2184: mol_type = genomic DNA
atgtattcaagaagagagctggatgatttggagtacagatactactctgaaatgaaagatggaactcgcaaggtcaagatctctgactctctcttcaggtgtcccttctgctacttagaccgcaagcgtgattacaactttgacgacttgcttcgtcatgcttacaacatcagcggtagttcccgcactaaggatgggcgagagatagctagacatctcgcacttgagagatacatgaagaagtatctccgccctctggaaagaccatcatcagatgtctcttctcttcatacagaggtgttaaccggaagctggataacagcaggctcatcaagctctgctgcaggggaagtgaatagcagcgttgtcaaatccagttcaccatgtatcgctgaagctgaacctatgtctgtctcaggaggagatgatcctgtaccaagcggtgaagaaagacagatgttttctcctaaacacaactcctctttgagcaaccaagacaatacacacccttccaaaagagcttgcctcactgctggtggtaaagagggagaagaacctgtccaacagagtggtctcagccatggtgctccaagatatcctcagaggcgtgatcctttggctgctcgtaatgatggtctgatgtttgtgcatccatggaaagggatcttggccaacatcagtagaacttttagtgagaagacaaggaagttcactggcgagagtggaagcaaaattagggaagagtttgttagcaaagggttcaatccccacaaagtggagccactgtggaacggcagagttggtttcacaggttttgcgattgtttactttggcaaagactgggaagcttacaggaacgccaccatgtttgagaagcactttgaagtcaatcagtgtgggaagagagactatgattctgcacgtgatcgtggcgaagagctttacggttggatagcaaaaagggaggactactactcgagaactgtagttggagaccacctcaggaagcaaggggacttggtgactgtttctggaaaagaggcagagcaacaaagaagggcattcacgcttgtctccaacttggaaaacacactcgagaccaaaagcactaaccttgaagaaatagagagcaagtacaaagaaaccagtacagagcttcagaggagtatgaaagagaaggatgaaatgatcaacgctcataatgaaaagatgagtagcatgcagcaaaaggcgcgtgattatttggcgagtgtgaaaaatgaacatgaaaaggcagctcagcatctggaagctcaaaggaaagagtttgaagagagggagagatatcttgataaatgtcaaacgctgaacaaaactgagcgacgaaagcttcaatggcaaaaacagaagaacttaatggctactgaagagcaaaacaaaactgatgaagaaatgacgagagtggctaaacagcaacagagggagaaagatgagttacgtgagagagtcaaaaagctggagaaaaaactagatgatgagctggcattggagctggagatagagagaatgaggggtgggctgcaggtgatgggacacatggaagatcctgatatgaaggaagagatagaaaagacaaaggaaaaactaaaggagaaagaagaggagtcagagttccaagagtcactctatcaagctcttgttgttaaacatggctacactaacgacgagcttcaggatgctcgcaaggcgtttatcagatcaatgcaagagttgaccttacgtggtcagatctctgtgaagagaatgggagctttggatgagaaacctttccaaaaactaactaaagagagatatccagcagaagaggctgatgtagaagcagcaaagctttgttccttatgggacaaccacttgagagactcggcttggcatccgattaaggtcgtcctaatagacggaaaccacaaggaggtgctgaatgaagaggatgagaagctgcaggaactgaagaaagagctgggggatgaagtgtttgaagctgtgacacaagcgctgatggagaggaacgagtacaatggaagtggaaggtacatagtgcctgggctttggaacttcaaagaaggaagaaaagcgactctcaaagaaggtgtggtttatctgatgaagttgtggacgcacctcaagccaaagcccaagcgtaagtaa

SEQ ID NO: 319 - DNA, 1338 bp, Brassica rapa
  source 1..1338: mol_type = genomic DNA
atggaggaaaacctgcatcgagtttcacgtagtcccgatgtcgggacccacaatcaaaacgactccgtcgccgaagacaaccgtcgacgacggcattacaaccaccatactcacggcgtccaagcaaaagattctgctgattggaacgctgtcgatgatttggattttgagatccttaactttcactcatctccatctaatgccgatgatgatatggattttgagatcgttaactttcactcatcaccgtcgtccccatctccggtagtcaccaatgatgagccgcttcgcctaccaataccaatgcttggattaggggttccaaatgagcagctgttcgtcacacaaagatcactaccagaactagcaagaggcccaccatatttctactatgagaatgttgttcttgcaccttgggagacaatctcaaggcatttgtatgacgttgcaccagaatttgtggactcaagtttcatatgtgctgcagcaagggagagaggttatgtacacaatctccccatcagcaacagatatctgattcaacctcctccgaaacacacaattcaagaggtgttgccgctgaccaagaattggtggccaacatgggatacaagaaccaaactgaactgcatatttactgttaatgctagttctcagttaacaaacaggatccgctctgcccttgaggcttctaggggagaaccgcctgaggagataaaaaggtatgtcattgagcagtgcaaaaaatggaatcttatatgggtgggacaaaacaaagctgtgccattggaagtaaatgaaattgagactcttatggggtttccaatataccatacacgaggtggtggtggcattagtagggccgagcgtttaaagtcactcagtaattcttttcaggtggacacattggcatatcatttgtctgtccttaaacccttgtttcctgatggtattaatgtcctctccctgttcactggtattggtggtggagaaatggcgcttcatcgtctccaaattccgatgaaaacagttgtttctgtggagttctcacaagcaaacaaatacatcttaagagacttttgggagcgaactaaccagaaaggagtgttgatagagtttgaagatgtgcaagacctaactaaagatataatcgtagagttgatgaagcagtttggtgggtttgatatcgtgattggaggtagcccttgcaacaacctcgctggtggtaacagagtaaccccgaatggtcttgaaggtgaacagtctttgatgttctatgagtattgcagggttctgaacgtggttcgccagacagcaaaggagatgagaagatcttga

SEQ ID NO: 320 - DNA, 1002 bp, Brassica rapa
  source 1..1002: mol_type = genomic DNA
atgtttgctacgcttgttgacatgggattttcagatgacgtgatcgatagagcaattcaggaaaatgtttgtccatgtcttagtgtattctctcatttactctatgattatgttgtgaagatgaactgtgaacctagctcttctaagtctaagactatcgatcacttccttgccatgggatttgatgaggaaaaaattatcaaagccatacataaacatggagaagaaaacatggaagagatagcaaatgcactcctctcttctgaagcagatacattgcctataatgaaagaagaagataacatggactggtcagatagtgatgatgagatgaaatacgctgatttgttgagctcagacaacgagaaagatcaagactcctttgatagctgcaatccattgagttctttggtgaaaatgggtttctccgagctagaagcttctctagctatagagagatgtggagacagtgtgagcattgcagacctcgcggacttcatttgtgccgctcatatagctagagaatttgatgagttttacattgaccctgaagaacaaaaggtggacacagtggcatatcatttgtctgtcctaacacccttgtttcctgatggtattaatgttctctcactgttcactggtattggtggtggagaagtggcacttcaccgtctcaaaatcccgatgaaaacagtcatctctctggagatttcagaagtaaacagaaacatcttgagggacttttgggagcaaactaaccaaagaggagtgttgatagagtttgaagacgtgcaagacctagctagagacaaaatcattgagttgatgaagcggtttggtgggtttgatcttgtgattggaggtagtccgtgcaacaacctcgccggtggtaacagagtaagcaggagtggtcttgaaggtgaacagtcttcgttgttctttgagttttgtcggattctggaggttgttcgtgagacgacaatggagatgagaagatcttga

SEQ ID NO: 321 - DNA, 1806 bp, Brassica rapa
  source 1..1806: mol_type = genomic DNA
atggcgcaagattctgctgactggaacagcgatgatgatttggatttgcagattgataactaccagtcatctccaccgtcatccccaccggcggcagtcccttcttccgatgagctgtttgctacgctggttgacatggggttctctcctgagaatattgctagagctatcgatgaatatggaccaaatgcagatactgtggtgattattgatgctatctccaaatacactgttacctgtgaagctagttcttccaagtccaagactattgatcatttccttgctatgggatttgaggaggagaaagttatcaaggctattcatgagcatggagaagacaacattgaagagatagcaaatgcactcatctcctcggcagcagaggtatcgcccaaaatcaaagaagaagaggacattgagtggtctgagagtgatgatgagaagtatgccaatttcctcagctcagatgatgagaaagtttcagactcctcctctgaaaacggcaatcaattgcggtctttaatgaacatgggattctcggagttggaagcttctcttgctatagagagatgtggtactggagaggatgtgagcattgcagatctcgcagacttcatttgtgccgctcagattgctcgagagttcgatgagttccatgctgaccctgaagaacaaaagcctaatgtcaaaaagagacggatagagccaagaagagagccgaggtcatctgctgctgatgatgagccccttcgtctgccaaatccgatgattggatttggcgttccaaacgagccaggactcatcacgcagagatctcttccagccatggctcgaatgcctccatttttctactacgagaacgtcgcccttgctcccaaaggcgtgtgggacaccatttctagtcacttgtacgacgttccaccggagtttgtggattcgaaatatatttgtgcagcagcgaggaaacgaggatacgtgcacaacctccccatcagtggaaggtatcaggtccagcctcctccgaagtacacgatcagcgaggcgtttccgctgaccaagaagtggtggccagagtgggacaagagaacaaagctcaactgcatcctgacagtgaacgctagtgctcagctgacgaacaggatccggttagcacttgagccttatggtggagaaccgcctgagagtaagaagaagtatgtcattgagcagtgcaagaagtggaatctggtgtgggtgggaaagaacaaagctgcgccgcttgaaccagatgaaatggagactcttcttggatttccaaaaaaccatacacgaggcggtggcatgagtaggaccgagcgtctgaagtcactcggcaactcttttcaggtggataccgttgcgtatcacctctctgtcttgaaaccattgtttccatatggtatcaacgttctgtctctgttcactggaattggcggtggagaagtggcgctccaccgtctccagattccaatgaagacggtcgtctcagtggagatctcggcagtgaacagaaacattctcaaggacttctgggagcaaaccaaccagaaaggaaccctgatagagtttgcagacgtgcaagacctgagtaacgagaagatcgtggagttgatgaagcagtttggtgggtttgatctagtgatcggaggtagcccctgcaacaacctcgctggtggtaacagagtgagcaggagtggtcttgaaggtgatcagtcctgtttgttctatgaatattgtcggattctcgatgtggtgcgagaaacaacaaagacgatgagaagatcttag

SEQ ID NO: 322 - DNA, 4344 bp, Brassica rapa
  source 1..4344: mol_type = genomic DNA
atggaaggagacgaacctcgtggaggaggaagcgattctctttctgtcaagaggaaattctatgaaatcgatgaagattcttctcctatgaacggcagttccgagttgtacgaggttgcacagaccaggaacactattgctcttctggaaacaggagttgataagtttgggcattgctgtgagattagagcacatttaaatctgaaggttgaagactactatggagctaaaggagttgataagtggacatcacaccgctgggaagaggaactttttaagaacgaggcaaatgcccttagaggtggattcctgaaagtagagatggtacgccttcttgtaatagatgaatgccaccgcaccactggcaatcatccttatgcaatgattatgaagatttttaatcctcaagggcagaaaggggtggacaagtttgttacaaaagtgaaagaaggtccagtattttatgacccagcacctttatgccgtctggaactgaaagataagttgcgaacttcacacctcaagtttgatgcttctctgttaagtcttcttcaagaactggaaaaaggcaattgtcaggacgtggaggagaataagtttaaggcatatcaaaagcgactgtccgctgactaccacgatattttgcattgccttgatagtcttggcctcatttgcgcacatttggcggctgaaatctgcttggagaaaatctcggaaaccgaaacttataacgaatgctcaatggtgtgcaaggagtttcttagtgatgttttatccacacttgggctgtttttgcagaaagaagaaaagaattcggtagatttgccgcaagacaatccgtcagcagtgatttcgggacttgtatctcccaagttacaagaacttttccatctattggattcattgagaggtgaaatgcaaaagccatgccttattatagttgagagaatcataactgcagaagtgatcgaaagatacgtgaagaaacaagcctctttaggttacctttacgtcttatctttaatcggaaacaacgcctctacccaagcattggcacagaaaatgcaagattcatttcatgttggcaaggtaaatcttgtatttatcactgacgtggtcgaagaagggtttcacatgccagattgctcatgcatggtatgttttgacctgcccaaaacagtgtgtagttactcgcagtctcaagaactggccaaacagagtaactctaagtctatcatgtttcttgaaagggggaaccccagccaaagagatcatctgtatgaccttatgcgaagacaagtaccaaaagaaactccaaaccaagcgaattgtcaggacttgaaagagaacggagccacggttcatgatgaaccagcgccaaaagagcagtcggctaataaaaggttacgtcaactgcaagtgttggataagaatctgctacaatgcagcgccaaagagaaggccccctcttctaaaagtaaatcatctgcgtcggctgcaggttccaaaaagcggaaggagttgcacgggacaacccgtgcaaacgcattgtcaggaatctggggagaaaatcttgatggtgccatctttcaggcttataagttggacttctggagtaatatctctggggacgcgtactctagtttctctcttctgattgagtcaacccttgccgatgatgttggaaatgtcgagatgagcctttacttggtcaggaagtatataaaggcttctgtttcacattgtggccagatacgtttgagtcacgaagagatagtcaaagcaaagtgttttcagcaatttttcttcaatggcatgtttggaaagttgtttgttggatccaagtcactgggaacaaagagagaatttttgcttcaaactgacacaagttctctttggcatccttccttcatgtttttaatgctaccggttgagaccggtgatctagtttcgagtgcgacggttgattggtcagcgatcaactcctgtgcctgtgtagttgatttcttgaagaaaaatccccttctagaacttcaggttggtgaagaaaatcattgcaacacctcatccggtcaggaagggacacaaaagaaagaaacggaaacgaatctgattcattttgccaacgctttgtctgataaaaatagcatcgaagaaattgtggtcattgcgattcacaccggaaggatatactctatagttgaagccgtcaaagattcttctgctatgagcccgtttgaggacgaggcctcattagaatatgctacttatgcagaatattttaataaaaagtatgggattgtattggcgcacccgaaccagccattgttgaagttgaagcagagtcaccatgcgcacaacctcttagtcaacttcagtgacgaagtgattgagaagaaagaaccaaacgttagtaatgttagaaaaacaaaacccaacatccacgctcatttgcctccggagcttttggttagaattgacgtgccacgttctgtgacaaaatcaatctacttactaccatcagtgatgcaccgcctagagtctctaatgttggccagccaacttagagaagagattgattgtagcatcgataacttcagtatatctagtacatcggttcttgaagcacttacaacacttacatccgctgaagcgttttccatggaacgtttggaactgcttggggattcagtcttgaagtatgttgtgagttgttctctataccttaagtatcctaacaaagacgagggacaactttcgcgtgagaggcaatcgattatatctaactcgaatcttcaccgcttggctacagatcgcaaactgcagggatacataagaaacggcgcctttgaaccgcgtcggtggaccgcacctggtcaatgttctctctttcccgttccttgcaagtgtgggattgatagtagagaagtaccgttggagccaagattctttacagagaacatgactataaaaattggcaagtcctgtgacatgggtcatagatggacggtttcaaaatctgtatcagattgcgctgaggccctgattggtgcctattacgtcagcggtggattgactgcggctcttcacatgatgaaatggcttggctttgacgttgaatttgacagagaactagtgaatgaagccatcaatagagtttctctacggtgttacatccctaaagacgatgagcttacggagttggagacaaagatccgacgtgaattctcttcaaagtttcttttgaaagaggctatcacacactcatctgttcatgaatcctactcctacgagagattggagtttcttggcgattccgtgcttgattttctaatcacccgacatctctttaacacctacgaaaagacagggcctggagagatgactgatcttcgatctgcgtgtgtaaacaacgaaaatttcgcgcaagttgcagtgaaaaataatctgcatacccaccttcagcgctgtgcaacggttcttgagactcagataaaagagtatctgatgtccttttcagagccagatgagactggtagaacaatcccttcaatgcaaggccctaaggctcttggggacgtggtggagagtatcgctggagcattgctgatcgatacaaggttagatcttgaagaagtgtggagagtctttgagccgttgctttctccacttgtgacacctgataaacttcagcttcctccataccgagagctcaatgagctgtgcgactctctcgggtatttcttccgtgtgaaatgcgcaaatgatggtgtgaaggcacaagccacgatccagttacagctggacgatgttcttttgactggagatggatctgaacagacaaataaactggcactgggaaaagcagcttcccatctgcttaagcaacttgagatgagaaacatttcacgtaaaactgggaacggggatgatcaaagctccatggatattaaacttgcttgcaatcttagcgacagagaaactccgtcttcagattctgtcgaaatgcagggcacagtggttccagttattgggcctataaacatgaagaaaggagggccccgtggaacactacatgagttctgcaagaagcatctctggccaatgcctactttcgacactttggaagacaagtctcgaactccctttgaattcacagatggcaatgagaagcggactagcttcagcagtttcatatcgaccataaccctgaggatacctaatcgtgaggctgtgatgtattctggagaagccaggcctgacaagaagagttccttcgactctgcagttgtggaactgctctatgagctcgagcgccgcatgatcctgactataaaaaagtaa

SEQ ID NO: 323 - DNA, 2418 bp, Brassica rapa
  source 1..2418: mol_type = genomic DNA
atggctccaaagcgtaaggttccttcaactgaggttgagatctccggtcccacctcaactaggccgaagataagtcccaaagcgccggtagaagttgctgctgagccaatacgttcccgacctaagttcaaggtagagttggtggtggactccaagaaggatccgtcctgggttctagatgagccgattgctgattcggaggctaggactacgtggcccgagaggtatcaagtcatccagaagaaggaagtcgtacctttaccgaagaagaaaaagaaaaagtatgttgaggaagaggagattttccttgcgcgacgccattttcgacgagccatccttgatgattccatcacatacaacctctacgatgatgctcatgtgcagtctgaagaggacgaaaagcctttcatttgcaagatcgccgaaatctttgaaggatgtgatggcaaaatgtactttactgctcaatggttttaccgtgcgtgtgataccgtgatccaaaaacacgaagaaatgatcgatgacaaacgtgtttttatctcggacataaaagatgtaaactcaatgggggttcttctcaacaaattgaagattctgatgatcccgttaacggaaaatactgaagtgactgaaagctgtgattactactgcaacatgaaatatcacctgcctttttcaacacttgaagctttgcaatcaagtcagtgtattacgcctaatcaacgaacggatgctacaatgttagacttgtattgtgggtgtggagccatgtcaactggcctatgcatgggagctcagctgtcagggctgaatcttgtcacgaaatgggctgttgacacatgcgagtatgctgttcaaagcataaagtataaccacccggaaacagaagtgagaaacgagtccgcagaagattttctgtatctgctcaaggagtgggagaaattatgcattcatttctctttgatcgaatctgcggattcagaaaaatacgaaaacctttatgggatgtccgctgtggaagaggttaaagatggcagcgatgagagtgacgtcaaagatggtggagaggtttttgaagttgaaaagattgttggtattaagaaagaggaaggaggtagactccatctaaaggtccggtgggagaactatgggccttcccatgacacatgggaacctattgaaaatcttagcaattgccgtaagaaaattaaagagttcgttgtgcatggatttaaaacaagcatccttccattaccaggaggagtcgatgttgtttgtggaggtcctccatgccaagggattagcggttacaacagattcaggaacgaaaaagagccgctaaaagacaaaaagaacgagcagcttcttgaatacatgaaaattgtggagtttctgaagcccaagtatgttctgatggagaatgtggtagatatgcttaggtttgttgatggctttcttgcgcgctatgctgtgggacgtcttgtccaaatgaattatcagacaagaatgggaatgatggcggcagggtcgtatggccttgctcagttccggaggcggttcttcttgtggggtgcaatgtctagcgagacgcttcctcagttcccacttccgactcatgatgctgtcaatagaggacatgttcctgtgaactttcatagtaacgtagtggcctatgaagaaacagacaatgtgaagttggcggataagatcctactctcagatgtccttaccgaccttccagttgttgcaaacaatgagaggagggcggagatgccatatgacaaagatcctaagacgccatttcaaaaatttatcagattgacgcaagaaggaatgttagcttcacctaaagatcccaagtcaaactccaaaaatgaggtgttgtacgatcaccatcctttgaatcttaacaaagatgattatcaacgtgtctgtaggatccccaagaaaaagcaagcgaatttcagggacttacctggtgtaactgttaatgctaataacaaagttgaatgggatcctaaaatccccaggatctatcttgaatccaatcaccccttgattccagagtatgccatgaaatttgtcgagggaaaatcaaagaaaccctttggacggctttggtgggatgaaactgtcccaactgttatcggaagagccgagccacacaatcatgtgatcatccacccaaaccaagaccgtgtcttgactgtgcgagagaacgcaaggctccagggcttccctgattactatagactatttggccctaccaagaaaaagtacactcaagttgggaatgctgttgcagtaccagtggctagggcacttggatacgcattaggacaagctttccaaggcctcactaatggtagtgatccactcttcactctgcccgaaggttttccaaaaccaaccttctga

SEQ ID NO: 324 - DNA, 2721 bp, Brassica rapa
  source 1..2721: mol_type = genomic DNA
atgggttctgatgaagataaagcgctaccgcttcctccacctgtccttcctccaaaccttcttcccgaggtggagtccatcaagaagaacactctccttccgatggcccggcgtggcactgggtccaaaggacagaggattcctcttctcaccaatcacttcaaagtgaacttcaacaacgccaacggccagttcttccattacagtgttgctataacgtatgaagatggccgtccggtggaagctaaaggtatcggtaggaagatccttgacaaggttcagcagacctataaaactgacttgggatccaagtactttgcatatgatggcgagaagactctcttcaccgttggtcctcttcccagcaacaaacttgacttctctgtcgttcttgaagacgctccttctagcaggaacaacactggaaacggtagcccgaatgagtctaatgacgctgacaggaaacgatcaaagaggcccaatcagtccaagaagttcatggtggagataagctatgcggctaagatacccatgcacgctattgcagccgctctccaagggaaggaaacggacagccttcaagatgcgatcagagtgcttgacgtcattctcagacagagtgcagctagacaaggttgtctcctagttcggcagtcgttcttccataatgacgcccagaactttgtaccaatcggtgcaggtgttgttggtgtcagagggttccattcaagcttccgaacaactcagggaggcttgtccttgaacatagacacttcaactaccatggttgtacaacctggccctgtggttgattttctcctggcgaatcagaatgtgaaagacccctactctgttgactggaacaaggctagacgtgttctcaagaatctcagagtcaaggttgctccctcaaaccgagagtacaagattagtggacttagtgaaaatcgctgcaaagagcaaatgttctctcggaattccaagaacgatatgggcgaagttgtggagcatcagacgactgtgtttgagtatttcaccgagttccgtaacatccaactgcagtactctggtgacttcccttgcatcaacgttggcaagccaaagcgccctacttacatccccattgagcactgtgagcttgtgagtctccagcgctacacaaagtcacttaccaatcttcagagggcttccctggttgaaaagtctaggcagaagccactggaaaggatgacatctctaaccactggtctgaagaacagcaactataatgctgacttggtgttgcaagagagtggtgtcagcatcggctctagcttcacccacgtggagggccgcatcttacaagcaccaaagctgagagtgggcaatggagaggactttcaacctcgcaatgggcgttggaacttcaacaataagaaactggttgagccaaccactgtcactaggtgggctgtggtgaacttctccgctcgctgtgacacaaaccggctcattccggacttgattcgctgcggcaacatgaaaggcattaacgtggagcctccttacgaagtggtctttcaagaaaatgctcagttcaggagtgcaccacctcacatcagagttgaaaagatgttcgagcagatacagtctaagctcccggggaagcctaagttccttctttgcatcctcgcagaaaggaagaactctaacgtttatggtccttggaagaagaagaaccttgctgagcttggaatcgtgactcagtgcattgcgcccaccgccagaatcaatgatcagtacctcaccaacgttctcctgaagatcaacgccaagctcggtggtctaaactcactgctaactatggagcgctcacaggcaatgccgtcagttacgcaagttcctacaatcattgtcggcatggatgtttcccatggttcccctggccagtctgatgtgccatctgttgctgcggtggtgagctccaggcaatggccactcatctcaaagtacagggcatgtgtgcgcacacagtctcgtaaagtggaaatgatcgacaaccttttcaagcttgtccctggcaaagaagagaagatggttgacgagggaattttcagggagctcttggtcgacttttactccagctcccagaagaggaaaccagaccacatcatcattttcagggatggtgtgagtgagtcccagttcaaccaggttctgaacatcgagttggatcagatgatgcaggcatgcaagtttctcgatgaaaaattgaaccccaagtttacagtgatcattgctcagaagaaccaccacaccaagttcttccaggataaaggaccagacaatgttcctccagggactatcattgacagcaagatctgtcaccctcggaacaacgacttctacctctgcgctcatgcggggatgattggaactacaaggccaacacactaccatgtgctgtacgatgagatcaactttaccacagatgacctccaggaacttgtgcattcgctgtcatatgtctaccagaggagcaccactgccatctcagtcgttgcaccgatttgttatgctcacttggcggctgcacagatgggaactgtgatgaagtttgaggacttgtctttgtctgagacatcatcgagccatggcgggatcacgactcctggggcagtgcctgtgccacccatgccaaagttgaacccggaggttgcaagttccatgttcttctgctga

SEQ ID NO: 325 - DNA, 2793 bp, Brassica rapa
  source 1..2793: mol_type = genomic DNA
atggattctcatgaagcaaaacggctaccacctcccccaccggtagttccaccaaaccttgtgcctgaacgagagcctatcaaaaagaccacccttcttccaatggctcggcgtggcatcgggtccgaaggagtgaggacacctcttcttaccaatcacttcagagtcaacttcaacaacgcaaatggccacttctatcattacagtgttactattacatatgaagatgggagtccaatggaggctataggtgtttttaggaagattcttgaaaaggtccaggaaacgtatcgaacagatttaggatctaaatactttgcttatgatggccataagaatctgttcaccattggtgctcttcctagcaacaaaatggatttcttagtcgttctagaaaacacaccttctagcagaaacaacactggaaatgctagcccaaatgacgcggacaggaaaagatcaaggctgccacaccgatccaagaagttcatggttgagataagctatgctgcaaggatccccatgcaagctattgcaagcgctattcgaggaaaggaaacagataatattcaagatgctacaagagtgttggatgtcattttgcatcagaatgcagctaggcaaggttgcctacttgttcgccaatcattttttcataacgatgctcggaactatataaacattggtggaggtgtatttggtgctagagggttccacacaagcttcagaactactcaaagaggcttatccttgaacatcgacacttcaactacaatggtagtacaaccaggccctgttattgattttcttcttgcaaatcagaatgtgaatgacccaaagtatctcgactggaataatgctaggcgtgctcttaagaatctgagagttaaggttgtcccctcaaatagagagtgcaagataactggactaagtgaagagcgctgcaaatatcaaatgtttactatgaattctaaaaacgagaagggggatgttcagattacggtgtacaattacttcaccgagattcgcggtctcaaactgcgatattcaggtgactttccttgcatcaatgttggtaaggcaaatcgcccaaattacatccccattgagcactgtgaacttgtgagtctacagcgttacacaaaatcgcttagtagttttcagaaggcttctctggtagaaaattctaggcagagtccacctgaaagaatggcttcactaaccaatagtatgaagaagagcaactataacgctgaccttgtgttgcaagaaagtggtgtcagcattggctctagcttcatccaagtggagggtcgcgttttaccagcgccaaggctgagaataggcaatggagaggagtttcaacctcgcaatgggcgttggaacttcaataaaaagaaacttgttgagccagtcacggttactagatgggttgttgtgaacttctctgctgaatgtgatacagataggataatttctgacttgattagatgtggacagatgaaaggaatgaacgtagaacctccatacaaagtcgtatttcaagaagatcctaattataggggtgcaccagccaatatcagagtagaaaagatgtttgagcagatccaatctgaactcagaaaagaaggaaagccaaaattcattctttgcattcttgccgaaaagaaaaactctcttgtttatgggccttggaagaagaagaatcttattgaacatggaattgttactcagtgtattgctcctccaaaaaacgtaaaagatcaatatatcaccaatgttcttctcaagataaatgccaagcttggtggactgaactccctgttagctatggaacgctcacgagcaatgatgcatttagtaacgcaagttcctaccttcattgttgggatggatgtatcccatggttcccctaaccaggccgacataccatcaattgctgcggttgtgggctccagagaatggcctctcatctcaaaatatagggcttgtgtgcgcacacagtctcggaaaatggaaatgattgataatctcttcaaacttgtccccaacgaaaagggaaaactagtagatgaaggaattttctggtttgactactctcgtgttgtgttcatagcttgtggcagtggcttttgtcatattaatgagaaactttatgcgcttttcagggagctcttgttcgacttttacacaagctcggggaagaggagacctgaacacattatcattttcagggatggtgtgagtgattcacagttcaatcaagttctcaacattgaattggatcagattatgcaggcatgcaagtttgttgaagaaaattgggaacccaagttcacagtgatcattgcccagaagaaccatcacaccaagttcttccaggatagaggcactgaaaatgttcttccaggaacaatagttgacagcaggatctgtcacccacacaacaatgacttctatctctgtgcccatgctggattgattggaactacaaggccaacgcattaccatgtgctttatgatgagattagattttcgacagatgacctgcaagaacttgtgcattctctatcatatgtctaccagaggagcaccactgccatctctgtcgttgcacctatttgttatgctcatttggcggctgcacagatgggaactgtgatgaaatttgaggatatgtctctgtctgagagatcatcaatccatgatgggatcacgagatctggagaaccacctgtgccacccatgccaatgttgaactcggatgttgcaagctccatgttcttctgctaa

SEQ ID NO: 326 - DNA, 5106 bp, Brassica rapa
  source 1..5106: mol_type = genomic DNA
atggatccgaacaagagtactcatcttcaaatggctcggagtggtaacggttctagaggacagaagatcgatctgcttactaaccactttggagtcaacttcaccacatcaaaaagtcaacatttcttccaatacagtgtcgctatcacatatgaagatgggaatccagttgaagccaagggtattggcagaaagattcttgcaaaagttcaagaaacttatcaaactgatttgggttccaaacactttgcttatgatggcgacaagattcttttcactgttggtcctcttcccaacaacaaactagacttctctgtcgttcttgaagacatgtcttgtaccagaagcaacaccagtaccagtgacgccaacacgaaaagattaaggcctcataatcaatccaaaagattcaatgttgcaatcagctttgctgcaaaaatctcaatgcaagctattcaaggtgctcttcaaggaaaggaaacaaatgatcttcaagatgctgtaagagtgttggatgttatcctgcgccagaatgcagctaccaaaggttgtcttcttgtccgtcaatctttcttccacaatgacgcaaaatacttttcaaacaaccatggaggttttcatctatgcagaggattccattcaagcttcagagctactcagggaggcttatccctcaacattgatgtttcttctacattgatagtatcacctggtcctgttattgatttccttgttttaaatcaagaagtgagagatccatcctctatcgactggaaaaaggctgaacgtactctcaagaatcttagagttaaagtcgacccctcgaatcgagaatacaagataaccggactaactagacttccttgcagagaccaaacgtttctttggaagaaaaagcaaggaaacggggaaactaaggaggttgaggttacagtgtatgattacttcactaaacatcttgaaattgaactgcgtcattcaggtggcttaccttgcatcagtgttggtaagccaaaacgtcctacttactttcccattgagcaatgtcatcttgtttctcttcaacgctatacgaaagctcctacaatttttcagaggagtaaacttgtcaaagaatcagtacagaaaccacaagaaaagatgaatgtgttaaacaacgctattaaggacagtggttataataatgaccctatgttacaagactgtggtgtcagaattgactctgacttcactcaagtggaaggccgcgtcttaccaacaccaaggctgaaagtaggcaatggagaggagtttcaacctcgcgatgggcgttggaacttcaataataagaaacttgttgagccagctactgttactagatgggctgttgtgaacttctctgcacggtgtgatacaaaaaggcttatttctgacttgattagatgtggaaggatgaaaggaatcaacgtagatcctccatacaaagtcgtatttcaagaagatcctaattataggggtgcaccagccaacatcagagtagaaaagatgttcgagcagatgcaatctgaactcagaaaagaaggaatagaaggaaagccaaaattcattctttgcattcttgccgaaaagaaaaactctcttgtttatgggccttggaagaggagaaatcttgttgaagaaggaattgtgacgcagtgtattgctcctacccccaaaataaatgatcagtatctcacaaatgttctcctcaagataaatgccaagatgatgcctttagtaacgcaagttcctaccttcattgttggcatggatgtatctcatggttcccctggccagtctgacataccatcaattgctgcggttgtgggatccagagaatggccactcatctcaaaatatagggcatgtgtgcgcacacaatctcggaaagtggaaatgattgataatctcttcaaacctgtcaccaacgaaaagggaaaacaagtagatgaaggaattttctgggagctcttgttcgacttctacataagctcggggaagaagagacctgaacacattatcattttcagggatggtgtgagtgagtctcagttcaatcaagttctcagcattgaattggatcagatgatgcaggcatgcaagtttgttgaagaaaattgggaacccaagttcacagtgatcattgcccagaagaaccatcacaccaagttcttccgggctgaaggccctggcaatgttcctccaggaacaataattgacagcaggatctgtcacccacgcaacaatgacttctatctttgtgctcatgctggattgattggaactacaaggccaacacattaccatgtgctctatgatgagattggattttcgacagatgacctccaagaacttgttcattctctatcctatgtctaccagcggagcacaaccgccatctctgtaggtgcgcctgtaatgtatgctcatttggcagatgcacagatgtcaactgcggtgaagtttgaggacagctccgagacttcatcgagacatggtgggatcacaacatctgaagcagaacttgtccctcccatgccaaagctgaacgcgaatgttgcaagctctatcgaaggttgttgtggcggcggcgacggaaagacagagatgatacttacggaggaagctctgagaaaagtactcggcatctccaaagcggcttcctccggtactcgtatcgctgcaggaagcgcttgggaggatattcgtggtcctgatcctctaccactattctttcgtgacgtcattgaaagctggcgactttggctgggggctggacctgatcgaagaccaatgtcgtcccacattgtcggttatccccgcatcggtcccaagagagagcttaagtttgcattggagtccttctgggatgggaaaaccggcgctgaggatctgcaaaacgttgctgctgacttgagacgctccatatggaaacatatggctggtgtagggaacaagtacattcccagcaacactttttcttactatgatcagatgttggataccacagcgatgcttggagctgttccctctaggtacggttgggaaagtggtgaggtcgggttcgatgtttacttctccatggctaggggtaatgattctgttcctgctatggaaatgaccaagtggtttgatacaaactaccattacattgttcctgagttgggtcctcatgttaaattctcatatgcatctcacaaggctgtggaggagtttaaggaagccaaagcgcttggcatagacacagttcctgtgctcattggtcccatgacctacttgctcctctcaaaaccagcaaaggatgtcgataaatctttctgccttctctctctgattgacaagattcttcccgtctacaaagaagttttgactgatctaaagtctgctggtgcacgttggattcagttcgacgagcctatacttgtgatggatcttgataccaaccaattgcaggcgttttcggatgcctactctcacatggagtcatctttggcggggttgaatgttcttatagccacatacttcgcagatgttcctgctgaagcgtacaaggcattaacgtccttaaagtgtgtaactgggtttggatttgacctcgttcgtggattagagactcttgatttgatcaaagtggattttcctcgtgggaagctgctattcgctggagttgttgatggaaggaacatttgggccaatgatctttctgcttcactcaagacactacagactcttgaagacattgttggaaaagaaaaagtcgttgtctctacttcttgttctctactccatacggctgtagacttggtgaatgaaattaaacttgataaagaactaaaatcatggcttgcatttgctgcacaaaaggttgttgaagttaatgcacttgccagatcattctctggtgttaaggatgaggcactgtttgcttctaattccatgagacaagcttctagaagatcatctccaagggtgacaaatgccactatacaacataatgttgctgcagtaattaaatctgatcaccggcgttctacaaaagtaagtgctaggctacaagcccagcagaagaagctaaaccttcctcctcttccaacaactacaattggatcttttcctcaaaccccagatctcagacggatacgcaaggaattcaaggccagaaagatatcagaaattgactatgtccaagctatcaaagtcgaatttgaaaaggttgttaagcttcaggaagagcttggcattgatgtattggtgcatggggaggcagagagaaacgatatggtggagttttttggcgagcagctgtctggctttgcattcacatcgaatgggtgggtccagtcatatggatcacgttgtgtcaagccacctatcatctacggtgatgtcagccgaccaaaggcaatgactgtcttctggtcttctatggcacagaagatgaccaaacgtcctatgaaagggatgctcactggtcctgttacaattctcaattggtcctttgttagaaatgaccagcccaggtatgagacgtgtttccaaattgcacttgccattaaagatgaggttaaggaccttgagaaggctggtatcactgttatccagattgatgaagctgcattaagagagggactgcctctcaggagatccgagcaagaactttaccttgactgggccgtccacgcattcagaatcacaaactgtgatgtgcgagacactactcagattcacacccacatgtgctactcaaatttcaacgacattataaactcaattataaacatggatgctgatgtgatcactattgaaaactcacggtcagatgagaagctcttatcagtgttccatgaaggagtgaaatacggtgctggaatcggtccgggggtttatgacattcactctcctcgtatcccatccgctgaagaaatagctgagcgtatcaacaagatgcttgcagttctggatagtaaagtcctttgggtgaaccctgactgtggcctaaagacgcggaagtactctgaagttaagtctgcacttagcaacatggttgctgctgccaagctaatccgctctcagctaaataagtcataa

SEQ ID NO: 327 - DNA, 2736 bp, Brassica rapa
  source 1..2736: mol_type = genomic DNA
atgggttgtgataaaggaaaaggactaccacctcccccacctgtcgttccatccaaccttgtacctgaactggagcctataaaaaagaacactcttcttccaatggcccggagaggcagcgggaccaaaggagtgaagacacatcttcttaccaatcacttcagagtcaatttcaacaactcaaacggccatttttttcattacagtgttgcgattacatatgaagatggtcgtccagtggaggccaaaggaattggcaggaagattcttgaaaaggttcaggagacgtatcgaactgatctaggatccaaatactttgcctatgatggcgagaagactttgttcaccgttggtgctcttcccagcaacaaactggatttctctgtcgttcttgaagacacatcttctagtaggaataacactggaaatgctagcccgaatgaatcaaatgacgcagacaggaaaagatcgaggcgaccaaatcgatccaagaagttcatggttgagataagctatgctgcaaggatccccatgcaagctattgcaagcgctcttcaaggaaaggaaacagattatcttcaagatgctataagagtgctcgatgttattctgcgccagagtgcagctaggcagggatgcctacttgttcgccagtcattttttcacaatgacgtccagaactttgtacacatcggtggaggtgtcactggtgtcagaggcttccactcaagtttcagaactactcagggaggcttgtccttgaatatcgacacttcaactacgatggtagtacaaccaggccatgtcgttgatttccttcttgtaaatcagaatgtgaaagacccaaagtatcttgactggaataaggctagacgtgctctcaagaatcttagagtacaggttgccccctcaaatagagaatacaagataactggactaagtgaagagcgctgccaagatcaaatgtttactcggaattctaaaaacgagaagggggaagttgaggaagttcagactacagtatacaagtacttcaccgagtttcgcggtattccactgcgatattcaggtgactttccttgcatcaatgttggtaagccaaaacgcccaacattcattcctattgagcactgtgaacttgtgagtctacagcgttacacaaaatcgcttaatagtcttcagagggcttcactggtagaaaagtctaggcagaggccacctgaaaggatggcttcactaaccaatggtctgaagaagagcaactataatgctgacctggtgttgcaagaaagtggtgtcagcattggctctagcttcactcaagtggagggacgtgttttaccagcaccaaggctgaaagtaggcaatggagaggagtttcaacctcgcgatgggcgttggaacttcaattataagaaacttgttgagccagtcaccgttactaaatgggctgttgtgaacttctctgctcggtgtgatacaaataggcttatttctgacttgattagatgtggaaggatgaaaggaatcaacgtagaagctccatacaaagtcgtatttcaagaagatcctaattataggggtgcaccagccaacatcagagtagaaaagatgttcgagcagatgcaatctgaactcagaaaaggaaaagaaggaaggccaaaattcattctttgcattcttgccgaaaagaaaaactctcttgtttatgggccttggaagaggagaaatcttgttgaagaaggaattgtgactcagtgtattgctcctacccccaaaataaatgatcagtatctcaccaatgttctcctcaagataaatgccaagcttggtggactgaactccctgttagctatggagcgctcacgagcaatgatgcctttagtaacgcaagttcctaccttcattgttggcatggatgtatcccatggttcccctggacagtctgacataccatcatttgctgctgttgtgggatccatagaatggccacttatctcaaaatatagggcgtgtgtgcgcacacaatctcggaaagtggaaatgattgataatctcttcaaacccgccactaacgaaaagggagaacccgttgatgatggaattttcagtgagctcttgtgggacttttacttaagctcgaagaagagaaaacctgagcacattatcattttcagggatggtgtgagtgagtctcagttcaatcaagttcttaacattgaattggatcagatgatgcaggcatgcaagtttgttgaagaaaattgggaacccaagttcacagtgatcattgcccaaaagaaccaccacaccaagttcttccaggctgaaggccctggcaatgttcctccaggaacgataattgatagcaagatttgtcacccacgcaacaatgacttctatctctgtgcccataatggaatgattggaactacaaggccaacacattaccatgtgctctatgatgagattggattttcgacagatgacctccaagaacttgttcattctctatcctatgtctaccagaggagcaccactgccatctcagtcgttgcacctgtttgttatgctcatttggcggctgcacagatgggaaccgtgatgaagtttgaggacatgtctttgtctgagacatcattgacccatggcgggatcacaatacctggagcagtccctgtgccaccaatgccaaagttgaacgtgaatgttgcaagctccatgttcttctgctaa

SEQ ID NO: 328 - DNA, 2604 bp, Brassica rapa
  source 1..2604: mol_type = genomic DNA
atgcctgtaacgccagaagaaccgagccgtcgagattatgcggtcacagctaggcttggggttggaagcacaggcaggagaatacagttgtgcaccaatcacttcaatgtctctgttggacagccggatgttgttttctaccagtacactgttagtatcaccacagaagacggtgagaatgtccaagggaaaggaattggcaggaaacttattgaccaactttacaagacttactcttctgatcttgatggtaaaaggttggccttcgatggagagaagactttgtataccgttggtcctctcccacagaacgactttgactttcaagtcatcttggaagcttctttttccaaacgtgactgtggcgtctctgatggtggtagtccttctggttcttccaagagatcaaagcgctctttcctgccaagaagttacagggtccaaatccacttttcagcaaaaatacccttaaggagtgttcttgccactcagagaggagttgacacatcagataacagcactcaggatgcagttagagtgcttgacattgtactgagacagcaagcagctgaaagggggtgcctgttagtcagacaggcatttttccttaacgatgtgaactctgttgatgttgggggaggcgtaatagggattcgaggtttccattccagctttcgtccaaccgatggaggactctcgcttaacattgacgtgtcaacgactatgatcttaaaaccaggtccagttatcgaatttctgaaagccaatcagaatgttgagttgcctagacagatcgactggattaaggccagcaaagtgcttaaaaatctgagggtaaaggcatcacaccgtaacatggaattcaaaattataggtctaagtgcgaaaccgtgcaatcagcagctatttacaatgaaaattaaagatggcgagtgtgaaggacagactaaagagattactgtgtatgagtattttaagcaaacttacacagagcctacttattctgcgtacttgccatgccttgatgtcggcaagccagatcgccccaactatcttccactggagttctgtaatcttgtatctctgcaacgttacacaaaagcattgtcagtgaggcaaagagctttacttgttgaaaagtcaagacaaaaacccctagagagaattaaagcactcaatgatgcaatgcacacctactgctatgataaagatccgtttttagccggaagcggcatatctattgaaaaacaaatgactctagctgaaggccgggttctaaatcccccaacgctgaagtttggaaagaatgaggattttttacctagcaacggacgctggaactttaacaagaagatgcttatagaaccaagggctattaagaactgggctgtagtcaacttttcttttccatgcgacagtagtcacatttcccgtgagctcataagctgtggcatgaggaaaggcattgaaattgatcgaccttttgcactagttgaagaggaaccccagtctaaaaacttgagtgctgttaaaagggtagagaaaatgattgcaaagatgaagtcgaaatttccaatcgatcctcctcatttcattctctgtgtcttgccagaacggaagaactcagatatctatggtccctggaagaaggtttgtctcactgaagcagggatcaacacgcaatgcatctgccctacgaagatcaatgaccaatatctcaccaatgtacttctgaagataaattctaagcttggcggcataaattctctgttgggaatggagtgctcttccaacattccattgattaacaaaattcccaccttaatcttgggtatggatgtatctcatgggtctccaggtcgtgcagatgttccttcgatagcagcggttgttggttcaaaaaactggcccttgatctcaaggtacagggcagctgtgagaactcagtcaccaaaaatggagatgattgattcgctcttccaaccagtcgaggaccctgtgaacggagacaacggtatcatgaacgaattgtttgtggaatttttcaagacaagcaacgcacgaaagcctaagcagattatcatattcagggatggagtaagtgaatcacagttcaaccaagtcttgaacattgaggtggatcagattataaaggcgtatcaacgtcttggtgaaaccgatgtgccgaaattcactgtcatcgtggctcagaaaagacaccacacgaagttgtttcaagccaagggtcatgaaaatgttcctgcaggaaccgttgtggacaccaagattgtacatccgaccaactacgatttttacatgtgtgctcatgcagggataataggaacttcaagaccagctcactatcatgttttgctggatgagattggtttctctccggatgagttgcagaatctcatccattctctctcctatgtcaaccagcggagcacaactgcaacctcaattgtggctccagttagatacgctcatctcgcagcagctcaatttgcgcagttcacaaagtttgaagatatatcggaagagaaagtcccggagcttccacgtttgcacgagagagtcgaaagcaacatgttcttctgctga

SEQ ID NO: 329 - DNA, 2226 bp, Brassica rapa
  source 1..2226: mol_type = genomic DNA
atgtcgtaccttctgcctcacttgcattccgggtggtctattgatcaggcgattctagccgaggaagagcgtctcgtggtcattcgtttcggccatgattgggatgaaacctgtatacagatagatgaagtcttttgctctcttccttgtacgaatattaactctttattaactcttcctcatcttcctcttcctattcttcttcctaatcttcctcttcctcacatcgacatggatagggattatagctataatgaatctagcgataatgagtctagcacatgtgaatcagcaaaggggaatcgccttttgtactcactgcctcctcgtccggggtttggaacaaacgttcgcataataccgcttgtgtctaaccatttccaagtcactcttgccaatcttccggaatatttctaccgatacagggtagtaaatttcgtccataatggtgggcgcagccctattgatcagaaagggattggaatagaactcattgacctggttcacagggtttatgactccgattttgttggcatagagtttatctatgatggagaccacatggtgttcacattgggttctttgcccgataggcataatgattttcctgcggttcttgggatgaattcttcaaccatgactaaccctctcaagtcagttgaagtctcgttcaacgctgctcgcaatctcgaaatccctcttcagtctcttgttaacgctatgcatggacaagaatccccgaattcactggaggcaataagggttttcgacatcatcttacatcagcatgctgctagacagggttccctacgtgtgagacggtcttttttccacaatgaaagccgcgaaccaattggtcctaacatcttgggatatagaggattccattcaagttttcggacaacgcagggtggaatgtcacttaacatggacgttaaaaccacaacggtcatcaagcctggtccgcttattgattttctgattgctgaccaaggtgcacgcgatgtgttcgatgtcgactggaatatcaactatttattaactcttcctcatcttcctcttcctattcttcttcctcatcttcctcttcctcacatcgacatggatatggattatagctataatgaagctagcgataatgagtctagcacatgtgaatcagcaaaggggaatcgccttttgtactcactgcctcctcatccggggtttggaacaaacggtcgcataataccgcttgtgtctatccattttcaagtcactcttgccaatcttccggaatatttctaccgatacagggtaaatttcgtccataatgttgggtgcagccctattgatcagaaagggcttggaggagaactcattgacctggttcacagggtttatgactccgattttgttggcatagagtttatctatgatggagaccacatggtgtttacgttgggttctttgcccgataggcataatgattttcctgcggttcttgggatgaatttttcaaccatgactaaccctctcaagtcagttgaagtctcgttcaacgctgctcgcaatctcgaaatccctcttcagtctcttgttaacgctatgcgtgggcaggaatccccgaattcactggaggcaataagggttttggacatcatcttacatcagcatgctgctagacagggttccctacgtgtgagacggtcttttttccacaatgaaagccgcgaaccaattgatcctaacatcttgggatgtagaggattccattcaagttttcggacaacgcagggtggaatgtcacttaacatggacgctaaaaccacaacggtcatcaagcctggtccgcttagtgattttctgattgctgaccaaggtgcacgtgatgtgttcgatgtcgactggtctaagattagggcacgaaacggattgaaatggttgctacgagacgatgtcgtaccttctactcacttgcattccgggtgggctgttgatcaggcgattctaaccgaggaagagcgtctcgtggtcatacgtttcggccctgattgggatgaaacctgtatgcaggaacaaagacattatgatcgatctcgggacgggtacaacaacaagattaattgggctatgaaggacaaacatgagtttattgatatcattgagaccgtcttccgtggtgcaaggaagggtcgtaggctcgtgattgctcctaaagattactccaccaaataccgctactaa

SEQ ID NO: 330 - DNA, 2901 bp, Brassica rapa
  source 1..2901: mol_type = genomic DNA
atgtcgtctcgtggtggtcgcggcggcggtggaggacgtcgatctgaccagtcccccggtcccgttgcgtggcctgcactgcaaagctccggcgctcgcggcgggagaggtcgcggtaacgccgctcccgtcgcttcgagctcttcgtctcctccgtcggatgctgtttccggcgccatcggagcggttgacgtcgcttcgtcgtcgtccgtacgtgagaaacccaaggcctcggcgtcttcggattccgattcgtctctcggtcaggagttagcggagaaagtccagatcacgacggctcctccgtcgtcgtcgaaggcggtgacgtttccggtcaggccagggtttggtcaggcggggaagaaagtgacgattcgcgcgaatcacttcctcgttcaagttgcggatagagatctctatcactacgatgtgtcaatcagtcccgaggttatttcgaagaaggtgaacagggacgtgatgacaacgttggtgaagacgtacggagaatcacacatggcgaagaagattcctgcgtatgacggcaggaagagtctctacactgctgggcctctcccttttgagtctaaagagtttgttgtggatctgaacgacaaaaaacctgctgcgtcatctaagagggacaggaagttcagagttgctataaagctggcgtcaaggcctgatcttcatcagttgcaggagtttctccgtcggaaacagagagatgctccatacgagaccatccaagttttggatgttgtactcagggatctgccatcccaaaagtttgtttccgttgggaggtctttcttcgaccccagtttgggaaggaggggtgagcttggtgatggtgttgagtactggagcgggtatttccaaagtctaagactcactcagatgggactgtctctcaacattgatgtgtctgctagatctttctatgaacctatccttgtcactgaattcatcggcaagtacctgaatctgagggattttagcaggccactgagggactcggatcgtgtcaaggcatcttatctgatgtttattcaaccagtgaagaaagcattgaagagcttaaaagttgaattggcacagtttgacttcgcaagaagtgtcaaggtcagtgggatttccagctgtcccatcagcgagctaaggttcacgttagaggacaacacccaaaaaactgttgtgcagtactttgctgagaagtataattacagagtgaaatacccggctctacctgctatccaatcagggagtgactcaaggcctgcttacttcccaatggaattatgccggatagctgaaggccagagatacaccaaaaagctgaatgagaggcaggtgactgcgttgctaagagctacctgccaaaggcctgacattagagagaattcgatcaaagggatggtcaagaataataagtataacgagattgatcttgtgaggaaggagtttggaatgtcagttactgatcagctagccacagttgaggctcgggtcctacctccacccctgttgaaataccatgaaagtggcagagaaaaaatggtgaatccaaggctaggacagtggaacatgattgacaagaaaatgattaatggagcaagagttgcatcttggactagcgtgtgcttctctactaggattgaccggaatttaccacaagagttttgcaagcaattgattgacatgtgcgtcagcaaaggaatgcaattcaatccacagcctgctattccgttcatctcttgccagcctcaaagaattgaggaagcactttgtgatatccacaaaagggcacctggtcttcaaatgttgattgtaatattaccggatgtcactgggtcatacgggaagatcaaaaggatatgtgaaacagagctagggatagtatcccagtgttgtcaaccaaatcaagttcgtaaactcaacaagcagtacatggaaaatgtcgcattgaagattaatgtcaagactgggggacggaacacagtccttgatgatgccattagaagaaggattcctctgattagtgatcgcccaaccataatctttggtgctgacgtgactcaccctcaacctggagaggactcgagtccttctattgctgcggttgtggcctcgatggattggcctgagataaccaagtatcgtgggctggtgtctgctcaaactcatagggaagaaatcatcgaggacctgtataagctggtacaggatcctcagcgagggccagtccacactggtatgataagggaacatctgatcgcattcaggagggctacaggtcaaaaacctctgaggatcatattctatcgcgatggtgtgagtgaaggacagtttagccaagtgctgttgcatgagatgactgctatacgcaaggcgtgtgcctctctcgaagagcgttatcttccgcctgtaacgtttgtggtcgtccagaaaagacaccacacacgtttgtttcctgctcaacacgggaaccgtgagacaactgataagagtgggaacattcagccaggtaccgtcgtcgataccaaaatctgtcatcccacggagttcgacttctatttgaacagtcacgctggcattcagggaacaagcaggcctgcacattaccatgtgcttgtggacgagaacgggttcacagctgatgccttacaaatgctcaccaacaacctttgttacacgtttgcgaggtgtacgagatctgtttcaattgtgccaccggcttactatgcacacttggctgcattcagggctcgttactacatggaaagtgagaactctgatggaggttcaagcaggagcaggaacacaaccgcaagcacgagtgctgttgtctcgcttcttccagcaaccaaggataacgtcaaggacgttatgttctactgctga

SEQ ID NO: 331 - DNA, 4926 bp, Brassica rapa
  source 1..4926: mol_type = genomic DNA
atgccggaccgcgaaatcggcgacgatgcttctgacactaacctctcctcttccttctcttccttcgcgtcttcctcctcctccttctcttcctcctactccgctgctggcgcttggacggatgatcactccgccaaaatggagaaagatcctagaaaaatcgccaggaggtatcagctggagctgtgcgagaaagcagtggaggagaacgttatcgtgtatttaggaactggttgtgggaagactcacattgctgtgatggttatatatgagcttggacctttgattctcagccctaggaagagtgtttgtatctttcttgctcccactgtggctttggttgaacagcaagcgttagtcatagcaaagtctatcaacttcaaagttgcaacacattgtggtggcaatcggactgtgactacccattctgactgggagagagaggtttcagagaatgaggttctcgttatgaccccacaaatacttctgcataacttacagcactgtttcatcaggatggagtggatttcccttctaatattggatgagtgtcaccatgctcaagaacaaagcaaccatccttatgcacaaatcttgaaggttttctataaaacagaaggtgtaaaaggacctcgtatatttggaatgactgcatctccagtggttggcaaagggtcttttcaatcagagaatttatcgaaaagcataaatagccttgaaaatttgctcaatgccaaggtttactcagtggaaagcaatgtccagctggatggttttgtttcatctcctatagtcaaagtatattattatcagacagctgggactgaagcatctcaatcgaccaacatatatgaaaacatgctggaggacatcaaacagcggtgtttgacatcacttaagcagcagattgataaccatcaaacacaggtcctcttaaatatgaaaaagcttctgaaaagaactcatgataatctcatatatagtctggtgaatcttggcctttggggagcaatacaggctgctagaatccaactgaacactgaccgcaatgtacatcaagagcctttggaagagaataataagtcaaagatatgtattacatatctctctctggctgccgaagtcctttcttctaaagttgctaaagatgagaatgcatctgaacttatcagcttaccagcgttgaaggaaccatttttctcaagaaagctattacaactgattaaaatcctttcggcattcaggatagagccacacatgaagtgtataatatttgtcaatcggattgtgactgcgaggacgctgtcatgcatactaaatagtttgaaacttctagagtcttggaagtctgatttccttgttggacttagttctggagtgaagagcatgtcaagaaagagtatgaagacaattcttgaacggttccaatccaaagagctcaatctactggttgccactaaagttggcgaagaaggtcttgatattcagacatgctgtcttgtgatccgttttgatttgccggagactgttaccagcttcatacagtccagaggccgtgctcgaatgcccaagtctgaatacgcgtttctagtggacaggggaagcgagaaagagatggatctgattgaaaattttaaagtaaatgaagatcgaatgaacctggaaattacttccagaacgtcagaggaaacttgtcctagacttgatgatgaggtatacagagttcatgagacaggagcttgtatcagtggtggaagtagcatctcccttctctataagtattgttctaggcttccacatgatgaattttttcagcccaagccggagtttcaattcaaacctgttgacgagtttggtggaacgatctgtcgcataactttacctgctaatgctcctataagtgagatcgtcagttcactactaccttcgattgaagctgctaaaaagaatgcttgtctaaaggctgtctataagttgcacagcttaggtgtacttaacaattttctgttgccggattcaaatgaagaaactgaggacgagttgtcagatgaagaatttgactttgataaagttgaaggtgaagcctgttcacgaggtgaactgtatgagatgattgttcctgacttgtttaaacaaaagtgggatccatcaaagagttgtgtcaatcttcaatcttactacataaggtttgtgcctcatcccgccgataggatctacaagaagtttggtctcttcatgaagtcacctcttcccattgaggctgagactatggattttgatcttcaccttgctcatcaaagatctgtaagtgtgaagatttttccaaaaggagacgccaatttcgacaatgatgagataaggctagcggagcgtttccaggaggttgccctgaaaattatttttgaacggcgggagctaattacggaatttgttcccttggggctgcaagactcttttagaactagcaaatctaccttctaccttcttcttccaattaatctggatgcttcagaaagtgttttatttgttgattgggcgactattagaagctgcttgtcgtccccaatcttcaaggctccgtctggcttagtagaagatatggatcctcctgtgggatctcatttaaagcttgcaaatggctgctggagtattgatgatgtgaagaacagtgtggttttcgcaacccacaaaaagcaattttattttgtctcggatatctgccatggaagaaatggattcagtgctattagaaaatcaatcaccgaaacccatctggaaagcatatataattcgtatggcgtgaaactcaagcatcctttacagccactcttgcgtttgaaaccgctttgttatgttcggaacttgcttcacaaccgaaagcgggagaatttggaaccaaatgaacttgaggaatatttcatagaaattcctccagagctttctcagttaaagataaaaggattatctaaagacattggaagttcgttatccttgctaccatcagtcatgcaccgtatggagaatttactcgtggctatcgaactgaaacacatgctgtctgcctctatccctgagatagctgaagtttctggtcacagagtactcgaggcgctcacaacagagaaatgtcaggagcgcttttctcttgaaaggcatgcggtgcttggggatgcattcctcaagtttgctgttagccgacacctgtttctacaccatgataggcttgatgaaggagagttgactcggagacgctcaaatgctgtgaacaattccaacctgtttaggcttgcaaccaggagaaatttgcaggtttacatccgtgatcaagcattcgatcctacacagttctttgcattgggccatccatgcagagtaacgtgtgacgaggtagcaatgaaagaggttcattccttggataaggttcctgggcttttggaatcaagtactggtgaaatcagatgtagcaaaggccatcactggttgcacaagaaaacaattgctgatgtggttgaggctcttgtcggagcattcttagttgacagtggcttcaagggggccattgaatttcttaaatggattggcataaatgttgattttgagtcattgcaagtaagagatgcttgtgttgcaagcaagcggtacatgccactgactacttgctttgatttggcggcccttgaaagcctgcttggatataagtttctccacaaaggtctacttttacaagccttcatccatccatcttacaacaggcatggaggaggctgctaccagagattggagtttcttggggatgctgttctggactacttgatgacatcctattttttctcagtctttccgaaactgaaacctggtcaactgaccgatctaagatcgctctcagtaaataataaggcgcttgcaaatgttgctgtcagtttttcactacagaggtttctattttgcgattctacatatctccatgatgctataaaggattataccaacttcgtgacagcatcaccattggccagcggaccatctgaaggtccaaaatgcccaaaggttcttggtgacttgatagaatcctttttgggggctcttttcctcgactgtgggttcgacttgaatcatgtctggagaataatgctatcttttttagatccagtgaaaaacttgtctaacctgcagcttagtcctgtgaaagaactgcttgaatattgccagtcttacaagtgggatcaggagatatcagcgacaaagaaggatggtgctttctctgttgaattaaaagtgaccaagaaaagttcttgccttacagcttctgcaactggtcggaacaaaaaagagagtaccaaaaaggctgctcagctgatgcttacgaacctgaaggctcatgggcatataaaaacctccaatccgttggaggatgttctgaagaatagcatccgaaatgaagctaaattgattggctacgatgaagagcctatagatgttgtggatcgtgatgggctggacgttgaaaacctaaatatccaagattcttttgaggaggatcctgtcactgaaagcaagactagtgaaacaagcagctcatacatcatcagacgagttctcaccaatgcaccaccatctgaaaaagaagaaagccttcctcaaaagaccatcaaagacgcaggtgggtcgatcatcaaaactgcaaaatctctcttgcgcgaaacatgtgttgccaactgttggaagacaccagagttcgtatgttgtgaggaagggccagcccacctgaaaacgttcagctataaggtaatcctggaggttgtagatgcccccaatatgacactggagtgttatggtgaagctaaaccaactaagaaaagtgcatcagaacaggctgctcaagctgctttatggtgtctcgagcatactggattccttcgccgatga

SEQ ID NO: 332 - DNA, 3333 bp, Brassica rapa
  source 1..3333: mol_type = genomic DNA
atggggaaaacgattcaagtgtttggtttccctaacggcgtgagcgcagaggaagtcaaaaacttcctcgaaagactcactggcccaggcacggtctacgcaatcaaagtcagacaaccgaaaaaaggcggtcctagagtctacgccatcgttcagttcacatccgagagactcgctaggcatatcgtcactctagccagccagcgtctcgactacggaagatcttacctcaaggccttcgaagtcgaacaagacatcgtccccaaacctagagcttcgttgcacaacatgccgaatttaaaaatgtacttcggatgccaagtctctcccatgaagctttccgttttctggagtgctcaaaacgtcgccgtatcgtacggaacggggatgcggaaattccacttctcattgtcttggtgcgagaaagagtatcgcctcgagcttccttacgaaaacatatggcatatcgatttgcatttccctcaaggacgtagagactccaagtttcttgtgattcaggtcattggtgctccgaagatcttcgagaaagaagatcaacctgttaacctcttgttcgggttgctagacttctaccgcgacgggtccgacgagcagtggataagaactacagacttcacttcctcttcatgtataagccaatcatcagccttctgtttagagcttcccgttcatctcaacgtctctgacttcagagagaacttcgccaactacgcggaacacgaagacagcactttcgccctcgaatccgggcgtagcttctcatcaaacgcgaacaaactcgtccctgttgttgaccctcctccagggtgttacctccctttcgagatcttgttcaaagtcaacacactggtccaaaacgcgtgcatcccagggccagctctcgatcccgccttctatcagctccttaacccgcagagattcgatagagctctcatagaccactgcctcgagaagctttttcaccttcccgaatgttgctacgctcctgctcgttggctacgcgaagagtactcaacatgggtaacgaaagggaagcttccacagtctcctatgatatctctagacgatggactcgtgtatatgtatcgggttcaagtcacgcctacaagagtctatttctctggccccgaggtgaacgtttcgaaccgcgtgctacgtcactactcagactacatcaacaacttcctcaggatctcgtttgttgacgaagatcttgagaaagttcgctccatggatctctctccacgctcctctaccgtgaaaagaacaaagttatacgagaggattaactctgttcttagggacgggatcgtcatcggtgataagaggttcgagtttctcgcattctcttcctcccagctgagggagaactccgcgtggatgttcgcgccggtcaacgggatcacagcagctaacatcagagcttggatgggggatttcgacaatatacgaaacgtggctaaatacgctgcgaggctaggccagtcgtttagctcgtcgagggagacgcttactgttaggagagatgagattgaagtgattcccgatgtcgagatcagatattctgacgttcactatgtgttttccgacggaatagggaagatctcagctgagttcgctagacgcgtagctaagaaatgcggcttgacggagtttttcccgtctgcttatcaaatccgttacggcgggtataaaggagtggtggctgttgatccgaactcctcgaagaaactgtctttgaggaagagtatgagcaagttcgagtcggagaacacaaagctggatgtgttggcgtggagtaagtaccaaccttgttatatgaacagacagctgatcacgctgttgtctactctcggagtcgaagacaatgtcttcgagaagaaacaaagagaagttgtgaaccagctcgacgcgatcttaaccgatcctcttgaggcttttgaggctctcggtatgatggctccaggggagaacacgaagattctcaaggagctgatcttgtgtggttacaaacccgacgccgagcctttcctctcgatgatgcttcagaatttcagagcgtcgaaactgttggaactgcggaccaaaactcgggttttcattcctcgcggaagatcgatgatgggatgccttgatgagaccagaacgcttgaatacggtcaagtggtggtgcagtatacggatcccactaggccgggaagtaaatacatcgtcacgggacttgttgtggttgcgaaaaacccgtgtctgcatcccggtgacgtgcgtgttcttcaagctgtcaacgtcccagctttgagtcacatggtggattgtgttgttttcccgcagaagggcccgcggccacatccgaatgagtgttccgggagtgatttagatggagatatatactttgtatgttgggatcctgaactcattccacaaggaacgtctaacccaatggactacactcctgaaccagctcaaatcttggatcatgatgtcactattgaggaaattgaagagtatttcacgaactacattgtgaatgatagtcttggaatcatcgcaaatgctcataccgctttcgccgataaggaacctctcaaagcattcagtgacccgtgcattgagcttgcacgaaagttctctatcgctgttgatttcccaaaaacaggtgttgcagctgagatacctcagcatctttacgtgaaagagtatccagattttatggagaagccagataaaccaacgtacgagtcgaaaaacgtgattggtaagcttttcagagaggtgaaagagcgagctcctccgttgatctcgatcaaatcgtttactcttgatgtggcctccaagtcttatgacaaagacatggaagtcaacggattcgaggagtatgttgaccaagctttcttccacaagggaaattatgattacaaattaggtaatttgatggattactatgggattaagacagaggctgagatacttagtggcggtatcatgaggatgtcgaagtcattcaccaagagacgggacgcggaatctattggaagggcggttcggtcgcttaggaaagaagctttgtcgtggttcaatgcttctgaagatgaagaagaggtggttaatgaatctgcaaaggcctcggcttggtatcatgtgacgtaccaccgaagttactggggagtttataatgagggtttgaaccgtgaccatttcttgagctttgcgtggtgcgtttatgataagcttgtgaggattaagaaggctaatgttgggaggcgtcagcggcaggagactcttgagcggttaggcctcatgcgtttgagttga

SEQ ID NO: 333 - DNA, 6124 bp, Brassica rapa
  source 1..6124: mol_type = genomic DNA
ttatatgcttagacatatatccataacttgtgtaaatgtacgtgtcgattaatgcgcgcatttaattttattacggacacgtcggacagtttgtctaccactactaccaataagaaaaaaaacatcgaatttaaaaattcaaaataatcgtagcgggatataaaaactctttccaagaaaaagtctacggaataaagacactcttaacgaacgatcaggatcgtatatcctggaacgtctttaaacaaaatcccttaaacgaacggttatgattgtaagagcagattcacttaaaaataaatctatatagactaacgagcggtcaagatcatagctcaagaaaagtcaataagtaaagtaaacgaatcgaacggttaacattataagagcaggttactgttatatgcaccgcatagtagaggaatataaccgtagggcgaaggatccatcctggatatattccactgtttactgatcaatttaacccattttagctcagagcagaaagggaaaaagaaagagaatctcagaaactaatctctcgtctcgtcttagggtttcgcgttcgtttcatcgatacactcagaggtatgatgattttagggtttcgcaaatgtttcttctgtttaagacttgtgtggattttttttaaatccgtagggtttatgctttctagctttctagcttcgtaatgtggcttctgtgtttgtgcttttttagaagtaaagtgtttttttttccgataaagcttgagactttgtctatcgtcgcatgcattgttcttatgggttattttgttccctgaaatcttaaaaaggttgttgctttactgtgatctctgattttgtgaaaattttactgaggtttccgtttaaaaaattaacctttctgggtttttacatgttgaacaaagccgtaaatgttcttagaaagtgattgtattttgctagtatgtgatgaaagcttgcatctttttgtttttttgttgcgtcatcctttataaagttcaccactctgtttgtgtgtttatttactaaagtgagttttttttgctgatgtttgcttgaaatatgtcatctttttgggttctttattaaaataaacatgtgaatgttctcagcgtgactgtgtttagctaatatgtgatgaaagctgacttctttgggggttcttacatgtttatttacacctgcatgcttttttcaaaatttttgttgggtggtttttagttttagtcaaagattttacttctctgtgggttcttgtgaatgaaagttggaaactttgttagaactagaagctaaaatcttaaaaaggttgttactttactctgtgatctctgtttttgtgggtttcctttgcaaatgtgaaaactttactgaggtttccgtaaaaaaaattcacctttcttggttttctatgttgaactaatctgtaaatgttctcaacgatgaaaactgagtttttttttgttgttgttgttgtttgtgtgtgtagaacatggatgctactaccggtaatggagctgagctcgagtcagcaaatgggagtggggtttccgacgcgctgcctcctcctccaccggtcataccgcccaacgtggagcctgtgagggttcaaaccgaagttgctgtgaagaagaacctaagagtacctatggctcgtccaggctttggatcaaagggtcaaaagattcagcttttgactaatcacttcggagtcaaagttgcaaatcttcagggattcttctaccactacagtgtatgtcttcttgctactgtcatgtttattcaatctgttttgttttcagtgatgttaaccaatagaattatttgttgtcttgaacaggtggcgctcttctatgatgatgggcgtcctgttgagcagaaaggggttggaaggaaagttcttgacaaggttcatgagacgtaccactcggatcttgatggcaagcagttcgcctacgatggagagaagacgctgttcacttttggagctttgcccagcaacaaaatggatttctccgtggtccttgaggaagtttcttccgccaggtaaaaaagatatcatcacattgttccttcacttgagtgcttgagttatgattcttactgacaatgttttatgagcaggactaatggaaacgcaagccccaatgggaatgaagagccaagtgacggtgatagaaaaagacttcgtcagcctaaccgttccaagagcttcagagtcgagatcagttacgcagcaaaaattcctctccaagctcttgctaacgctatgcgtgggcaagaatccgagaattcacaggaggcaataagggtgttggacatcatccttcgacagcatgctgctagacagtaagtgtatatgtttcattttcatgatcctaatatcttttgtgttgtctctctaattaatttctgggaaaactgcagaggttgcctgcttgtgagacagtccttcttccacaatgacccgagcaactgtgaacctgttggtggtaacatcttgggatgtagagggttccattcgagtttccggacaacacaaggtggaatgtcactcaacatgggtaagtagtttcacctgttcgtcgtgtttcctttctgttgcagcaacagtatagtgtctgatgtcttttgtttgttcttatgccagatgttacaaccactatgataatcaagcctggtccgcttgttgactttgtcattgctaaccaaggtgcaaaggatccctttacggttgactggtctaaggtaatctactaaacgtggctatgtcattttcttagcaggttccttgctttttttttttttttagctcaacacgttttgacttgatgttttaaataggctaaaagaacacttaagaatctgaggattaaagtcagcccctcaaaccaggagtacaggatcactggcatgagtgacaagccttgcagggaacaaacgtaagatgccattctctcaaaatcactttgtatttgcttatgtcttactttgctgacattgtgtgatccctttcaaagttagaaaggtctctctgatgtttgcttgttaccgttgtgtaggtttgagtatagaccaaggaacgcacccaagaatgagaatggagagtctgaaaccgttgaaataacggtgtatgactacttcctcagagaacggaacctagagttgcagtactctgcggatttgccttgcgtcaatgttgggaggccaaagcgacccacctatatcccccttgaggtttccctcttttttttttctcatagtattcacttgttttatgttctcgaagtccatcctaaaatgtttgttattttgtggaactttttgcagcactgcacattgattccccttcagaggtacacaaaggctctgaacactttccaaagatctgccctggttgagaaatctagacagaagccgcaagagaggatgaatgttctgtcaaaggtacagtgtctttactctctcatagttgttatgttttatcagtcaagaggattggaatttttatatttatatttggtttaatgttttcaggcgctgaaagtgagcaactatgacgctgaacctctcctgcgttcatgtgggatttctatcagctccaactttactcaggtggagggtcgtgttctgccagctcccaaggtatggtacagttacttagttttgacttgaataattgtctttaatgtcctctttgttttcttttcagctgaaaatgggacgtggagatgaactgtttccgagaaatggtcgctggaatttcaacaacaaggtgctgtgtcttgtctgtctctctttgtatttactttttcatgtaagaaagatgttctgattccctcttttttgttgttgcagcaatttgtggagccaaccaagattgataaatgggctgtagcaaatttctctgctcgctgtaacgtgcgtcaactggttgatgatctaatccgaattggtggaatgaaaggaattgtaagcatgattcttttttcttcatgtttcttggaaacttgttttgtaatcatcatcatcaccatttgtattaaactgctttctgtcacaggaaattgctgccccatttgatgtgtttgaggagggtcatcagtttcgccgtgctcctcctatgattcgtgtagagaagatgtttgaagagatccagtctaagctccctggtgctcctcagttccttctgtgtctcctccccgaaaggaagaactgcgacatctacggttagatattatctctcaactcaagttctttaggttgttaaatgttccttttgattaaaatttgaatttgctactcctcagggccatggaagaagaaaaacttaactgaatacggcatcgttacacaatgcatggctccggtgaggcagcctaatgatcagtatcttaccaactgtcttctgaagatcaatgcaaaggtgatctctgtctttctttttttcctttgtaccaatcgttcattttgcttcttgtatacaatctctgatgcatatactctacagcttggtggcctcaactccatgttgagtgtggagcgtactccagcctttaccgtcatttccaaggttccaaccatcatccttgggatggatgtttcacatggatctcctggacagtctgatgttccctccattgctgcggtaatacattttactctttactatatatattgtttgcttttgcataaaccttttgatttgtgctctttctttgatgctgatgtcttgtgtatggtttttacataggtggtgagttcaaggcagtggcctctagtctcgaaatacagagcatctgtacgcacacagccttcaaaggctgagatgattgagtcactcgtcaagaaaaatggaactgaagatgatggcataatcaagtacttatacaccaactctctctgtgccttgttcttgctcttccttttgtttaagtacttaatgtaatttcattttgttgatttgcagggagttgctggtagatttctacaccagctcgggtaagagaaagccagagcatatcataatcttcaggtaatttactttgttacatcagaacttgtatctttatattcttccgttccgtatgtttctcatatgtgattgtttaaatgtctcaatacttctagggatggtgttagtgaatctcagttcaaccaggttctgaacattgagctcgatcagatcattgaggtaactgaatcatacagaaacagtttcgtattgtttttcaactgttaggaatttgattgcttctgtctttttcccaggcctgcaagcttctagatgagaactggaacccaaagttcctcttgttggtggctcagaagaatcaccacaccaagtttttccagccaaactctcctgacaacgttcccccaggtgattttgattataacctttttttttaaaacacgtacataacatgcatgatctcatgttgtgtttgtttctgtagggactatcatcgacaacaaaatctgccacccaaagaacaacgacttctatctctgtgcccacgctgggatgattgtaagtattatctcaactcttagaaagctacgtttgttgttgattgccactattgttttgtttcttacgacacttgtgtgtatttgaattagggaacaacacgtcctacgcattaccacgtcctgtatgatgagattcatttctcacctgatgagcttcaagagctcgtccactcgctctcttacgtgtatgtagtagtttcaacctttttctaactcttatggcttctattgtgttttgattacattttgaacagatttgtttcgttgttcgatattttgcaggtaccaaagaagcacaaccgccatctctgttggtaatttaaacccatattattttctgtgtttgacatttgaaagtctctggttgtctgtttaataaccgagacatttgtggttcttatgcagttgcaccgatctgctatgcgcacttggcagctgctcagctaggaacgttcatgaagtttgaagatcagtctgagacgtcctcgagccatggtggcgtgacagctccaggaccagtctctgttgcgcagctccctaaactcaaagacaacgtcgccaactccatgttcttctgttag

SEQ ID NO: 334 - DNA, 6126 bp, Brassica rapa
  source 1..6126: mol_type = genomic DNA
gacatttttttgcttttctaaataaaaccataaacttttcagatcgatgtgttgtaaatatagctttgaggcaaaggagaccatcaacaaaacattaataaagggacaacatgatctctacctatttctcaaattcaaaattttatagattctttataataaatttatcaaatgatatcatatattatataaacttaaaaggaaaattatagaaccacactatccgcgcgtagcgcggacacggacctagtaaccataaaagaagagtccaaaggtatatgaaacgagttggagaaaaaaaaagtggagaaaatatatactaatatgtgttatttgatgatgttatatgcatggggtacctaccgttatatccagtaacggaagctaaaccaaacactacactcgtatcacacgttcatccagttaacgaggataatatagttcttttaatttgacctggaaaaatctgatttgttattatatacatagaatagtttctctatggtatgtgtaacgaacgtgcatatatttgattccttaattaagctaagcgctagtaagctcagcaaattatttataacaataaatgcaaaagtaattaacttttttccttccttaacaatagaaaaagtaaacacgtgaggggaggagaaacggatatcaaacaataggacaaaggaaacgaaaagaataaaaatataataatccaggaatataggggccaaattaataataacgataagtgggacccacattattacttgttttgagtctgcttctttaaaacaaagcgtaggagagaagaagctgcaggctctcgcaaaccacccccaaatcaaaccgcagaaacctctctttctctctcgccgtagctctagcgtctagggtttattctccgtctcgtcttcgccgtttcttattagctaaaggtacagactttcttagtcaaaatcttttctaatgtctttctcccatgcatacccactgtttagcccttcgggttttgctcttaacgatttcgtgtgtacggcttcttagtcttcgtgtttcttctgctgctgatgttgtgaatcgctctaaagttgtgatttttcttagtgggtttttcatggggttttagggtttttgtcacagttatcttccatctgcacgtagatctatccctcggttcatggtttctatgttgtttctgctcttaataatctgttcttatatcttacctgctgtaagttgaactttgggttttttttgtgggtttctatttttgtcacgtagatctcttctttgatgtgttctggttatcacaatctgttgaaaagtttaaaacttttttcatatcttgagatgggtttcttttgttttcacttgtcatctagccgcttgatgtgtatatgacgctaaaagtgttcgttttatttttcttggaaaaaaagtttgtaatgttgctttttccatttatcttatatgttttgggtcttgtcttgtttgtgccttgcagatatgggttctgatgaagataaagcgctaccgcttcctccacctgtccttcctccaaaccttcttcccgaggtggagtccatcaagaagaacactctccttccgatggcccggcgtggcactgggtccaaaggacagaggattcctcttctcaccaatcacttcaaagtgaacttcaacaacgccaacggccagttcttccattacagtgtaatgcttcctgtctcctcctctaatgtattatttgtctcgctctaatggttcaatgcttttaacatacttgttttgtctcctctgtgattgttggatgcaggttgctataacgtatgaagatggccgtccggtggaagctaaaggtatcggtaggaagatccttgacaaggttcagcagacctataaaactgacttgggatccaagtactttgcatatgatggcgagaagactctcttcaccgttggtcctcttcccagcaacaaacttgacttctctgtcgttcttgaagacgctccttctagcaggttcgagacttcaaactccttttaacatatattcactgctttataaagatgtgatgataatatactttttatctggcaggaacaacactggaaacggtagcccgaatgagtctaatgacgctgacaggaaacgatcaaagaggcccaatcagtccaagaagttcatggtggagataagctatgcggctaagatacccatgcacgctattgcagccgctctccaagggaaggaaacggacagccttcaagatgcgatcagagtgcttgacgtcattctcagacagagtgcagctagacagtaagcttatttctcaacttctttctttattacaaccttcgttttcctgattggtgtaattcacatcttctgacttttgttttttgcagaggttgtctcctagttcggcagtcgttcttccataatgacgcccagaactttgtaccaatcggtgcaggtgttgttggtgtcagagggttccattcaagcttccgaacaactcagggaggcttgtccttgaacataggtaatcttatcttgaatttaatgtttgttaaagtcttttgggttgtaacactttggtttcttgattgtgtagacacttcaactaccatggttgtacaacctggccctgtggttgattttctcctggcgaatcagaatgtgaaagacccctactctgttgactggaacaaggtacatcgtccgcttcatttgtgctattgaatttctacagatgagaagtacttatctggttttctctcttatcaggctagacgtgttctcaagaatctcagagtcaaggttgctccctcaaaccgagagtacaagattagtggacttagtgaaaatcgctgcaaagagcaaatgtatgtcaagtgtatatcttttttatcacatgttgaagtcgctttgagaagtttctaacaggtctgtctttggttgatacaggttctctcggaattccaagaacgatatgggcgaagttgtggagcatcagacgactgtgtttgagtatttcaccgagttccgtaacatccaactgcagtactctggtgacttcccttgcatcaacgttggcaagccaaagcgccctacttacatccccattgaggtaactctagttcattgttgttccttcttttaccggattatgcttgtacggttcatgacagttcttgttgggttttttttttcagcactgtgagcttgtgagtctccagcgctacacaaagtcacttaccaatcttcagagggcttccctggttgaaaagtctaggcagaagccactggaaaggatgacatctctaaccactgtaggtcttctgtccattatcctttgagagtttttgaagttttttttctgtcaaattttgatttgtgatctgattcatcttgcagggtctgaagaacagcaactataatgctgacttggtgttgcaagagagtggtgtcagcatcggctctagcttcacccacgtggagggccgcatcttacaagcaccaaaggtgacttaccctttttctatacttgttgtgtatcttttcatgtcttaatctggaagtttaatgtaaatatctttccttgtttccaaacagctgagagtgggcaatggagaggactttcaacctcgcaatgggcgttggaacttcaacaataaggtggatggactttattaaattttcagttagataaatgtttcaacctctaatactaacattgaatctctttgcagaaactggttgagccaaccactgtcactaggtgggctgtggtgaacttctccgctcgctgtgacacaaaccggctcattccggacttgattcgctgcggcaacatgaaaggcattgtaagggatcattgattactatatttaactcagtcatatgcaccagttactaattcctcccttgtttttgttcttccttcagaacgtggagcctccttacgaagtggtctttcaagaaaatgctcagttcaggagtgcaccacctcacatcagagttgaaaagatgttcgagcagatacagtctaagctcccggggaagcctaagttccttctttgcatcctcgcagaaaggaagaactctaacgtttatggtaaaagcattctaccattaaataagagagactagtggcatcgtatcttgattctcacataatcgtctgtgtttttttcaggtccttggaagaagaagaaccttgctgagcttggaatcgtgactcagtgcattgcgcccaccgccagaatcaatgatcagtacctcaccaacgttctcctgaagatcaacgccaaggtgatctcctaaagcttgaaatttcaatcagttataatttaagataaagattataaagaccttaaagcttgaactgacttcactgtttcctatatgtagctcggtggtctaaactcactgctaactatggagcgctcacaggcaatgccgtcagttacgcaagttcctacaatcattgtcggcatggatgtttcccatggttcccctggccagtctgatgtgccatctgttgctgcggtaagattacattttgttttctgttgattgtgagttcactcttctatctctctagtaacttgatgtttgtttgtttggaaacaataggtggtgagctccaggcaatggccactcatctcaaagtacagggcatgtgtgcgcacacagtctcgtaaagtggaaatgatcgacaaccttttcaagcttgtccctggcaaagaagagaagatggttgacgagggaattttcaggtcagtttcttggattgttgtgctgtcttagtagtagctcgtgacatggcatcaatgtaactacggattttgtgctcttttcagggagctcttggtcgacttttactccagctcccagaagaggaaaccagaccacatcatcattttcagggatggtgtgagtgagtcccagttcaaccaggttctgaacatcgagttggatcagatgatgcaggtatggatgatgattcttgagcctcattgaccttagtatacagttgaatatttatggacctgtttttcttgtgggttatgctaataggcatgcaagtttctcgatgaaaaattgaaccccaagtttacagtgatcattgctcagaagaaccaccacaccaagttcttccaggataaaggaccagacaatgttcctccaggtataatccatttgacctgagcatgattgatcttatgcatgattgatcttatcttgtaaatgagttctgaaacctgtttctaactgacctgcagggactatcattgacagcaagatctgtcaccctcggaacaacgacttctacctctgcgctcatgcggggatgattgtaagtaacatgcctcatcggttggtttttcctttgtattgatgaattgaacgaaagcttgatactggtctgttgatttcgaatgtattagggaactacaaggccaacacactaccatgtgctgtacgatgagatcaactttaccacagatgacctccaggaacttgtgcattcgctgtcatatgtgtaagcattatatcacttttctagctctctatctgaaacatttgtttgtggtgtgttgccgatgtatactaaacttgtgtggtttgatacttgtagctaccagaggagcaccactgccatctcagtcggtaagctctcatatctttttctcgattgctgctgatagtttagatctctggcatgtaatgtctttggcctccattgattgctgctgatagttaagatctttggcatgtaattgctgtgtctctgctcatctatagttgttttttgaactttatgatgtctagtattagtgagaatgaaccacaactaattttactgcgttcttacctgcaataatctgaatgcatgatggttgcgcaagtatctcaagtttccttgtgtcttttctgcagttgcaccgatttgttatgctcacttggcggctgcacagatgggaactgtgatgaagtttgaggacttgtctttgtctgagacatcatcgagccatggcgggatcacgactcctggggcagtgcctgtgccacccatgccaaagttgaacccggaggttgcaagttccatgttcttctgctga

SEQ ID NO: 335 - DNA, 6130 bp, Brassica rapa
  source 1..6130: mol_type = genomic DNA
ccattttcaaagtaaagtaatagtaatatatgtggcaaagataaaaaaggaaatccaaaggaggaaacacctaatttttattttttcttttattttttgattaagaacacatgattttcttctatttgagtctgcgtatatatagggtaggaccgtaggaagcgtgagactgcaccgcccataaacctttcgtttccaaacacccttctctttatccgttgctctaggggcttcttcgtcgtcatttcctctcttaatctcagtgaagcaggtatacttttctccctttaaatcgttcaatgcatgctaactatttagtatgattccatgcataaataaattaatgttggcgtatttttttttcagttataaaaaaaaaatttaaatgatgacaaaaggtatttaaattttccaagaaaaaagggtttagttctaggaaagtaaaatttgtctgaacaaattgtctggcttctgggaatgatatactccctctgttttattaagttagaggtttttaaaaaaaaaaattgtttcacaaggataatttttttgtattttctatgaaaaaaattgtgatcttcaaaaaaataattgtattaattaaattattattagttaaaaattattaaaaattaaaaataacagaaaacaatatatttattatagtgatttaatgtattttttaataggtgtgaaatcactaaaacatttgtctttgtgaaacggaaagagtatgttattagagtggtaaaatatctatatccgaagaatttaacggaattcaatctaaaaaagttataccaaaccaaaatggtataatgttcagaatgaattcaaaattttaatatctaaagaaacataataaaatccgatccgaaccaaaatatttgacatccaaaaatatacatgcttaaatatattaattatttaaatctaatatgcataaatattcaaaatatctaaaataattggagttatccaaaaaatctgaaaaatatccaaaattattcaaaatagccaaaaataaatattcgaaaataatcaaaaaatacttaaaacactcgaaatacataccggagagctctccggtaaaatatccaaatcaaaccaattttcatgtcaattgaggtatttagtaatacatattcaaacttacttgttgcatattactttaattttggattttaaagattcgaagtacatttgatttgttttttgttacataattttaatggataccttaacctgaacaaaacacgcaaaagttagaacgaatacaaaccgaacccgaatcaacgtatgtagatacccaaaaaggcttaaatttataatcattgaaaatctaaaacatgaatataaatctgaaccgaacctgaacagctgaactgataccgaactcctaaaagtacatgttgtgttcatgcttttaccattaccataaaaaatgtacgttgattctgtcgtcatttcttctgaccttctgattattttcatgcagatatggattctcatgaagcaaaacggctaccacctcccccaccggtagttccaccaaaccttgtgcctgaacgagagcctatcaaaaagaccacccttcttccaatggctcggcgtggcatcgggtccgaaggagtgaggacacctcttcttaccaatcacttcagagtcaacttcaacaacgcaaatggccacttctatcattacagtgtatgtgcacgttttcctctagtattctatttgtatcactgttttctttctgcttataaatgttcattgctttaaagtacttgcttggtatgatccttggatacaggttactattacatatgaagatgggagtccaatggaggctataggtgtttttaggaagattcttgaaaaggtccaggaaacgtatcgaacagatttaggatctaaatactttgcttatgatggccataagaatctgttcaccattggtgctcttcctagcaacaaaatggatttcttagtcgttctagaaaacacaccttctagcaggtccagtttggttttaaaacatatttaccatgttgttatcaagtttaagatgagttgataatattctctttatctacagaaacaacactggaaatgctagcccaaatgacgcggacaggaaaagatcaaggctgccacaccgatccaagaagttcatggttgagataagctatgctgcaaggatccccatgcaagctattgcaagcgctattcgaggaaaggaaacagataatattcaagatgctacaagagtgttggatgtcattttgcatcagaatgcagctaggcagtaagttgatttgtggaatgtctttcagaaacattcattctctgcctggtcttttatacatgttctaacttctctctgcagaggttgcctacttgttcgccaatcattttttcataacgatgctcggaactatataaacattggtggaggtgtatttggtgctagagggttccacacaagcttcagaactactcaaagaggcttatccttgaacatcggtaattcgtttttaaacttaatgtgtaattagactcttctttgtaacatttttggctattaacacttgtttttttagatttttcttttctttagacacttcaactacaatggtagtacaaccaggccctgttattgattttcttcttgcaaatcagaatgtgaatgacccaaagtatctcgactggaataatgtacaccatcttattgctgtaacatttaaccgatgttttactatctttgggaagtggaattatctgatttttccctcatcaggctaggcgtgctcttaagaatctgagagttaaggttgtcccctcaaatagagagtgcaagataactggactaagtgaagagcgctgcaaatatcaaatgtatgtagtgatttgatgtttttttttattacatgtttacatctctttgagttctttccaacatatctttctttaattgatataggtttactatgaattctaaaaacgagaagggggatgttcagattacggtgtacaattacttcaccgagattcgcggtctcaaactgcgatattcaggtgactttccttgcatcaatgttggtaaggcaaatcgcccaaattacatccccattgaggtaactttactacattgttgttttcttctttttgtactcatgaaattttcatgcacactcttatgctttttgtttaaaaaatatatatttttagcactgtgaacttgtgagtctacagcgttacacaaaatcgcttagtagttttcagaaggcttctctggtagaaaattctaggcagagtccacctgaaagaatggcttcactaaccaatgtaggtcttctttttttccattatccatgagacttcgaatttttctgtctagtttaatttggtttatgttattcatcttgaagagtatgaagaagagcaactataacgctgaccttgtgttgcaagaaagtggtgtcagcattggctctagcttcatccaagtggagggtcgcgttttaccagcgccaagggtatggcttaccttgcttctcttgcaagtatcatttcctttttgagtcttgaaggttaaatgttaattattagttcttgttttcaaacagctgagaataggcaatggagaggagtttcaacctcgcaatgggcgttggaacttcaataaaaaggtgcatagataattcatcttttctgattactatttcaagctatgatactaattgtatttctttttttcagaaacttgttgagccagtcacggttactagatgggttgttgtgaacttctctgctgaatgtgatacagataggataatttctgacttgattagatgtggacagatgaaaggaatggtaggctttcttttgaatcattacttgactattcagaaactcaatcatatgcactactactctttatcatccttcccttattatttgttttttttctttcagaacgtagaacctccatacaaagtcgtatttcaagaagatcctaattataggggtgcaccagccaatatcagagtagaaaagatgtttgagcagatccaatctgaactcagaaaagaaggaaagccaaaattcattctttgcattcttgccgaaaagaaaaactctcttgtttatggtataactgtattctactattcttgaatatggtctctcttttttttcttttgatgaactaatgaatgtaaatgtgaaacttgtctctcaatgttccagggccttggaagaagaagaatcttattgaacatggaattgttactcagtgtattgctcctccaaaaaacgtaaaagatcaatatatcaccaatgttcttctcaagataaatgccaaggtggttactgaacattgaactttcagtcatttaaaatttcaagattgattataaagactttacaaactctatttcgtatatgcgcagcttggtggactgaactccctgttagctatggaacgctcacgagcaatgatgcatttagtaacgcaagttcctaccttcattgttgggatggatgtatcccatggttcccctaaccaggccgacataccatcaattgctgcggtaacattgtttctcgtttcttgtgatgtcatccatatatggagagtttaagtctaaagtcttgtatatgtttgtgtgttttgaaaccataggttgtgggctccagagaatggcctctcatctcaaaatatagggcttgtgtgcgcacacagtctcggaaaatggaaatgattgataatctcttcaaacttgtccccaacgaaaagggaaaactagtagatgaaggaattttctggtttgactactctcgtgttgtgttcatagcttgtggcagtggcttttgtcatattaatgagaaactttatgcgcttttcagggagctcttgttcgacttttacacaagctcggggaagaggagacctgaacacattatcattttcaggtatagtgacatttattaaggtatcatgtgaaagtagtataatacatttttgttaacttttggttattaatgttatatgtagggatggtgtgagtgattcacagttcaatcaagttctcaacattgaattggatcagattatgcaggtatggattatggtttgtttatttagtgtatggtcgacattttatggacttgatttattttcttggggttacattattaggcatgcaagtttgttgaagaaaattgggaacccaagttcacagtgatcattgcccagaagaaccatcacaccaagttcttccaggatagaggcactgaaaatgttcttccaggtaagaatacatttgacctgagcatgattttcttttggccattgtggtttaaaatgagttgaaacatgttgcaggaacaatagttgacagcaggatctgtcacccacacaacaatgacttctatctctgtgcccatgctggattgattgtaagtaaatagttccttgtagtggaagtcttctgctcaaatccattatgaatggaatggaaaaaattctattgattttgatgttttagggaactacaaggccaacgcattaccatgtgctttatgatgagattagattttcgacagatgacctgcaagaacttgtgcattctctatcatatgtgtaagaattacatcactttttgtgttctttatgtgaaacatttgtttatgtaatgtctactaaacttgtctgctttggtaattgtagctaccagaggagcaccactgccatctctgtcggtaaattctcatatctttttaacgttacttgttgttttgactaatatcgttttcttcttaacatatggtggattactagtgacttcgctgctttcactatgtgcaataatcttaatgcatgatagttgcaatatgtgcaaatatctcaagtttcgttattgttttttttattgttgttgcagttgcacctatttgttatgctcatttggcggctgcacagatgggaactgtgatgaaatttgaggatatgtctctgtctgagagatcatcaatccatgatgggatcacgagatctggagaaccacctgtgccacccatgccaatgttgaactcggatgttgcaagctccatgttcttctgctaa

SEQ ID NO: 336 - DNA, 12604 bp, Brassica rapa
  source 1..12604: mol_type = genomic DNA
cacgtcaatgttcttctgttgaagcatataactattgactctagatcctaagcaacagaataaaaatcggtgttatgattttcgttttattaacatatttagcatcttgactctgcctttgctagcgctggttaatctatgtttcaataagtttgatttttaaaacttgagtttgcattttatcctaggaaaataattattctactgtcctttcttgaacgactttacaaaaatgacataagaactgattaatgaaacctaaaaaagttgtttatgaaaggtcatttcatagtaaaacaacgaaatactttgatataattttccaaaatttaagtattttgaaaacaaatcttacttttaagagtttgtaaactaactttttatgatccaaaatcatcaaaataccttgaataaatcaaacaaaataagctgcgccgatatactacaatctttggcatgatgagaactgcaatgaagtttcaggacatgtccgagacttcaacgagccatggctagaggtagcataacatctggagcagttcacatgcctcccatgctgaagctgtacaagaaagttactatttccatgtttttatgctgtacgaacgaaatttgacactaatttgactctgataaacattgttctccctgttttaataagataaatgttttagaattctcacagatgttaagaaaatatttgaaatttaaattataaatgctttactttatgtttaactatttcctataatgtagtcaatcaaaatacagtttaaaaaaaattactatgtatacagcattggaaatataaaaatattgatttttaacaaatttttttgaatatagatcattttgaaatgttgacaaaaaagatcattttgaaataaagggagaattatttatccaaatattaattttggttaattcaaaagtaatatcgagtagtaacacgtttcctcaggcagagtctataaaaagaggaaaatgaagaggtttgtccaacacgtttcctccagaaaaaaaaaaagaagaagttacaaatctctgtcttgttcactaaaaataagcataggtagcgcaacgactagtttggcttcgtcatcgcactcttcgtctcctcttacatactccgtatctttttttcctcaggcaagattttctcttcatctttgactattgttttattatgtaataaatcttcatgtttaactccacttcttgcttgttctatttcattttttcatgtttagattatatcagaatacgtttgatttattaaaatactattaaaaaagtttgcatccacttacataactcttttctttttctctggcaagttttttctcttcatcttgacaattctttttctgtcatatatcttcaagtttatctccattttcttgctttattcttgattaggtttcataaaaatgtgttttaaacttttaagttaatgaaatatgattaaaatgtgaccatgtgggtttaacgactccagaaatggatccgaacaagagtactcatcttcaaatggctcggagtggtaacggttctagaggacagaagatcgatctgcttactaaccactttggagtcaacttcaccacatcaaaaagtcaacatttcttccaatacagtgtaagcttattaatgtctttactttcatctctctctttttttgaaagtacttattacagtgggatgtgttggatacaggtcgctatcacatatgaagatgggaatccagttgaagccaagggtattggcagaaagattcttgcaaaagttcaagaaacttatcaaactgatttgggttccaaacactttgcttatgatggcgacaagattcttttcactgttggtcctcttcccaacaacaaactagacttctctgtcgttcttgaagacatgtcttgtaccagaagcaacaccagtaccagtgacgccaacacgaaaagattaaggcctcataatcaatccaaaagattcaatgttgcaatcagctttgctgcaaaaatctcaatgcaagctattcaaggtgctcttcaaggaaaggaaacaaatgatcttcaagatgctgtaagagtgttggatgttatcctgcgccagaatgcagctaccaagttagtatacattttcttgatttttttctttctttacatcttaatgtttttttatggtaaaatttatattttcatgttgttacttacataacttttttttttttttttttgcagaggttgtcttcttgtccgtcaatctttcttccacaatgacgcaaaatacttttcaaacaaccatggaggttttcatctatgcagaggattccattcaagcttcagagctactcagggaggcttatccctcaacattggtaactctttttttcattgtacagtttctaacgtcgaatccaaactcatctttctaacattttgttatttttcatcagatgtttcttctacattgatagtatcacctggtcctgttattgatttccttgttttaaatcaagaagtgagagatccatcctctatcgactggaaaaaggtacttacaagaacttcagtggtatgtttaaggttaagtacttatttgattatgttctcttgttaaggctgaacgtactctcaagaatcttagagttaaagtcgacccctcgaatcgagaatacaagataaccggactaactagacttccttgcagagaccaaacgtatgttctgaactaatatctttggatcatatgctttaaactgctttgatttggttataagttaccttttttttattttgcttaaggtttctttggaagaaaaagcaaggaaacggggaaactaaggaggttgaggttacagtgtatgattacttcactaaacatcttgaaattgaactgcgtcattcaggtggcttaccttgcatcagtgttggtaagccaaaacgtcctacttactttcccattgaggtaatattctgctttctttctttttttttgttctcatcacattttcattctttggtgataaaacttgtgtgttgtttttaaaacattttcagcaatgtcatcttgtttctcttcaacgctatacgaaagctcctacaatttttcagaggagtaaacttgtcaaagaatcagtacagaaaccacaagaaaagatgaatgtgttaaacaacgtaagggtctttaaaaatttcattcttcctcttttttttttccgttcttattctaatattcaagtttcattggcaggctattaaggacagtggttataataatgaccctatgttacaagactgtggtgtcagaattgactctgacttcactcaagtggaaggccgcgtcttaccaacaccaagggtatggcttaccttgcttctcttgcaagtaaacattgatcaagtaactccttttaaatcctgatgaataacgttaattatctgtccttgtttccaaacagctgaaagtaggcaatggagaggagtttcaacctcgcgatgggcgttggaacttcaataataaggtacataggttgattatcttttcctcagttgatgaatatggtaacctttgatactagttgaatctttctttttgcagaaacttgttgagccagctactgttactagatgggctgttgtgaacttctctgcacggtgtgatacaaaaaggcttatttctgacttgattagatgtggaaggatgaaaggaatcgtaagctctcttatatgtggatcattgcttgcctatataaacttaaatcatatatgcaatgcagcattctttttaattaattcttcccttattatttgttttttttttctttcagaacgtagatcctccatacaaagtcgtatttcaagaagatcctaattataggggtgcaccagccaacatcagagtagaaaagatgttcgagcagatgcaatctgaactcagaaaagaaggaatagaaggaaagccaaaattcattctttgcattcttgccgaaaagaaaaactctcttgtttatggtataactgtattctactattcttgaatatggtctctctttttttttttataaactaatgaatgtaaatgtaaaaaaaaattcttggaattttccagggccttggaagaggagaaatcttgttgaagaaggaattgtgacgcagtgtattgctcctacccccaaaataaatgatcagtatctcacaaatgttctcctcaagataaatgccaaggtgatcactgaaatttcaatcacttagaatttcaagattgattataaagacattacaagaactgatttctttatgtttgtatgcgcagcttggtggactgaactccctgttagctatggagcgctcaccacgagcatgatgcctttagtaacgcaagttcctaccttcattgttggcatggatgtatctcatggttcccctggccagtctgacataccatcaattgctgcggtaacattgttcctcgtttcgtatgatgtcatccatatatatagagagtttaagtctaaagtcttgtctatgcttgtgtgttttgaaaccataggttgtgggatccagagaatggccactcatctcaaaatatagggcatgtgtgcgcacacaatctcggaaagtggaaatgattgataatctcttcaaacctgtcaccaacgaaaagggaaaacaagtagatgaaggaattttctggtttgacttcttggactactcttgtgttgtgttcataacttgtggcagaagctttgtcatattaatgagagactttatgcgcttttcagggagctcttgttcgacttctacataagctcggggaagaagagacctgaacacattatcattttcaggtatagtgacatttattaaggtatcatgtgaaagtattatgatacattttggttaactcttgattattaatgtttacatgtagggatggtgtgagtgagtctcagttcaatcaagttctcagcattgaattggatcagatgatgcaggtatggattatggtttgtttatttatttagtgtatgttgttggacatttatggacttggtttattttcttgggttaggcatgcaagtttgttgaagaaaattgggaacccaagttcacagtgatcattgcccagaagaaccatcacaccaagttcttccgggctgaaggccctggcaatgttcctccaggaacaataattgacagcaggatctgtcacccacgcaacaatgacttctatctttgtgctcatgctggattgattgtaagtaaatagcctccttgtgttaaaaatcttctgctggaatccattatgaatcttgtttattgatgttgatgttgtagggaactacaaggccaacacattaccatgtgctctatgatgagattggattttcgacagatgacctccaagaacttgttcattctctatcctatgtgtaagcatcacaatctttgtctatttacatttctatgtactgaattagtcaaactaattctataaaatgtttggttgtgtagctaccagcggagcacaaccgccatctctgtaggtaaattttctggtcaatatcagtagactttagatgatatggacaataaacttgtttgatgtgagattagagtttgctttttagtattgagtgttatgagtaatataacacatctcaaattcctttctttttttgcaggtgcgcctgtaatgtatgctcatttggcagatgcacagatgtcaactgcggtgaagtttgaggacagctccgagacttcatcgagacatggtgggatcacaacatctgaagcagaacttgtccctcccatgccaaagctgaacgcgaatgttgcaagctctatgttcttctgttgaagcatatgactatttgactctagatccctttctgcctaagcaacagaataataatcggtgttgtgattttcgttttaaaaaatatttagcatcttcactctgcctttgttggcgttggttatcatattattctaccaaaatttaaagtatgtcctttcttaatgaaacctacaaaagttgtttatgaaaatttatagtaaaataacgaaatattttgatattttgatttaatattccaaaattctaagtattctgaatacaaattttacttttaagaatttgtaatatttcatttcactgtagaataagattgtatgagttgctacatgaacctgagagatgttataactcacgtcccacgacacaaaataactctgataaacattactttctaatttctagtaacaaatttataaaaagagatctcttataaaaattactgtaaactcaaagcttagtggttaaatacttatcttttacataaaaaacgctctggaatttatggatttgaaacaattatagcatgttacactctgagataaagcaatacaaggacacatatgaaactattactgaagtgaaatgttacaaagattttttcctacatactatattaaagagttaggattcatattcaacgtagcctttacttgtccgcagctgctaaaagctttacaatcaacgtctcgtatatatcaggaagctttaagaggtcaaatgtatgagatgtaacaggctctacttcttccggaagagaatctttgtacatgaatggtagaaaagcctgaaaggaagagagcataaatacagacatgatctgaacaaacaaacaaaaacaagtaaatcatgtaccttataaaaccttaggttccagatcgttgatcgtgacctctgtgctgtttgcttcaagctcattgaaaaatttagacttgaaaaatggaggcagaactaatttatgagtcttgaaacttgtcgccagcaatgttaaaagtgacatctttcttttcttcgttattcaatctcacaaacagtcaataataagctaaactctagattcaatcacaagggtgcagcagctagatgagctaatcaagctaaagtagaaaacttaaaccaatcccatcgactgtaatcaaagaactgcgagcagtgagtgataatcattactagctatgtgcttccccaacgtctcctttccttactaattttaccagcaagaactaactatccggtttatcttattttttcccggtttatcttatttgctttggtttatagctattttgaggtacggttcaaattgatttacataaagaaaggtttcacaaatgagaaatcaagtgaaccgtacctcaaaaatagctaaaccaaagcaaataagataaaccggattgtattttctgttacaagcgtttggttgttggtttaaatctaatctgtcattggtttaatatcttaatgaaatgacctgtcgtctctctctttcaaacagcgaaggttgttgtggcggcggcgacggaaagacagagatgatacttacggaggaagctctgagaaaagtactcggcatctccaaagcggcttcctccggtactcgtatcgctgcaggaagcgcttgggaggatattcgtggtcctgatcctctaccactattctttcgtgacgtcattgaaagctggcgactttgggtattaattgtttggttgtctctatgatctaaaatattctcttagtacctggggcctgagtataaagtggctattcttactgtcagtgatactgtctcagctgggggctggacctgatcgaaggtatgcttaatgttttatactttcttgattgttctgtttacatgttggaagatatagtttttttttattatatatatgcgcctctaaataaaagaaagtgcatctagatacatctctccagttcgttattctggtgaggtcacttattcgatgccatagtaacaacgcaacgtaaaatattgctccttgtcatagtcagacaaggaagcaccacagttctttgctacatcttatagcttaaatcttatcatgatgctacttctcattaaatactcgaaccctttcctgatagttttttttttttttctctccctggttcctctacttcagaggacagggaagcaatatttatacatttgttgaatgaccctttctgctttttttttctcgtgctagtgcagtgggcccagggctgtatcagtgattgattcctcgtcagaaaaactgggaggagtgaaggtagttacaacagatgtagtcccttgatgaagctgaaagaatcaatgatattcttcagaagtggagcgatattgacgaaatagacctcattcttacacttggtatgttaacaacatctagttacgtatcagatttagtgtagtgtttgggatcatattgtgatacaattacttcttgcaactaggtggtactggcttcactccaagagatgtaacacacacctgaagcaaaaaaaaaagtgattgagagagaaacacccggtcttctctttgttatgatgcaaccgagctttaaggtaaaaggctttttcttgtcatgtattgcaacttggttttggttactatttctttccaaaccgaagcagttgcccttctccactcctggaaaagaatggcggtgggtagttatctgatcccgttttccttttttctctgtgagcagatcacgccatttgcgatgctctcaacctctgcagtaggaattagagaggctcaacattggtacaaatctccaaaattcacactgctcttatcatctctaagtaatcatcatcactcacgtttccaggtcttttttacttttttcagataatcaacatacctgggaacccaaacgtagtagccaaatgtatgaaggcgctgttaccagctttgaagcacgctctgaagcagatcaaaggagacaagagagagagagagagaaacatccaaagcatttggaagaagccattgcaccaccggctgacacatgggagaagacgagacaaaggatagtggctgttcttatacacactgaaacttctcagcttctctggtcaatgaatcagtccccaagtgagtgtaaaaacttttcagaatgttaaagagttacatgagacttaactacatatggtgcaaaaggcattgttataacttttgtattgtaaaaatatttgtcccctaatgagaaaaataaaattatgttggtatttttgttttatgtccagtttaattatcttttggttataacaataaatgaattaaaaataggtaaaacctgggaaaataaattaaattaaattaaatagttgtgtttgtgtatgagtctcctccttccccggcggagactgaacagaaataataggagcagtttgaagaaagggaagactataagaatgggtcagcgcgctcttcagagagtcccgccgtcgcttccaagccgcactccttctcttccaccaccgtcttcctcttccccctccctccgttgcgcaccctcctctcgccgccccctccgtcccaggttttcctctcttgatatctccttgtattatttattacaatcatgaccccctgatcatgttgcttgtgaggaaacagaccaatgtcgtcccacattgtcggttatccccgcatcggtcccaagagagagcttaagtttgcattggagtccttctgggatgggaaaaccggcgctgaggatctgcaaaacgttgctgctgacttgagacgctccatatggaaacatatggctggtgtagggaacaagtacattcccagcaacactttttcttactatgatcagatgttggataccacagcgatgcttggagctgttccctctaggtacggttgggaaagtggtgaggtcgggttcgatgtttacttctccatggctaggggtaatgattctgttcctgctatggaaatgaccaagtggtttgatacaaactagtaagtgatcgaatcctccttttttaatgtttgtaaagaaagattctaatgctaattaaatgccttaacagccattacattgttcctgagttgggtcctcatgttaaattctcatatgcatctcacaaggctgtggaggagtttaaggaagccaaagcggtaagttgactgcaacctttcttagttaaaagcttgtagttgacctgttaaaaggttcttattcaaaattgtgctttttggctgctcatggcacagcttggcatagacacagttcctgtgctcattggtcccatgacctacttgctcctctcaaaaccagcaaaggatgtcgataaatctttctgccttctctctctgattgacaagattcttcccgtctacaagtaagaactgttattaaggttttctagaaattacctagaagaaaacaaatacaaacttacactttcatttggatagtactagagagagaggttaaatggttcctgtggcatttgttttgtcagagaagttttgactgatctaaagtctgctggtgcacgttggattcagttcgacgagcctatacttgtgatggatcttgataccaaccaattgcaggcgttttcggatgcctactctcacatggagtcatctttggcggggttgaatgttcttatagccacatacttcgcagatgttcctgctgaagcgtacaaggcattaacgtccttaaagtgtgtaactgggtttggatttgacctcgttcgtggattagagactcttgatttgatcaaagtggattttcctcgtgggaagctgctattcgctggagttgttgatggaaggaacatttgggccaatgatctttctgcttcactcaagacactacagactcttgaagacattgttggaaaaggtaatcagtaaacaaccttttattcgatcgttagcctcagaatgatgtaaatctttgtcttctcttttgcagaaaaagtcgttgtctctacttcttgttctctactccatacggctgtagacttggtgaatgaaattaaacttgataaagaactaaaatcatggcttgcatttgctgcacaaaaggttgttgaagttaatgcacttgccagatcattctctggtgttaaggatgaggtaaggtacatatttgcttattacattacgcacatcgtttgaggactaggactattatctctttgtaggcactgtttgcttctaattccatgagacaagcttctagaagatcatctccaagggtgacaaatgccactatacaacataatgtaaggggttttcttacaaatacattttgtaccctggacttggatctttaattactttcttactcaggttgctgcagtaattaaatctgatcaccggcgttctacaaaagtaagtgctaggctacaagcccagcagaagaagctaaaccttcctcctcttccaacaactacaattggatcttttcctcaaaccccagatctcagacggatacgcaaggaattcaaggccagaaagtaggcgtatctaatccgatgatgtatctaaaaactgtaacatgacattcttctattactcattcactcactgcattttgtaggatatcagaaattgactatgtccaagctatcaaagtcgaatttgaaaaggttgttaagcttcaggaagagcttggcattgatgtattggtgcatggggaggcagaggtgaaaacatactaaaacactaagcttattattcgaactattgcattgtttattcccctgatatgccgtagtcctgcagagaaacgatatggtggagttttttggcgagcagctgtctggctttgcattcacatcgaatgggtgggtccagtcatatggatcacgttgtgtcaagccacctatcatctacggtgatgtcagccgaccaaaggcaatgactgtcttctggtcttctatggcacagaagatgaccaaacgtcctatgaaagggatgctcactggtcctgttacaattctcaattggtcctttgttagaaatgaccagcccaggtgtgtgacaacccaagcctatcaaattctcttttcactctatatggtggtccatctcacggttgctgttgtttataggtatgagacgtgtttccaaattgcacttgccattaaagatgaggttaaggaccttgagaaggctggtatcactgttatccagattgatgaagctgcattaagagagggactgcctctcaggagatccgagcaagaactttaccttgactgggccgtccacgcattcagaatcacaaactgtgatgtgcgagacactactcaggtcgatcatctttatctcactttattgctccattatgaaacatatgtaatttattcatgctctccttgtactttcatgcagattcacacccacatgtgctactcaaatttcaacgacattataaactcaattataaacatggatgctgatgtgatcactattgaaaactcacggtcagatgagaagctcttatcagtgttccatgaaggagtgaaatacggtgctggaatcggtccgggggtttatgacattcactctcctcgtatcccatccgctgaagaaatagctgagcgtatcaacaagatgcttgcagttctggatagtaaagtcctttgggtgaaccctgactgtggcctaaagacgcggaagtactctgaagttaagtctgcacttagcaacatggttgctgctgccaagctaatccgctctcagctaaataagtcataa

SEQ ID NO: 337 - DNA, 6186 bp, Brassica rapa
  source 1..6186: mol_type = genomic DNA
tatattttttttaaaaattaaatcaaacatcaaattatttatatatgacaaatatttttatttatacaattttttttattaatatttaattgtaaataatttcatatcttaattttcaatttttatgaaaaatattatttcaagataacaatacaatatataagataacaacacaatataataagaattatcttattataatatatacagaaattatctttttatttttaattatatttttaaattttggataattcttagctttaatcacttatattattaaaaaaattaaattcgtttttattttttattaatttatatatttaatttattaaaggtataattgatattaaacactctaacttttaacgtgagcgctccgttgcaaaaattcactttgaaaataatagtatagatattatatacattaatacatctattacattaatcgagctgtcctttaacaatataattaaatataggcctaaagtatgtaacgaataatgataggacactgaaacgaaaagaacgatcataatatataggagcgataaaaaaagaaaatattaccctttaacaaagaaaaaaaggaaatacaaaaaaagggagggcttactatttagagtaggaagctggaagcgcaaggttttagtgaacaacccttctcctcttccttaaacacctctcctctctagctctctctgcgttgctctacggcttcgtcgtgctctcgatttactctttccatctctgtgaagaagcaggttcttcctcaaaatcgctcaatgtatgatcgtattatctttctgccatgcatattaactgttgaatccttcgatttatttgcttgcaactatattgttttgtctatcgtctttgctctccgtttatcgctgggagctagtgattttctattatatctcaacgtttttagcagattccatcatcgtctttctcggagcagctctggtttgtttctaccactatttgatttatctgttaaattaaaaaaaaaaagtaaacgttgtcgtgtgttcttgttctatgaaaattttgatttgtattttccgagaaagactttctgttttttttttttgttccttggctgctctgtgatttttgtctttttggtttcaagaggtctctctctttcgcttcacgcacactcgctttttactagtggcctttcttatgtcataaatcttcatgtgcacgtagatctcttcattattctccatcttttaatgtttaatgtcttgattctgcctgtatgaggtgttttgatacactctgatggtttatatcattattctccaatcttttaacgctaatgggttttactttctaatgaactaatctgaacaaaatgtttttgcttgagcattcttgcgttcattctaatatcattgccataaacaattgtacattgcgtgctgtttttttctgatcttctgtttccctgcagatatgggttgtgataaaggaaaaggactaccacctcccccacctgtcgttccatccaaccttgtacctgaactggagcctataaaaaagaacactcttcttccaatggcccggagaggcagcgggaccaaaggagtgaagacacatcttcttaccaatcacttcagagtcaatttcaacaactcaaacggccatttttttcattacagtgtatgtacttgcttcctcatcttgtgtcctatttgtatcctgcgtttcctttattatataatttttaaatacttgtttggtgtgaatgttttttttttgtctctctgattattggatgcaggttgcgattacatatgaagatggtcgtccagtggaggccaaaggaattggcaggaagattcttgaaaaggttcaggagacgtatcgaactgatctaggatccaaatactttgcctatgatggcgagaagactttgttcaccgttggtgctcttcccagcaacaaactggatttctctgtcgttcttgaagacacatcttctagtaggtaggtgccacatttttcagtttctttcgacttgttttttaaattatcttttaccctatttgttcaaaaatttatgatgaaattgatactctttatttacaggaataacactggaaatgctagcccgaatgaatcaaatgacgcagacaggaaaagatcgaggcgaccaaatcgatccaagaagttcatggttgagataagctatgctgcaaggatccccatgcaagctattgcaagcgctcttcaaggaaaggaaacagattatcttcaagatgctataagagtgctcgatgttattctgcgccagagtgcagctaggcagggatgcctacttgttcgccagtcattttttcacaatgacgtccagaactttgtacacatcggtggaggtgtcactggtgtcagaggcttccactcaagtttcagaactactcagggaggcttgtccttgaatatcggtaaattctcgttttctgaaaatttaatgtgtattattagactcttctttgtaacattttggctgttaacacttgattttttattcggattcgatttttcttttagacacttcaactacgatggtagtacaaccaggccatgtcgttgatttccttcttgtaaatcagaatgtgaaagacccaaagtatcttgactggaataaggtacatcatgatcttcttattttgtactgatatttgagtagtactaatctgatttttttctcacatcaggctagacgtgctctcaagaatcttagagtacaggttgccccctcaaatagagaatacaagataactggactaagtgaagagcgctgccaagatcaaatgtatgtaatgatttgatgtttattttttaattatatgtttacatctctttgagtttttttttctaacatatatttctttgatgacataggtttactcggaattctaaaaacgagaagggggaagttgaggaagttcagactacagtatacaagtacttcaccgagtttcgcggtattccactgcgatattcaggtgactttccttgcatcaatgttggtaagccaaaacgcccaacattcattcctattgaggtaaattttagtgcattattgttatcttcttttgtattcttgaaatatttatgcacaggttatgctaatactagttgtttttttttttatattttcagcactgtgaacttgtgagtctacagcgttacacaaaatcgcttaatagtcttcagagggcttcactggtagaaaagtctaggcagaggccacctgaaaggatggcttcactaaccaatgtaggtcttctttctattatccttgagactgaatattttctgtttaattttggttttatgttattcatcttgaagggtctgaagaagagcaactataatgctgacctggtgttgcaagaaagtggtgtcagcattggctctagcttcactcaagtggagggacgtgttttaccagcaccaagggtatggcttaccttgcttctcttgcaagtaaacattgatcaagtaactccttttgaatcttgaaggttaaacgttagttatctgtccttgtctctaaacagctgaaagtaggcaatggagaggagtttcaacctcgcgatgggcgttggaacttcaattataaggtacataggttgtttatcttttcctcagttgatgaatatttaaacctttgatactagttgaatctttctttttgcagaaacttgttgagccagtcaccgttactaaatgggctgttgtgaacttctctgctcggtgtgatacaaataggcttatttctgacttgattagatgtggaaggatgaaaggaatcgtaagcgctcttatggatcattacttgcctatgtaaacttaatcatatatgcatcactctttttaattaattatacccttgtttttttgtttttctttcagaacgtagaagctccatacaaagtcgtatttcaagaagatcctaattataggggtgcaccagccaacatcagagtagaaaagatgttcgagcagatgcaatctgaactcagaaaaggaaaagaaggaaggccaaaattcattctttgcattcttgccgaaaagaaaaactctcttgtttatggtataactgtattctactattcttgaatatggtctctctcttcttttttttaataaactaatgaatgtaaatgtgaaatttttttctcggaattttccagggccttggaagaggagaaatcttgttgaagaaggaattgtgactcagtgtattgctcctacccccaaaataaatgatcagtatctcaccaatgttctcctcaagataaatgccaaggtgatcacttaaatttcaatcacttagaatttcaagattgattacaaagacattacaagaactgatttctttatgtcttatacgcagcttggtggactgaactccctgttagctatggagcgctcacgagcaatgatgcctttagtaacgcaagttcctaccttcattgttggcatggatgtatcccatggttcccctggacagtctgacataccatcatttgctgctgtaatattgattatcttttcttatgatgtcatccatatatagagagtttaagtctaactcttatctatttctggtaacttgatgtttttgttttgaaaccataggttgtgggatccatagaatggccacttatctcaaaatatagggcgtgtgtgcgcacacaatctcggaaagtggaaatgattgataatctcttcaaacccgccactaacgaaaagggagaacccgttgatgatggaattttcaggttaacttcctcgactttaaagttgcattcgcagtggcagagctttgtcattttcatgtaactttatgcccttttcagtgagctcttgtgggacttttacttaagctcgaagaagagaaaacctgagcacattatcattttcaggtatatttacatttattaagttatcatgtgaaagtagtataatgaatttttgttaactcttggtttattaatgtttacatgtagggatggtgtgagtgagtctcagttcaatcaagttcttaacattgaattggatcagatgatgcaggtatggattcttaggataaaatttattaagtgtatgttgttggacatttatgaacttggttattttcttgggttaggcatgcaagtttgttgaagaaaattgggaacccaagttcacagtgatcattgcccaaaagaaccaccacaccaagttcttccaggctgaaggccctggcaatgttcctccaggtaaaaatcttatttgacctgagaaatgattttcttttggtcattgtagttataatgacttgaaaaatgtttaccatttgacttgcaggaacgataattgatagcaagatttgtcacccacgcaacaatgacttctatctctgtgcccataatggaatgattgtaagtaaatagcctccttcaaaaccgctgcttatatgagacaaccacatgcctcatttctgttaaaaatcttctgctggaatccattatgaatcttgtttatgtatggaatgaaaattttatttattgatgttgatgttttagggaactacaaggccaacacattaccatgtgctctatgatgagattggattttcgacagatgacctccaagaacttgttcattctctatcctatgtgtaagcattacatcaccttttagctcttcatctgtttatggtgctagtaatgtctactaaacttgtctgatttgataactgtagctaccagaggagcaccactgccatctcagtcggtaaaattctcataacttttcaacatagctactggtgttagttcagatgcatcgctatacttgtttgttgcgactatcattattttttttttttctgaaaatatgtttgactactactgagtttgctgcttttcactatgtgcaataatctcaatgcatggtggttgcattatctcaaataccgttttgtttctcgcagttgcacctgtttgttatgctcatttggcggctgcacagatgggaaccgtgatgaagtttgaggacatgtctttgtctgagacatcattgacccatggcgggatcacaatacctggagcagtccctgtgccaccaatgccaaagttgaacgtgaatgttgcaagctccatgttcttctgctaa

SEQ ID NO: 338 - DNA, 6162 bp, Brassica rapa
  source 1..6162: mol_type = genomic DNA
ttaaagaccatcataaaaacacttgattcacgctgaaaatcaggacaccggtaccgcggtacgatacacctccaaaaacctataaaagaagaatgataagccaagaaaagtgatccagttctctcgatagcgaaaacgatagtgtttcaatacatatacttaaaaagattttgagttttcattttttaaatagtttcaaacataattttcgattttcaaaaagaaattttgaaaaaaaattcaaacaaaaaaactattataaaaagtttgaatatgaaaaattataattcgaaaacataaaaaatattttttatttatttaaataattatttattatatatatagagaataaatgtacaaaagttttttgtcatttaataaaaatgtccttttaatgatgataaaaatgaacaatgataccatgaaaatagtaaacatgaaattttctcaaatatgaataataaaaaataaggaaattttaactatgtttacatctaacaaatatattaaagtataaataatgatattatatataaaatatttttaattcttcaaaacatctctaactaatcaaagttatatcaaaataattgactactacattattaacacaaatgaaattaattaaataagtatactaaaaaaatgtttaagttagatgacattaaaacttataaattttgacaaacaaaccacctaaaatctctaatattaattaaagatacatatatatacttaaaaatatcgaattcagttttatttacccactcctaaattttaattttaaaatttttgtaaactactttcagttcaaattcaaattagtcaaatacaagtttggttcttttttactgatctcaattctaaattttttatctgggacagattaaattacccaaaaatggtatcattttaatttatttttttccgtcacgcggcgagacagttccctccattgttttgcctttttctggggaaaaaccctgagagagctgacgaagcgcagaagaaatgagctaatagtccccacacacacacagtgctcaaccctagaatccgccttcctgattcttcttccaaggtacacactcgacatttccacttttctctccgaccgattccgttgtcccggagagagatgagatgtttcgtgttcccgctcgtgatttctctcctcaggcaaaatttcgctcgctgttgttgatttagagctagggttttactcttttgtccttgagaaacacacaccttgcatgccgcagcagttgaatcgactgagtgagactatctcttgtgtaaatgtttactcaaataaagtattgaatccgagcttaaaaaggaacaatttttatcatagatctagggaatgcaggtctgttggtttcaatctgtgactgtttctgtttagttatttttagttaatagtatattcattgcttgcttgcttgcagcagcttatctatgatactactaacttgcagattattcttcccaagaaagatgcctgtaacgccagaagaaccgagccgtcgagattatgcggtcacagctaggcttggggttggaagcacaggcaggagaatacagttgtgcaccaatcacttcaatgtctctgttggacagccggatgttgttttctaccagtacactgtgagatttgttctgtcacttttctgttatcagtgaatgtgtgtgtatgagatgtgtgacaagcccatgcctttcttttgcaggttagtatcaccacagaagacggtgagaatgtccaagggaaaggaattggcaggaaacttattgaccaactttacaagacttactcttctgatcttgatggtaaaaggttggccttcgatggagagaagactttgtataccgttggtcctctcccacagaacgactttgactttcaagtcatcttggaagcttctttttccaaacggtatagtcctcacctcttatctcgcgttatttttagtgtacaaggtagatcttatagaccgccagccttgttaatattgtagtgactgtggcgtctctgatggtggtagtccttctggttcttccaagagatcaaagcgctctttcctgccaagaagttacagggtccaaatccacttttcagcaaaaatacccttaaggagtgttcttgccactcagagaggagttgacacatcagataacagcactcaggatgcagttagagtgcttgacattgtactgagacagcaagcagctgaaaggtgcattgtcctatctgtttgcatgtgcattgtatgttttcattgaaaaagatactttctacattctaatggacgaattttacttcattttgttggtatatatgcagttattacatcttgtgaccatgatagattcttactgtagaaccatttactatgcagggggtgcctgttagtcagacaggcatttttccttaacgatgtgaactctgttgatgttgggggaggcgtaatagggattcgaggtttccattccagctttcgtccaaccgatggaggactctcgcttaacattggtatttttctttttaccttccttctcatatcaatgtttcatgaactgttctttatcattgaatagtttcaataattccccaaacttttttcgttttgcaatggtttgcagacgtgtcaacgactatgatcttaaaaccaggtccagttatcgaatttctgaaagccaatcagaatgttgagttgcctagacagatcgactggattaaggtagttttggttttaaaatgcaataactgagaacatgccatgttgcttttagtttgaactcttatttctcattgaaccatggcaggccagcaaagtgcttaaaaatctgagggtaaaggcatcacaccgtaacatggaattcaaaattataggtctaagtgcgaaaccgtgcaatcagcagctgtatgttccccatgacctgtttcgtatataaatgtatcctcttttcagactttgtttgactttcttcatcgttttccagatttacaatgaaaattaaagatggcgagtgtgaaggacagactaaagagattactgtgtatgagtattttaagcaaacttacacagagcctacttattctgcgtacttgccatgccttgatgtcggcaagccagatcgccccaactatcttccactggaggtatgcacctccagcagtttttcctttatttaattttggtcaagtcttatatactacttctgttttgtttttttgtatatttcaatttgacaatttctattcgttttcttgcagttctgtaatcttgtatctctgcaacgttacacaaaagcattgtcagtgaggcaaagagctttacttgttgaaaagtcaagacaaaaacccctagagagaattaaagcactcaatgatgtgagcttagtttttatctttatctattttggatggtaaatcattgctaatggctatgaattgcaggcaatgcacacctactgctatgataaagatccgtttttagccggaagcggcatatctattgaaaaacaaatgactctagctgaaggccgggttctaaatcccccaacggtaaaactatttatgatttttttgtgcatagaaaggttatgcactgccatgcacactctagtgaattgtttaatattcttacacccatgttgttttgtttgtatatatacagctgaagtttggaaagaatgaggattttttacctagcaacggacgctggaactttaacaagaaggtagatgtctgctaagattttcgttcatcatatatacatacttgtggattggcagagcgttcttatctctttatgatttggattgaacttgttattcccgaattagcacgttaaacttttctattttacccccttgtttcttgctttgcagatgcttatagaaccaagggctattaagaactgggctgtagtcaacttttcttttccatgcgacagtagtcacatttcccgtgagctcataagctgtggcatgaggaaaggcattgtaggttccgcagatactgtctccattttcgaatagtgttgaactatatctggtcatttacagagtctgagttttggtttgtttaaccatgtaggaaattgatcgaccttttgcactagttgaagaggaaccccagtctaaaaacttgagtgctgttaaaagggtagagaaaatgattgcaaagatgaagtcgaaatttccaatcgatcctcctcatttcattctctgtgtcttgccagaacggaagaactcagatatctatggtatcatctcgccttttctgtgtgaattttaagtttcagctctctagtttaaacttgtttttgcaaattataaaggtccctggaagaaggtttgtctcactgaagcagggatcaacacgcaatgcatctgccctacgaagatcaatgaccaatatctcaccaatgtacttctgaagataaattctaaggtataccaccacctaagctagaaccctatgctggagtcttctccgtaaatttacttcttttattgtcttaatctagcttggcggcataaattctctgttgggaatggagtgctcttccaacattccattgattaacaaaattcccaccttaatcttgggtatggatgtatctcatgggtctccaggtcgtgcagatgttccttcgatagcagcggtattgctgcattcttacgttccttgtcctttgtttgcccattgtgtctggttctcttaggatcttgattgctcttcttcatgtctcgatctgtgctgcaaggttgttggttcaaaaaactggcccttgatctcaaggtacagggcagctgtgagaactcagtcaccaaaaatggagatgattgattcgctcttccaaccagtcgaggaccctgtgaacggagacaacggtatcatgaagtatgtgaatgctatttagtcagctctattgttttgtttttgttaaatcaagaagcaaccagttatcaaaagatatttaagtgtcttctctttctctatgactatgttgccaacagcgaattgtttgtggaatttttcaagacaagcaacgcacgaaagcctaagcagattatcatattcaggtatactagtttatcttcaacgtttaacttccagtatccaaaagttttgttcttacacaatcatgtgcatgtttgttagggatggagtaagtgaatcacagttcaaccaagtcttgaacattgaggtggatcagattataaaggtcatgtttcaaagctccttgtccggttctggcttctatcaaattatgttttcaaatatgtgtctagtgaaagtattatactgaacagtttgcttattgaacatgatgcaggcgtatcaacgtcttggtgaaaccgatgtgccgaaattcactgtcatcgtggctcagaaaagacaccacacgaagttgtttcaagccaagggtcatgaaaatgttcctgcaggtaaagcggatacttttttttttttatcttctgcatcagtcactacgatttcaaatttggtttcggaactctttcttcatagaaaaagacacctctgtttgtcaggaaccgttgtggacaccaagattgtacatccgaccaactacgatttttacatgtgtgctcatgcagggataatagtaagttttagacttttttaaccttttaaaaggttcactcctcgctgcatatgtttatgtttcaccttggcgatccctcagggaacttcaagaccagctcactatcatgttttgctggatgagattggtttctctccggatgagttgcagaatctcatccattctctctcctatgtgtaagtctctctactccctcatctgcattattgattccattttactattattaagatcttcttttatcattggtccagcaaccagcggagcacaactgcaacctcaattggtaatacactttcctaatcaaactctcttctattttttatcttcgaattgcttctcaatattcgatgtgtcctctctctttgtgtgtttgttttcagtggctccagttagatacgctcatctcgcagcagctcaatttgcgcagttcacaaagtttgaagatatatcggaagagaaagtcccggagcttccacgtttgcacgagagagtcgaaagcaacatgttcttctgctga

SEQ ID NO: 339 - DNA, 6256 bp, Brassica rapa
  source 1..6256: mol_type = genomic DNA
aatcacatcagagctacactcaatccacaagtgatgcaatccgaatcacaatactgatccaccacatttcatctctagccagaaaaattacactaaatcacccaaccatctacatggtaagaagtgacattgtccacaggacaaaaaaaaaaaaacgaagactcatcagagctaaaatcaattcaccactaatgcaaaactaatcacaagacaagatttggctactagaaacacagaaacgatgcgagattatccaaggagaaccacaagcactacatttcatctctaaaccatctacataaacacgcaaagtgattgacattgtcccatacaactcactcaaaccaaggaagctgatccaaacagagggctgatcaaaatcgagactttgaatcataattaaggaaaccaaggcagacccattagcaatcaagtggtcatagactcggaacagaccagtgaaccacactagaagtataaaggagagaactttgaccttccccttgtgccaattctaatcacaagacaagatttggctactagaaacacaaaaaaaaacaaagcagagactggcataacacgtcaagtgattgacactgtccactttaactcactcaaccccaggaagctgatccaaacagaggactgataaaaatcgagactttgaatcagcatttaggaaaccaaggctaacccattaccattcaagcattcacagattcagtgaacgacacgagaagcaataaagagagaaacttttaccttccccttgtaccaattctgatgatagcagttcgtttcttctcttccatagcaacacaagctcttacaaacccggaagagctccgtttccggcgacatttttccagagaaggagatgtgacctgcggaagcgagaatccgataacggagacagagttgaccgggaaagagggttgacgacgcaagagagagactttgttgtgagcttgatggaaagaggaagaagatatatccatggatcccgcgaagagctcagagaagtaaggtttggaatcgttgagagagattccgagggaaaaaatgaaagtgaccttcgaaattcgaatggagaattgatagctcttcttctgatctctacgaagattttggataggatagtttagattttactgatgtaatctcctacggtaacccataccagagttacgtggtctaatacgtttcccaccgtccatttttcaaatctcgttgactcatacttattgggcacgcgaacgtttaattatttaatgggcctaagcccaatttatggactcttataagtgtataggaacctttttcaccgtctgtttatcaatctcgtggacctattattattgggcctaactaaaacgtaacagctagtccaaatcagactgttctcgggtcgggtcgggtcgggtcgggtcataatagtcggtcatcgttgttaataaaagattaggacacgaaacggattgaaatggttgctacgagacgatgtcgtaccttctgcctcacttgcattccgggtggtctattgatcaggcgattctagccgaggaagagcgtctcgtggtcattcgtttcggccatgattgggatgaaacctgtatacaggtatagtttcttccatcttcaatttgattcgatttgggttccttaatttcgaattagggatctgattttgatttttgattttacttggatgaagtgtgactctcttccttgtacgtgagagcattaatttgcattgcatgggtcgacacaaaaccaagtttacatctgaaaatgatgtaattcaatgtagctcatgtttcaatgtatatctgaaacagactaatttttttttccacagtatgaaatatcaactctcgatgtggatcttgattttttttattttagatagatgaagtcttttgctctcttccttgtacgtaagagcattaagttcatagctgctagttcatcattcaaggtatgaatgaaacatacatttttattttatttttgacataggaatattaactctttattaactcttcctcatcttcctcttcctattcttcttcctaatcttcctcttcctcacatcgacatggatagggattatagctataatgaatctagcgataatgagtctagcacatgtgaatcagcaaaggggaatcgccttttgtactcactgcctcctcgtccggggtttggaacaaacgttcgcataataccgcttgtgtctaaccatttccaagtcactcttgccaatcttccggaatatttctaccgatacagggtaggttttcatttcatctatttttttgttttcagttttcaatgatgtataatcttgctgtcttgaacaagtaaatttcgtccataatggtgggcgcagccctattgatcagaaagggattggaatagaactcattgacctggttcacagggtttatgactccgattttgttggcatagagtttatctatgatggagaccacatggtgttcacattgggttctttgcccgataggcataatgattttcctgcggttcttgggatgaattcttcaaccatgtaaaagttatcaatcactttcgcccttcacttgagtgctttagttttgattctgactgacaaattatatctcatgcaggactaaccctctcaagtcagttgaagtctcgttcaacgctgctcgcaatctcgaaatccctcttcagtctcttgttaacgctatgcatggacaagaatccccgaattcactggaggcaataagggttttcgacatcatcttacatcagcatgctgctagacagtaagtgtgtatatgttttctttcatgatactattatatctttggcattgtctctctaataataacctcggggaaaacactgcaggggttccctacgtgtgagacggtcttttttccacaatgaaagccgcgaaccaattggtcctaacatcttgggatatagaggattccattcaagttttcggacaacgcagggtggaatgtcacttaacatgggtaaatagtttcacctgtttgtatttgttttctctttgtagcagtaatttttagtgtctaatgttttgttttgttctcatgccagacgttaaaaccacaacggtcatcaagcctggtccgcttattgattttctgattgctgaccaaggtgcacgcgatgtgttcgatgtcgactggtctaagatgatcgactaatactaattacatgatatttggtctaaccaggttcttttatcttcgctattagctccaacttttgacaccgtttaattatttaatgggcctaggctcaatttatcgactcttataaatgtatgggaacctttttcaccgtctgtttatcaatctcgtggacccattattattgggcctaactaaaacgtaccagctagtccaaatcagtctgttctcgggtcgggtcgggtcataatagtcagtcatcgtcgttaataaaagattagggcacaaaacggattgaaatggttgctacgagacgatgtcgtaccttctacctcacttgcattccgggcgggctgttgatcaggcgattctagccgcggaagagcgtctcgtggtcatacgtttcggccatgattgggatgaaacctgtatgcaggtatagtttctttcatcttcaatttgattcgatttgggttccttaatttcgaattagggatctgattttgatttttgattttacttggatgaagtgtgactctcttccttgtacgtgagagcattaatttgcattgcatgggtcgacacaaaaccaagtttacatctgataatgatgtaattcaatgtagctcatgtttcaatgtatgtctgaaacagactaatttttttccacagtatgaaatatcaactctcgatgttgatcatgattttttttattttagatggatgaagtgttttgctctcttccttgtacgtgagagcattaagttcatagctgctagctcctcattcaagatatgaatgaaacagacatttttattttatttttgacataggaatatcaactatttattaactcttcctcatcttcctcttcctattcttcttcctcatcttcctcttcctcacatcgacatggatatggattatagctataatgaagctagcgataatgagtctagcacatgtgaatcagcaaaggggaatcgccttttgtactcactgcctcctcatccggggtttggaacaaacggtcgcataataccgcttgtgtctatccattttcaagtcactcttgccaatcttccggaatatttctaccgatacagggtaggttttcattttatctattttttgtttacagttttcaatgatgtataatcttgctgtcttgaacaggtaaatttcgtccataatgttgggtgcagccctattgatcagaaagggcttggaggagaactcattgacctggttcacagggtttatgactccgattttgttggcatagagtttatctatgatggagaccacatggtgtttacgttgggttctttgcccgataggcataatgattttcctgcggttcttgggatgaatttttcaaccatgtaaaagttatcaatcactttcgtccttcacttgagtgctttagttttgattctgactgacaaattatatctcatgcaggactaaccctctcaagtcagttgaagtctcgttcaacgctgctcgcaatctcgaaatccctcttcagtctcttgttaacgctatgcgtgggcaggaatccccgaattcactggaggcaataagggttttggacatcatcttacatcagcatgctgctagacagtaagtgtgtatatgttttctttcatgatactattatatctttggcattgtctctctaataataacctcggggaaaacactgcaggggttccctacgtgtgagacggtcttttttccacaatgaaagccgcgaaccaattgatcctaacatcttgggatgtagaggattccattcaagttttcggacaacgcagggtggaatgtcacttaacatgggtaaatagtttcacctgtttgtatttgttttctctttgtagcagtaatttttagtgtctaatgttttgttttgttctcatgccagacgctaaaaccacaacggtcatcaagcctggtccgcttagtgattttctgattgctgaccaaggtgcacgtgatgtgttcgatgtcgactggtctaaggtgatcgactaatactaattacatgatatttggtctaactaggttcctttatcttcgctattagcttcaacttttgacaccgtttaattatttaatgggcctaggctcaatttatggactcttataagtgtatgggaacctttttcaccgtctgattatcaatctcgtggacccactattattgggcctaactaaaacgtaacagctagtccaaatcagtctgttctcgggtcgggtcgggtcataatagtcggtcatcgtcgtttataaaagattagggcacgaaacggattgaaatggttgctacgagacgatgtcgtaccttctactcacttgcattccgggtgggctgttgatcaggcgattctaaccgaggaagagcgtctcgtggtcatacgtttcggccctgattgggatgaaacctgtatgcaggtatagtttcttccatcttcaatttgattctattttgattccttaatttcgaatatcatatactctcgttctattaagttacgatcttttgtttcgattgcttgaaagttttaagccattagtgttttctttagcttggaaccgatgagaattaggggtttattgtgtgctcgtgttgttgtttgattcattatttgtttacatttagttttaagccattaatgtgttgtttagcttgtgctactgttgtggtctgattaaatgattttgatctgatgttagatggatgaggtgttggcatcagttgctgagacgataaagaactttgcggttatatatctggtggacataagtgaggttccagacttcaacaccatgtacgagctctacgatcctttaaccatcatgttcttcttcaggaacaaagacattatgatcgatctcgggacgggtacaacaacaagattaattgggctatgaaggacaaacatgagtttattgatatcattgagaccgtcttccgtggtgcaaggaagggtcgtaggctcgtgattgctcctaaagattactccaccaaataccgctactaa

SEQ ID NO: 340 - DNA, 5894 bp, Brassica rapa
  source 1..5894: mol_type = genomic DNA
acttattttttaatcgacatatttatttgtaatgttagacttattttcttacggcaaatttatatgaccgatttaaaattattggcagacttcttatttatgtgatgatagactttttaatttatgttttgacagatttattgacgaaaaacttggtttatacaaaaatataagagttattctagtaattagatatataattagagtcatgttgagtaatttctcattttattatgatttattcttggattcatcttctaggatgaatttctaagttcaccaatataattttattatttcatattcgatatctcttaaaaaaactaaatattgtcaaattatattatatttttaaaaataaaaaggtaagaaaataaaaaaaaatagtagtagttacaaaagaaaaagaatttaaaaaaaatatttttaacgtaatcagcaaaacactaaaccctaaaccgtaaatcctaaacttttaggtaaaccttaagctcctggataaaccctaaacccttggagaaaccttaacccattggataaatcctaaattttaaatttaataaaacagtgtagtgtgttattggtttatatattttgattgatttagaaatctatatagtatttataaatccaagtaaaatatgcaaatctggaggttttccttcggatttgagttaatactaaaacactcaagggtttagggtttaatgttttggtgtttttgatttagagtttatgatttatccaatgatttaggatttatccgaggatttaggatttagattagtgttttgccgacgacgttaaaaatattttaaatattttttttgtaactactattaatttttaattatttttatttattttaaaaacataatataactggataatattttgtttcattttctaaaagatattaaatataacctctgttctctatatagggggggggggggaatccaagattagcacttttattattcattagtctttgtgttgtagtaaatgctttctttgttttaaaaaaatagtttttaaaatattacgattattatttatttgacaagtcgtggagattggtattccttaggtttaggaagcaaagatccactttccccatttaccttctgtttaggactaatttaatcatggtgataattgattctctacgtgtttttgtaaattataatgacgtaaagaaaacaaaagaaggaaagatatatttttggttcaaagggaggaaagatatatttttgggttcaaaaagaggaaataaatatttttaaatacattatgaacaaggaaggtggaaaaggtgggggaatgtggcccaaaattttaaattcatttgaaaaaaaaaataataatcgaagaatttagcgcttctttcatttaaatacttccccacaagtggtttttcatcttttctcatcttccatcacttcttcaggtctcactcgtctcatctcccccttccttcagatttctccggctctaatcatggctccaaagcgtaaggttccttcaactgaggttgagatctccggtcccacctcaactaggccgaagataagtcccaaagcgccggtagaagttgctgctgagccaatacgttcccgacctaagttcaaggtagagttggtggtggactccaagaaggatccgtcctgggttctagatgagccgattgctgattcggaggctaggactacgtggcccgagaggtatcaagtcatccaggtatatgctcagatctatacatttactctttctttaaacttctgaaactgatgaaattttatattttctgtagaagaaggaagtcgtacctttaccgaagaagaaaaagaaaaagtaaattctcgaatccttttgcttctagtggctggttagctttagagatctatgtgtaactaactccattcaattttttcttttaggtatgttgaggaagaggagattttccttgcgcgacgccattttcgacgagccatccttgatgattccatcacatacaacctctacgatgatgctcatgtgcaggttaatctctaaacaacctcaacgatgacgagctgtacatttacatccatcattacattcttcagtctcagaacttgttatcaattaaactgtgccctaactaactaaggatgagatcttatttgaacaatagcttaattaattgattgttatataaactaattatgcattgactgaacctctctttcagtcttctgttataaaggatataacatacgtaacttgtgtttgtatattaaacataattatttttttgttgttcagtctgaagaggacgaaaagcctttcatttgcaagatcgccgaaatctttgaaggatgtgatggcaaaatgtactttactgctcaatggttttaccgtgcgtgtgataccgtaagcatcagaatctattactttcgagcatttaatatatctaaatgctgaatcatctgattttgtcattttcttaacttttaggtgatccaaaaacacgaagaaatgatcgatgacaaacgtgtttttatctcggacataaaagatgtaaactcaatgggggttcttctcaacaaattgaagattctgatgatcccgttaacggtacgttcttatttcatgtatagcctcttgtcatgcaccatgcatttttcttcattgatttcattaatatttgctttcttttctgatgctaggaaaatactgaagtgactgaaagctgtgattactactgcaacatgaaatatcacctgcctttttcaacacttgaagctttgcaatcaagtcagtgtattacgcctaatcaacgaacggatgctacaatgttagacttgtattgtgggtgtggagccatgtcaactggcctatgcatgggagctcagctgtcagggctgaatcttgtcacggtgagcattttttttcttgctattttaatgcgttaataacttttcattgttgtagttagcatctctttgatgtttaacctttgttttgttttgttttgttttatgatttctcaagaaatgggctgttgacacatgcgagtatgctgttcaaagcataaagtataaccacccggaaacagaagtaagttcttcttttttattatatctctgttattgtctttattttagcctttgtcttctgtgtttatgttcagttggtcaattcgctgtttaggtgagaaacgagtccgcagaagattttctgtatctgctcaaggagtgggagaaattatgcattcatttctctttgatcgaatctgcggattcagaaaaatacgaaaacctttatgggatgtccgctgtggaagaggttaaagatggcagcgatgagagtgacgtcaaagatggtggagaggtttttgaagttgaaaagattgttggtattaagaaagaggaaggaggtagactccatctaaaggtatcgtttgttaaatgtttcacatcttaccatctgattaaaacctcacaatcaaaatcatctttggtgtttttggtataacaggtccggtgggagaactatgggccttcccatgacacatgggaacctattgaaaatcttaggtgagtaaaacatagtaaacttgtagcaattgtttgcaatctaatgatattcttcaatgagttgttaacgtgtctgaatttgtttgtgaacagcaattgccgtaagaaaattaaagagttcgttgtgcatggatttaaaacaagcatccttccattaccagtaagtaactagttttaactttatctgaatcttatttgtatttttctgcttaattacttatttgtgtgacacttatgcctaattaatttcagggaggagtcgatgttgtttgtggaggtcctccatgccaagggattagcggttacaacagattcaggaacgaaaaagagccgctaaaagacaaaaagaacgagcagcttcttgaatacatgaaaattgtggagtttctgaagcccaagtatgttctgatggagaatgtggtagatatgcttaggtttgttgatggctttcttgcgcgctatgctgtgggacgtcttgtccaaatgaattatcagacaagaatgggaatgatggcggcagggtcgtatggccttgctcagttccggaggcggttcttcttgtggggtgcaatgtctagcgaggtaatgcttatttatttctactcttctttgtttggtatcaagaaatagacgaagcaattaatttcttgtatctttttgtttgtttgtttcagacgcttcctcagttcccacttccgactcatgatgctgtcaatagaggacatgttcctgtgaactttcatgtaagcggtatatatttagtactgttgaatgtagctagcaaattcttaatagttttattcagtgagctcggcttatgattgatgcagagtaacgtagtggcctatgaagaaacagacaatgtgaagttggcggataagatcctactctcagatgtccttaccgaccttccagttgtaagtctttctttgtgttatatctttaactaaatagtagctaaacattgttggtggtgttcctgatttattaatgttctctatggttttaggttgcaaacaatgagaggagggcggagatgccatatgacaaagatcctaagacgccatttcaaaaatttatcagattgacgcaagaaggtaagattcttatctctcttcaaggtaacgatgtaaaacatagatatgaagagtattattaaaactggaagatgtctccccttttttcaacaggaatgttagcttcacctaaagatcccaagtcaaactccaaaaatgaggtgttgtacgatcaccatcctttgaatcttaacaaagatgattatcaacgtgtctgtaggatccccaagaaaaaggtagagcatcttcacactccttgctcacattttttttcttctatcttttggtctttgttttaatgttgtactgtttctggtattagcaagcgaatttcagggacttacctggtgtaactgttaatgctaataacaaagttgaatgggatcctaaaatccccaggatctatcttgaatccaatcaccccttggtaatacactgatcatctcgtttctttctttctttctttatctatcaatcttgctctctcttcattgccttttaagagacattgtcttgtgctatccaaacagattccagagtatgccatgaaatttgtcgagggaaaatcaaagaagtgagtccttgatttccacagtcattcttctctctccagattctggatttggcatatatgttttcgagttattaaatcacctgaaccattttcctttgcagaccctttggacggctttggtgggatgaaactgtcccaactgttatcggaagagccgagccacacaatcatgtcagtctttctttcggtcttgaaaccctctcgatcaggagaatgaaataactcattaattcatctgaaaatgctgggctgtgcatctaatctatggaaacaattttaaaatagtattcactgttaatgctgcttgatatgattacaggtgatcatccacccaaaccaagaccgtgtcttgactgtgcgagagaacgcaaggctccagggcttccctgattactatagactatttggccctaccaagaaaaagtaagtcactgtcctgattattatagattgttactagaactctcccatatttcttgaaataagtaaaatcttacatacctatctataatgttgtcaaggtacactcaagttgggaatgctgttgcagtaccagtggctagggcacttggatacgcattaggacaagctttccaaggcctcactaatggtagtgatccactcttcactctgcccgaaggttttccaaaaccaaccttctga

SEQ ID NO: 341 - DNA, 7908 bp, Brassica rapa
  source 1..7908: mol_type = genomic DNA
gtatcttgttcattttgcttggtattgaattttaaactattagttgttatttattttcaatcgtacttttttttatttttacttggtaaattaaacaattaagtgtaaaatattggagtattttgtttagattgggtgtgttttattaaactatactataaaatttgtgtgatctttagagataagcattacttggttggcaagtttttttggaagataattacgtgattgcgttaattctttgatcccttttttaaatgctgactgcgtacaattaggaaacaatattctttgttgatttgttttttaataatcgtaaatttatgagtcgtttttggaatattttctcatatggaaggaaataagtttgagggcaattgtcaataatagcacctttgaagtttatgtctcaaaaatagcagtagaaggagaaagtcacaaaaatgacattcattaaagggtaaaatatccctaatacccttttaaaaataatttttgaaactgttttataaatttttattttttattttagtattttttttttataaaattttaaaccctaataccaaaacccccaccccttaactctaaaccctaaggtttggattaattaacccaaggggtataagtgtatatttacctctttaatgaaacctatttttgtgactttgagccttgagtgctactttgggaacataaacttggtttagtgctattctagtctttttctctaagtttaattaggtacgcttttatatgcaaaatcttaactaatatgatatttaaggagcatattatatgcatatacaaaaaataccaaattgataaacaataaaaaatatttgactttgggaaccaaaatctaaaccataaaacaaccagaccgtacctttattataaaattaatatactaaatgttggtaagcatagtcataaaaaatattattcactgtttatatcatgcatatgtaatagaaaacgtgaatataatggtgtagatacgttttgatatgaaagatattttgtaaatatatgttcaatcgattggtttgcaacgggttaacagattttaaaacatttggttattgattttttgtgttcggctgataaaattctaaatttagcattgatttgggtaattaacaatttgtaagcccaaaacaatattgtgggtgagtaagaaagatgaaaaggcaaaaatgtttcagaaaaaaagaagtaaaatgacagaatttgatggcagtggcataaagatgtaatttttgtgcaactctaaggagtaattactgtttgtacttctgccttaatagtttagataatcaaaaccatcatgtaaaaaggaagaagagagagagagaaataaaaccctcattcacaactctaaccccccttggatcaaacatagtacacttgctagtggcaggacgaaagaaagagaatcgcctttttattggtctcttcgaagaagaatctctctacccttctctttctccgttttccatggaaggagacgaacctcgtggaggaggaagcgattctctttctgtcaagaggaaattctatgaaatcgatgaagattcttctcctatgaacgggtatcttctctcttcctagttgcttttgggtcttgttcactaaagccttttcctttgcagcagttccgagttgtacgaggttgcacagaccaggaacactattgctcttctggaaacaggagttgataagtttggggtaatcaacttgcttataaaacccattccttcttctgattcccccaaaagattcatcatttgcttggcccctactgtcaatctcgtcaaacaggcaactccctttctctactctttatttgattgatttcttctctgtaacaagattgtttgttttcttttttccctatggatttagcattgctgtgagattagagcacatttaaatctgaaggttgaagactactatggagctaaaggagttgataagtggacatcacaccgctgggaagaggaactttttaagaacgaggcaagttatatgctaacaactgatctcactaacagctatcacatacactttgtctgttgcctaacccagttgatctgtctattaccttttttgtctggttcaggttctagttatgactcctcaaatatttctagatgcccttagaggtggattcctgaaagtagagatggtacgccttcttgtaatagatgaatgccaccgcaccactggcaatcatccttatgcaatgattatgaaggtagtgctttctcatttgtattttcggtaaccagagtcagtcaataaactattatcttcctgctttgcgtgaaggagttctatcacaaagctacagacaaaccgaggatgtttggattgactacgacagccgccattagaaaaggcatgctatttcgagtttcctctttacgtaactgttttgttaatgttcctcattgaactgtgcagatcaagtatcagaactggagaacctcatggactcgcaggtactttgtttattgtgtaaaaaaagaaaagaaatgtgtactcgttcacaaaatgcaagatttactttggaaatttcagatttttaatcctcaagggcagaaaggggtggacaagtttgttacaaaagtgaaagaaggtccagtattttatgacccagcacctttatgccgtctggaactgaaagataagttgcgaacttcacacctcaaggtaatattatatgctcactgattatgagccagagctttgctctttcctattatctttcacaaggtttgaaaaggttgtatcttgttccacagtttgatgcttctctgttaagtcttcttcaagaactggaaaaaggcaattgtcaggacgtggaggagaataagtttaaggcatatcaaaagcgactgtccgctgactaccacgatattttgcattgccttgatagtcttggcctcatttgcgcacatttggtattctttctgtcacatacgaccacgccacatataatattctgtgatgaattaacatatatattttaaaaatcttgccttcatttaaaggcggctgaaatctgcttggagaaaatctcggaaaccgaaacttataacgaatgctcaatggtgtgcaaggagtttcttagtgatgttttatccacacttgggctgtttttgcagaaaggtacggtattagaagctctttttgcattgaggcttcgaaatcactaatttaatcttttgtgtgatttaaaagaagaaaagaattcggtagatttgccgcaagacaatccgtcagcagtgatttcgggacttgtatctcccaagttacaagaacttttccatctattggattcattgaggtaacttatatattgtatttttttttcaattcccaaaattgcaacaaaggctcattctgttctgacgattttaattcgcttacagaggtgaaatgcaaaagccatgccttattatagttgagagaatcataactgcagaagtgatcgaaagatacgtgaagaaacaagcctctttaggttacctttacgtcttatctttaatcggaaacaacgcctctacccaagcattggcacagaaaatgcaagattcatttcatgttggcaaggttacatgttctttatcaccgtagacggttaacagattgaagttatattatgttttctctgaaagctttttgttttttttaaatggatgcaggtaaatcttgtatttatcactgacgtggtcgaagaagggtttcacatgccagattgctcatgcatggtatgttttgacctgcccaaaacagtgtgtagttactcgcagtctcaagaactggccaaacagagtaactctaagtctatcatgtttcttgaaaggtaggagagagtcttggttaacagaacgtgtttgctgaaacccaatgccctcttttgcatctcagtttttccatacaaaaattttgtagggggaaccccagccaaagagatcatctgtatgaccttatgcgaagacaagtaccaaaagaaactccaaaccaagcgaattgtcaggacttgaaagagaacggagccacggttcatgatgaaccagcgccaaaagagcagtcggctaataaaaggttacgtcaactgcaagtgttggataagaatctgctacaatgcagcgccaaagagaaggccccctcttctaaaagtaaatcatctgcgtcggctgcaggtatgtgtcacacatcagcagatgcacatcatacgaggtcatggcgtttctcttgatgttcttatataattctattctttggacaggttccaaaaagcggaaggagttgcacgggacaacccgtgcaaacgcattgtcaggaatctggggagaaaatcttgatggtgccatctttcaggcttataagttggacttctggagtaatatctctggggacgcgtactctagtttctctcttctgattgagtcaacccttgccgatgatgttggaaatgtcgagatgagcctttacttggtcaggaagtatataaaggcttctgtttcacattgtggccagatacgtttgagtcacgaagaggtacctcccacactctggtctatgggatatttatacagtttcttgtttatattcttcaaattttatgtcttgcgaaaacatgcagatagtcaaagcaaagtgttttcagcaatttttcttcaatggcatgtttggaaagttgtttgttggatccaagtcactgggaacaaagagagaatttttgcttcaaactgacacaagttctctttggcatccttccttcatgtttttaatgctaccggttgagaccggtgatctagtttcgagtgcgacggttgattggtcagcgatcaactcctgtgcctgtgtagttgatttcttgaagaaaaatccccttctagaacttcaggttggtgaagaaaatcattgcaacacctcatccggtcaggaagggacacaaaagaaagaaacggaaacgaatctgattcattttgccaacgctttgtctgataaaaatagcatcgaagaaattgtggtcattgcgattcacaccggaaggatatactctatagttgaagccgtcaaagattcttctgctatgagcccgtttgaggacgaggcctcattagaatatgctacttatgcagaatattttaataaaaagtaagtcatattcttatctatggatcttctctcagtaaatcttccgtaacttatagcgtcatttctcttcaatcaggtatgggattgtattggcgcacccgaaccagccattgttgaagttgaagcagagtcaccatgcgcacaacctcttagtcaacttcagtgacgaaggtaagttgagtcttcctctagatattgtaatgtacaagctcttaaagatgttgtttcctaaatgtaaatggacagtgattgagaagaaagaaccaaacgttagtaatgttagaaaaacaaaacccaacatccacgctcatttgcctccggagcttttggttagaattgacgtgccacgttctgtgacaaaatcaatctacttactaccatcagtgatgcaccgcctagagtctctaatgttggccagccaacttagagaagagattgattgtagcatcgataacttcagtatatctagtacatcggtatggttttccacactatttataatttagagtggaaactaactgtcaaacgaaatattgtatttgattcaatgaatcaggttcttgaagcacttacaacacttacatccgctgaagcgttttccatggaacgtttggaactgcttggggattcagtcttgaagtatgttgtgagttgttctctataccttaagtatcctaacaaagacgagggacaactttcgcgtgagaggcaatcgattatatctaactcgaatcttcaccgcttggctacagatcgcaaactgcaggtatctctatgtaagtaatgtaatttgaatcattctgaaaactaaagatctattggtttttacagggatacataagaaacggcgcctttgaaccgcgtcggtggaccgcacctggtcaatgttctctctttcccgttccttgcaagtgtgggattgatagtagagaagtaccgttggagccaagattctttacagagaacatgactataaaaattggcaagtcctgtgacatgggtcatagatggacggtttcaaaatctgtatcagattgcgctgaggccctgattggtgcctattacgtcagcggtggattgactgcggctcttcacatgatgaaatggcttggctttgacgttgaatttgacagagaactagtgaatgaagccatcaatagagtttctctacggtgttacatccctaaagacgatgagcttacggagttggagacaaagatccgacgtgaattctcttcaaagtttcttttgaaagaggctatcacacactcatctgttcatgaatcctactcctacgaggtctggcttcattctttcaatcctgcatttttctaatctcatgcttgctatcaacttgttgttcctcaaacagagattggagtttcttggcgattccgtgcttgattttctaatcacccgacatctctttaacacctacgaaaagacagggcctggagagatgactgatcttcgatctgcgtgtgtaaacaacgaaaatttcgcgcaagttgcagtgaaaaataatctgcatacccaccttcagcgctgtgcaacggttcttgagactcagataaaagagtatctgatgtccttttcagagccagatgagactggtagaacaatcccttcaatgcaaggccctaaggtgcatgaccgtttaaatatccatgcttgagtgatttcagatattaaaataaaaagaataaggttgacaaactttgtctgtttcggtttaggctcttggggacgtggtggagagtatcgctggagcattgctgatcgatacaaggttagatcttgaagaagtgtggagagtctttgagccgttgctttctccacttgtgacacctgataaacttcagcttcctccataccgagagctcaatgagctgtgcgactctctcgggtatttcttccgtgtgaaatgcgcaaatgatggtgtgaaggcacaagccacgatccagttacagctggacgatgttcttttgactggagatggatctgaacagacaaataaactggcactgggaaaagcagcttcccatctgcttaagcaacttgaggtatatatgtcctgatgtttccacttgtatgtgtattcattttctatgcttctttcagatgagaaacatttcacgtaaaactgggaacggggatgatcaaagctccatggatattaaacttgcttgcaatcttagcgacagagaaactccgtcttcagattctgtcgaaatgcagggcacagtggttccaggtaagagtacttcaagattcttcttcacttctttatcgtccagagttgtgctaatgatttatttttacagttattgggcctataaacatgaagaaaggagggccccgtggaacactacatgagttctgcaagaagcatctctggccaatgcctactttcgacactttggaagacaagtctcggtgagctcatcactttgatttgtcctagtttttatttggctctcatgggtcctgaccaatgttaaactgataacatatttgtgtgcggacagaactccctttgaattcacagatggcaatgagaagcggactagcttcagcagtttcatatcgaccataaccctgaggatacctaatcgtgaggctgtgatgtattctggagaagccaggcctgacaagaagagttccttcgactctgcagttgtggaactgctctatgagctcgagcgccgcatgatcctgactataaaaaagtaa

SEQ ID NO: 342 - DNA, 5170 bp, Brassica rapa
  source 1..5170: mol_type = genomic DNA
tgttttcttaagaaagtgttcatatatcgaaatttagctgataaaccattaacgcggagcatatatatggccatgtgtgtgtggacatcagtatagcgtatgaacatgcaaatttcattttctaaaatttacccaccagtttgcactttcaccttatacaagtgaaaaggacaataaaacaaggtcccaccctgataaaaagagagaaaacagattataatctcaaaacacaaaacatctactttattaaaacagaagtacacttatagaataaccctaaaagttacataatatttacagtcaaatgccattgagaattaaattagttttacattaaaaatgattgtcttttccacttattcattgttttcctaaaataactcaaactaaccacaaaaaaaggaaacatattattaataaactcaaacaaactacatatttttaaataaatgaacaaacataaataattcccctgcaatatcgacaccctaacattgcttattatatgaatctcatttttagctcacgtaacctgcacgaacatcaaattatataagtaattaaactaagaaaaattaacaatgattctcacacgagttgaacaatttcagttcacttaatttcacggtggtgtctgtagcatatttgtaaccactttattatattgaaatattccactgacttccatatgtccaaataattaataatcattatctatcttattaaaatctaatatttttgaattgaaaatctttttccctaacaatctttggaaaaaaaaatagaaatatttgcataatttactaatttgtttctaaataagatttccccttcaatttcggaacaaggaatatatatatatataatttgatccataactactaaacaataaacataatattcgaatttcaacaacatattctgcatactaatgcaaacaagagatgccttacgagggtggttaagatatttcctcaactttagcgttttgtattgcgttaaaaaaattgtttgaaagtccatttgagaactcatcatcatctctcctattttttctttatatttatattattaataggtcaaaaaaaaccctttaaaacctagcaatggagatggccttagtccaaagtactcaaaactttttcttttcttatgtaaatgtttgacaaaatttgacaagaggaatcaaattagtactaaagcatctatctccctgccgtggtatacatgcgctataagagagcgtgaggaacttttgaatctaaacttcgaactgtctttatgtgaaagtgcatggaaaatctcaagttgtagtttcctacacctctctgtttccttcatttttcactattaaagcaaaacctttctcaaactttgatctataaatccatacatttatatatattaatatatctagtattgatatatgtaacgtatatatagggtaacaaaagctcatattgtttctctattttttctagcaggcagggtttagttttgatggaggaaaacctgcatcgagtttcacgtagtcccgatgtcgggacccacaatcaaaacgactccgtcgccgaagacaaccgtcgacgacggcattacaaccaccatactcacggcgtccaagttaaatgctcaggcaggtcgtgggcggctgcggctattgctgattgtgtagcgctctgttgctgtccatgtgccatcataaactttcttactctgactttcgtcaaggtcccttggatgataggacggcgatgtctcggaggcagacggaagaaacagaacaaacggaggctgcacaagagacaacgccgcggtaaaatcaacagtgaagacgggtttcatcattacaataaccgtaagtttgagacggccgtggaagatgagaaatgcggtggtggtagcggcggagatgatgatgatgatcaccggtttgtggtggagagagatggaagtttaacgaaggatgaggaggagaaaacggcgtcggttagtgggagtgaagagtcgagaacaagtgcaagagttgaagcagagagagtgtggttagagttgtatcagattggtcatcttggatttggtcgagtctccttcactgggattcaatgatttaatcgatcatttttaggatttaaaaaaaagttaatattctgaaatttcggagaatataaaatgtgaatttatctagcctaaataatgtaaaatttgatagtgtagtgtactagtgtacatttattagtaatagacaattaaaaaatttcacatttgaaactgaaaactacatactacaaaaaatttcacattttggtagagagtgtggtttaagttccttgtgtaatttttcgactcttcaatggttacattctgtgtcgattctcttacataatatccaaattttaaacggtcgaaatgtctttgaccaaaggaaaaaaaaggtcgaaatgtccaagtgatcaatcagtataaaccgaatagataaccggatcaaactaaaccatgtaaaaaccagacgcattctcatttcctttgtgttaagtaccctaaacctaataggcaatagcgttgcagtagtgaaaagggctgcttcaacttcccttctctccaaaggaatggctcagtatgtttgccttcccttcacaccaaatctccactttcccaaaccaaacacgcccttgtgtttcgctgctaaccgaaaatgtttcatggattcttctgatcgagtcatgttggctgtgtcaggcagttgttctgccataaggagttttcaagtgttaaagaaaattcacttccgctacctcggttcgattagcacttaaatatgaaatatataagtgcttattttctaaagtcatagattaaacacatttgtttttgaacctaatcattggcattgttatctccttttttttagttttatgaatgggcctgtttgtgggcatcagtttgtaattatcgtacttgttgagccttctaataagaaatgatatgacagaaaaaaaatctcaggcctattaacttcagatatcattctcagagcacccccattgagagttcatggggggagttcacacaaaaaccaagaaaaaaaaataataaaataattcaatctcatgaaccctctctctcctaaagttctcttggttgaacctctcactcctaaagttcatcactgtagcgcgggctccacgtgtcgtggcggcccgcgattggtctaacttttttttttttttttttttttttttaaaaaaaccaaaaagaaaaaaaaacaaattttaataataaaaaactaaaaagatgagctattaatcagtaaatcaccgatcatttacgacaaagcatcatagtcctaaaatgactttgactttatctgacaataatcacgatcctgcagcagtacgccatcgttgctaatattaaatgtttctctagttcacggcgtaacacagctctctcaccgacgacgacgatcgaacttctacccaccacgggagcgtttcagcttctcagacgatatttctccgggttttaactttattctcttataaaatagaatttggtagaatctgcttgttactttgaggccatgcaacatgcgttattattcactgatctcttcttcttcagaagtttttattcttagtaactcttcttaggcaggtttacacaccagagatccttactagactacaagtccccttgatccagtcaccttactactacaacaatggtacactgtgattattttcatttgtacagttatttgatttgtatatgattattttatttcatcatcacaattttctattttgtacattaattttaggcaaaagattctgctgattggaacgctgtcgatgatttggattttgagatccttaactttcactcatctccatctaatgccgatgatgatatggattttgagatcgttaactttcactcatcaccgtcgtccccatctccggtagtcaccaatgatgagccgcttcgcctaccaataccaatgcttggattaggggttccaaatgagcagctgttcgtcacacaaagatcactaccagaactagcaagaggcccaccatatttctactatgagaatgttgttcttgcaccttgggagacaatctcaaggcatttgtatgacgttgcaccagaatttgtggactcaagtttcatatgtgctgcagcaagggagagaggttatgtacacaatctccccatcagcaacagatatctgattcaacctcctccgaaacacacaattcaagaggtgttgccgctgaccaagaattggtggccaacatgggatacaagaaccaaactgaactgcatatttactgttaatgctagttctcagttaacaaacaggatccgctctgcccttgaggcttctaggggagaaccgcctgaggagataaaaaggtatgtcattgagcagtgcaaaaaatggaatcttatatgggtgggacaaaacaaagctgtgccattggaagtaaatgaaattgagactcttatggggtttccaatataccatacacgaggtggtggtggcattagtagggccgagcgtttaaagtcactcagtaattcttttcaggtaactgccccatgcatttgcataatcatcgttttgtttggttagtatcagtttatactttatagtagtttgaatttatttagttattgatagttgtatttcccatgttttgatgtttgaacttgtttttaggtggacacattggcatatcatttgtctgtccttaaacccttgtttcctgatggtattaatgtcctctccctgttcactggtattggtggtggagaaatggcgcttcatcgtctccaaattccgatgaaaacagttgtttctgtggagttctcacaagcaaacaaatacatcttaagagacttttgggagcgaactaaccagaaaggagtgttgatagagtttgaagatgtgcaagacctaactaaagatataatcgtagagttgatgaagcagtttggtgggtttgatatcgtgattggaggtagcccttgcaacaacctcgctggtggtaacagagtaaccccgaatggtcttgaaggtgaacagtctttgatgttctatgagtattgcagggttctgaacgtggttcgccagacagcaaaggagatgagaagatcttga

SEQ ID NO: 343 - DNA, 4366 bp, Brassica rapa
  source 1..4366: mol_type = genomic DNA
gtcactctccaaaccatttaccctttatgaatcctgtaatgattgtcactaaaattatgtgtatttactaatctttggccagttagcctctctttccagtggagtcgaagatatttgagcctcaatctctatataaagatgtatgatcacataaatagtctgattgattaagtaatggagttagcattgtcaagattattactaccgattagctttcgtattttaatgaatgtatttctgtcgtttaatgtctcttgccactatccaacgcaatctggatgattgacattttttattaattttaaaaacttactcatatatatatatatagatgattagtgtattcacggtctttgactcgctatagatcgtctcgtgttagaccaccactactactaagtactaagtactaacgaactaatgtacattaggatccacaaatttgaatttctcatatactatacaaattaatttcgggacatggccttttggattatctgtaatactctcttattattattaggtgtttttctatatatttatgaaagatccctgtagaccgagaatatatttatatttagtttactttttaaaacttaattatttatcccaaaatctttttattcatacaaaataaaaagatatagaaattgctgacaaaaaagattttgaaatttttgatacaaataataattatcactgctaaattttctgaccacacaattttttcattttatatttaaatattaatataattgatgagaaatttgtgatcaaaattttaatgcgccaactgtaaagcaataataacaactacactaccataacagctgtattccaatatcttgatgtttaaacaaaaatttctctttcttgaaaaacaaaattgaatgtgccagctgtaatgaaaaagacagctggtcatgcaaaatgacaaatgtatttcaatgtctattgatttttaaacaaaaataataattattaaggatatctttgtaattaaccattttaactttatctcttgaaaaagatatgaagtagtattcagtaagccatagttatatccaaacgttagaacacagacagcgggagcgtttccatttatttgggtattgagtccacgatatttctatgtctgtgtatctttcatgttgcgtcggccactgatgatctgttaatggtaatgattttctttttcttttctaacacacaggagagatccaagtcttaaccccatcatcatcttactaactacaacaacaatggtacactacgattatttccattttgtatgccctattcttttttttttaaacaatataccctattttatttaagaggttaaaactattgctgaagttttggtggattttcatttttgtccaggttcaaaacgacgactctgctgagtggaatacagatgacgatttgtattttgagattgataactttcagtcttctccaaagtcatcatctcctgtagtcacttcttcagaccacatgtttgctacgcttgttgacatgggattttcagatgacgtgatcgatagagcaattcaggaaaatggtgagccatttttgtatgtgaatgaatacatttgtttgtttagttttaatgtcattatcaatgattttgcaggaccaaatgctgaaacttccgccattattgacactatatccaagtactcggttagttttcaatttttgttttgatgggttctttctttgtcatatacagtttgtccatgtcttagtgtattctctcatttactctatgattatgttgtgaagatgaactgtgaacctagctcttctaagtctaagactatcgatcacttccttgccatgggatttgatgaggaaaaaattatcaaagccatacataaacatggtagacatttatctctctctctcttttaaagtatgaagttaaactctatgactttctttacatttgttttgtatcttgcaggagaagaaaacatggaagagatagcaaatgcactcctctcttctgaagtaagtggtgatattatgaagataccatgtcttctgatattaacaaaaatatcttaaattttattggtggtttgtaggcagatacattgcctataatgaaagaagaagataacatggactggtcagatagtgatgatgagatgaaatacgctgatttgttgagctcagacaacgaggtatatttagcagtacacaaaacaagtttataattgtatctcagtgttatttgcatatatgtataggttatatgcactttaataactatttttatttttaaacaattacagaaagatcaagactcctttgatagctgcaatccattgagttctttggtgaaaatgggtttctccgagctagaagcttctctagctatagagagatgtggtaaggttcccttttacttcttttttcttcacgtttcttcccaaggaagtgacataaactgtgattaaatgaaaccatagcctctgcttgtatggtgtaggcgttacatgtttctatttttctcacttatctatcatatggtgttgtgtgccttacacttatgcgttacatggtttaggcttgtctatcatagcctatgcttctatggtctaggtgttacatgtttctatttctctctcacttatctattatttagtgttgcctcaaacttgggcgttacatgtatatcatagactctgcttgtatggtgtaggcgctacatgtttatctctctcacttatctatcatatggtgctgccttaaacttaggcgttacaaatttacatggtttaggcttatctatcgtagcctatgcttgtatggtgtagggttacatgttgctatttgtcactcacttatctttcatatagtgttgcgttaaacgtatctgaaaattttcaggagacagtgtgagcattgcagacctcgcggacttcatttgtgccgctcatatagctagagaatttgatgagttttacattgaccctgaagaacaaaaggtatggttaaaaactcctataaaagtctgtcctgcaagttgattcgtttcataagttgttgtagttatttcatcaagaaaaggttgatgattttgtgggaacttgttgatttgttgttcattatcatcggaaaccagcaatattaaaccttgattttgtgtatgcagcctagacagaacatcaagaaaaggaggaaggagcctaggccatccgctaataaccagccgcttcacctaccaaacccaatgataggatttggtgttccaaatgaggcggtgttcatcacacatagatctctcccagcactagctcgtgccccaccgtatttctactatgaaaacgttgcttgtgcacctacaggcgtttgggagacgatctcaagtcatttgtatgacgttctaccagagtttgtggactccaagttcatatgcgcggcagcgaggaagagaggctatgtgcacaacctccccatcagcaacagataccagattcaacctgctccaaaactaacgattcaagaggcgcttccgcacactaggaaatggtggccagcatgggacacaaggaccaaactgaactgcatacttaccgttcatgctagtgctcagacaacaaagaggatccgcttagaacttgaagctcatactggcgaaccatctgaggcgacaaaaaggtatgtcattgagcagtgtaggaggtggaaccttgtatgggtggggaaaaacaaagtggcgccactcgatgcagatgaaatagagtctcttcttgggtttccaaaatatcatactcgaggtggtggcattagtaataccgatcgtttgaagtcacttggcaattcttttcaggtaacttgaccttgcatttgcatacatgtaatgcgtttgcttatgttttgatgttttgtgtttgaacttgttttttaggtggacacagtggcatatcatttgtctgtcctaacacccttgtttcctgatggtattaatgttctctcactgttcactggtattggtggtggagaagtggcacttcaccgtctcaaaatcccgatgaaaacagtcatctctctggagatttcagaagtaaacagaaacatcttgagggacttttgggagcaaactaaccaaagaggagtgttgatagagtttgaagacgtgcaagacctagctagagacaaaatcattgagttgatgaagcggtttggtgggtttgatcttgtgattggaggtagtccgtgcaacaacctcgccggtggtaacagagtaagcaggagtggtcttgaaggtgaacagtcttcgttgttctttgagttttgtcggattctggaggttgttcgtgagacgacaatggagatgagaagatcttga

SEQ ID NO: 344 - DNA, 4941 bp, Brassica rapa
  source 1..4941: mol_type = genomic DNA
tgttgaattattctatatctcttgatcttgaagagcctattggtccccaaattcactgaaatgctgttactattttattaattgtaccttgctttggctgttggaagtgtgattatatataagaaattaaatttcaagtgattccatgtcgtgtaactgatttcttgtacacttttttattatcttcgactatattaggtgtgaggtaggtggtgcatgttgcagtttctatacgattagagatgtatttttgttgttggtttagttattttatcattttgatatagattttacgaagaaaaatggttggatagcagcaattcacggaagagatcataactcgtagcttgcaagtcacatgaacaatattttctagcagtctgtagaatttcggtatatgcccaacaactcgtgcaagtcgtaccatttgaaaattgcaccattatgtaatcgtaacccgtgatctgattctgatgtaacgtctattacattttcttatgtataatgaaatctatttgtatgtgcagcaggcgtgtataataaataatatacatcattttttatactaatgtttctcaattgtcaacttaaatatcaacgtttacatgcacggatttgtacgcaattttgtgagtaatgccaatttgtgtagtccagtatcgtgtacgaaattcactcttttttgtcgtaaccatttttgttataaatggtaagtcctaattcgtatccttatgaacttgttgtcacatcaaagtcacatgtcagtattcaaacgatacaacgatagtaacttatacactagaaagcccaattagtattcaatcaaaagtagcccattaaaaagaatggatacccaaaaactaattgtaaagcggatccggatacggatcttcatccaactaaaacggagcgaatcaaaatacagcatatcgtttccatgctcatcccttgtcaatgtcgatgcttcactagtagacaaacggcggagcacgactctctcaccggcgaagaacagacttttaccggcgacgggagcgtttctgcttctctgttcctctcatagacgaaaaattctctgggtaattcctctaactctagtccacgatcttcgtagctttcgtacattcaactccgtttgtctcgccgttaaactcgatctcgccgtctatttttccatctttcttcgaaaacccactaagctctcttaaaagccccccactgaaacagaagagaattttcgttaggatctgccaaattattctcgaaatttgatcctttaaaacacttgtccgtctttcgcaaactttgaggacatgcattagtagtctcactgaaccactcttatcactgattccatttaaaaaactcgatctttctccagtcaaaagtttccaactttagcagttttgcgatgataatttttgtaggtttactctgaggaaggacgaagattcgttactctgactacgagtgtctcttcaccttactgctgctgcaaccatggtacattgctattaacttacattcttattctattgctgctactcttgactctcatcaaggtgctttttgtgaaattgtttatgcaggcgcaagattctgctgactggaacagcgatgatgatttggatttgcagattgataactaccagtcatctccaccgtcatccccaccggcggcagtcccttcttccgatgagctgtttgctacgctggttgacatggggttctctcctgagaatattgctagagctatcgatgaatatggtgagtgttgtttgtgttcgtatgtgttgtttgcttagtgttctttaaataatgtgattgttaaataaacttttgcaggaccaaatgcagatactgtggtgattattgatgctatctccaaatacactgtgagtttctactgtttggattctttctcctgcttactgtcttttttttagattgtgtgttgtttctcattcctcgtattattctttgtgaaggttacctgtgaagctagttcttccaagtccaagactattgatcatttccttgctatgggatttgaggaggagaaagttatcaaggctattcatgagcatggtaattaattctctatctctctctctctctctctttagttaagaagtaaaacgctctataagtctatatgattctttacatctgtcttatatcgcaggagaagacaacattgaagagatagcaaatgcactcatctcctcggcagtaagtgatgcaaagttatcatgtcattaagaatataccttatagatttgtctcatgacattaataacataacttatgttttttttggtggtttgtaggcagaggtatcgcccaaaatcaaagaagaagaggacattgagtggtctgagagtgatgatgagaagtatgccaatttcctcagctcagatgatgaggtatatttatttccttgtggtaataacatcagtacatcacaccagtcactattgtacaattgtctcgctttgttagttgcagacttgtaaattgtatgcattctaaaaaaaattctgttttaaacaatggcagaaagtttcagactcctcctctgaaaacggcaatcaattgcggtctttaatgaacatgggattctcggagttggaagcttctcttgctatagagagatgtggtactggtacgctttcctttttcttaacgtttcttccacgagatgtgtcataaacgccatacttgtatttgctatttgatctatgtaaagtcttagtcttagcttttgcttatgtgatgcatgccttagatttagtaatcgatactcttgttagatgtttatatacatctctctatcatatgttgtctccttctcggtacttaaggagaattatctgattaaaaattttcaggagaggatgtgagcattgcagatctcgcagacttcatttgtgccgctcagattgctcgagagttcgatgagttccatgctgaccctgaagaacaaaaggtatggttaaaccttctaagtccgttttatagtcatttcgtttcaaagtccatgaaaaggttgaatttgcggtctagttacattacacatttgcgttgcattttcattagaaatctgaaacatggattgtcctgtatgcagcctaatgtcaaaaagagacggatagagccaagaagagagccgaggtcatctgctgctgatgatgagccccttcgtctgccaaatccgatgattggatttggcgttccaaacgagccaggactcatcacgcagagatctcttccagccatggctcgaatgcctccatttttctactacgagaacgtcgcccttgctcccaaaggcgtgtgggacaccatttctagtcacttgtacgacgttccaccggagtttgtggattcgaaatatatttgtgcagcagcgaggaaacgaggatacgtgcacaacctccccatcagtggaaggtatcaggtccagcctcctccgaagtacacgatcagcgaggcgtttccgctgaccaagaagtggtggccagagtgggacaagagaacaaagctcaactgcatcctgacagtgaacgctagtgctcagctgacgaacaggatccggttagcacttgagccttatggtggagaaccgcctgagagtaagaagaagtatgtcattgagcagtgcaagaagtggaatctggtgtgggtgggaaagaacaaagctgcgccgcttgaaccagatgaaatggagactcttcttggatttccaaaaaaccatacacgaggcggtggcatgagtaggaccgagcgtctgaagtcactcggcaactcttttcaggtagctttcaacctcgcatttgcacagtcataactgttcttgtattcggcatagagtgttttgaactcatagagtagttcttgatcgctcttgtccttttaatgatgcgttttgcctatgattgaatggtttgtgattgaacttgttttcatcatgcgttttgcctatggttgaatagtttgtcattgaactttttttcaggtggataccgttgcgtatcacctctctgtcttgaaaccattgtttccatatggtatcaacgttctgtctctgttcactggaattggcggtggagaagtggcgctccacgttttgcctatgcgttaatggtttttgattgaacttttccatcttgcgttttgcatttgcatttgcataatcataactgttttagtattcggcatagagtagttcttgatcgctcttgtccttttaatgatgcgttttgcctatgattgaatggtttgtgattgaacttgtttccatcttgcgttttgcatttgcataatcataactgttttagtattcggcatagagtgttttgaattcattagagtagttcttgatcgctcttgtccttttcatcatgtgttttgcctatggttgaatggtttgtgattgaacttgttttcatcatgcgttttgcctatggttgaatagtttgtcattgaactttttttcaggtggataccgttgcgtatcacctctctgtcttgaaaccattgtttccatatggtatcaacgttctgtctctgttcactggaattggcggtggagaagtggcgctccaccgtctccagattccaatgaagacggtcgtctcagtggagatctcggcagtgaacagaaacattctcaaggacttctgggagcaaaccaaccagaaaggaaccctgatagagtttgcagacgtgcaagacctgagtaacgagaagatcgtggagttgatgaagcagtttggtgggtttgatctagtgatcggaggtagcccctgcaacaacctcgctggtggtaacagagtgagcaggagtggtcttgaaggtgatcagtcctgtttgttctatgaatattgtcggattctcgatgtggtgcgagaaacaacaaagacgatgagaagatcttag

SEQ ID NO: 345 - DNA, 3911 bp, Brassica rapa
  source 1..3911: mol_type = genomic DNA
aatagtataatttttctcataatcccaaaactatccctatatttaatctaattaaacacaatttaaaagttaatttgaatttaaaaaagaagttaatggaaaaaatgaaaaaaaaattgaaaggcaatcgaaaaaaaaaaaacggtatagatatgcatcatagagaacaagagtttgtgagaagaatcaaaagaaaaactatgggaaaaccatagattgatgaagaagagaagggagaatcattttttctttaattttttcaagtaaaatcgaccataacacgttttaggaagttagaatatttttaggagatttttataatatttccttaactgaaatttcattaattttcgcaaaaaatcaggtattcttatccgtagaaggcgacttctaaaagtttagaagaatgataaaaattttgaatacattttctactttgagtagacgtaagagtacattgtagaaaacacattccctaaaatttagaatactttataaacgtagaagatgcattcggaaggaaagtggatacctttacgattagtagaatgcacatttttagtagaacgtatctttaaaatcttatttaccaagtttttgaacaaaacaaaattaccagcttgtgtatatggatgttttattaattgtttatatttttaataatttttttgattctcaaaattatttatttcattagttttcagaaatacaaagggtaaaaaggagaaaaaatggacaaaactagttttataccaaagggacaacaacctggtttttttattctcttttggcaattttccctttttttttttgaacggcaaattattagcaacctagttaaaaaaaaaaaagactgttttaaaaagattcactttcctgtccctgtaacaatatagcacgcgcgactacagcgcgtgaaataaaaacagaggtttactacctcaacctcgaaatgaaacaagaactcattttgtccaaaaaaaatttgtccaaaaaaaactaaaaagaaaaaacaagaactcagaaaaaccaaaaaaaaaaaaaagaaaggttgaaatgaattagaacaaagttcttgggatcttcagaatctgctgaagtctctctcgagagcaatctctctttctcaggtaacgatcttacgtcttcatcgattgatttgacattcatcgtttcttcccccaattctcttctgtgttaattgattgattgattgatgccgacgttattcctttgacttttagggtttcacaattcgatgaactctagatcccaatgtttcatcatttctccagaaaccaaaacatgcatgctgtttttcatagaacttagagagacaatgaaacaattaactgtaggattgtgttctgttgtaaagctgtaacattttatcatgaaaaaggtttaaacttgatccaactatgtaactttttttttttaacaatgtgctccctttatgcagttcctttgatgcataaacaataatgcaacaacaacaagatggtgatgaagagcaacaatatgacagattatgaaaacaatctgtacaaaaagctcaagagcggaaagctcgaggtcagagtctcctaccgcactttcctctgtccttactgccccaagcagaaggttggtctctacatcgacatccttcagcacgcctctggagtcggtaacagcagctccaagaaacgaagtctcacggagaaggcttgccaccgtgctctcgccaagtaccttcgtaaagatctcgcggattacgctacggctacagtctctaggcgctcaaaggccttggcatcgttaactggcgatattcctctagcttatgatgatcagttcgagaaacttgtgtggccttggaaaggtaaggccctcatctctaaggcattcatgttagcatattactaatagaagttgtatctgtgtgttggggttaaggtattttggttaatataccaacaaagatgggacatgatggtctgtgttgtactggggagagtggaccacagcttaaggatgaactgatcagaagaggattcaaccctattagagtacgtaccgtgtccgtgtgggactgtttcggtcattcaggaaccaggatagttgagtttaacagacactggaatggacttaacgatgctttgctgttcaagaaggcttatcaagaagatggtcatggtaaaaaagattggctgagtagtggtggtggtgctgctgactcgagtctttacgcatggcttgccaatgctgatgattattatagggctaactatgtaggagagtacttgcggaagatgggtgacctcaaaagtgtttctaggtttgcagaagaagaggctaggaaagaccataagcttgtgcagcgtctgaacttaatctctgagaacatacagagtcagttgaggatgctagaggaaaaattctcaaagacttctattgcacttaagtgtgagactgaagaaaaagataagattctccatggttacaatcaaggtgaggtttttccctataactatgtagtagatatgtgtattgtttttgtttatattcattttacattttctgtagatctcacgggaagacaacaaagatcgactgatcatttcaacagaatctttgctgatcatgaaaagcaaaaggcgcagctggaatctcagatgaaggaacttcaaattagagaatctgttttggcgaaacgtgacgcagagaatgaaacacagaggaaaaacgtggcaaaagagcttgaacaggtatataaatgctaacttcctcatttcttaaactaagatctggtttgaaatctttcttctgaaattttttccatttgccatatataatcagagcgcagctaagtatagttacgttcaactagtagccgtggaacaacaaaaaaccagagagaaagttaagaaaatggctgttgatcacaaggtctgatcgaaaacacttccttcaaaaagaaaaaaagttttctctttaaactttatgtgacagggtcctgccttgtttttttaaccatagatgcaaaaggaaaagcttcgtgagagaatcactgcactggaaagagagcttggtcagaaacaagatcttgaacttgtggttgaacatctgaaacgacagttgagcgtgatgaggcacatggagttggacggtggtactgaaattgtgaacaaggtggagacctacctcagagaccttagtgagaaggaaggagagcttgcgcatgtaaacaaatttaatcaagatcttgtcgtacgggagcggaagaccaatgatgagcttcaagaagctcgaagagcactgatcagcgtatgtagattctatttcatacgaacaagggtctcacactacttgatttttccctctaaatggttttttcttcatttgattgtagaatttgagagacatgagatcgcatattggtgtaaggagaatgggggagcttgacaccaagcctttcatggaagcaatgagaagaaagtactgtcaagaagatctagaggattgggcagttgaaattatccagctctgggaagaatatctgaaggatccagattggcatcctttcaaacggataaagcttgatgctgcagaaactatagtggtacctaaataatatgcttcatgtgcatgttgtgacttggtttatgaattggtgcttgataatatttttttggcaggaagtgatagatgaggaggacgagaagttgagaacactgaagattgaactgggggatgatgcgtaccaagcagtggcaaatgcattgcaggagataaacgagtataacccgagtggaaggtatgtttcctcagagctgtggaactttagagaagagaggaaggctacgctggaggagggtgttacttgtttgctggagcaatggaatcaggcaaagcgtcataagccttaa

SEQ ID NO: 346 - DNA, 3628 bp, Brassica rapa
  source 1..3628: mol_type = genomic DNA
ttgatatgaaaaatgtgtaagcttgaagtaagactacggtgaagaagttttacatggaagtggtaagactagatgatcacagttcaggctgtagctatgttgttagagagctaatggagcgatgaggtaaagcaaaaggcgaagatggaggaagcaaacgagcttggtgatgaagctactgttgagtaacaaacaaaagaggtgttggctgttgagattcaacagttgcactacacttgattgatatgcgaggatggttttgcttgctccttcgacttcaaaagtgtaagattcctccacatatgagaggatttactccaaaaagtctgggtgtgcacaaggaaaatgaatattacaagcattactccatctccaaggcaagcaagatagataacagaatattgacaataaaatgatagacaaaaagcgtctgtagtccaacggttaggataattgccttccaagcaatagacccgggttcgactcccggcagacgcaaactatttttaactaattctttaaattatattttcaaatttgaaagttgaaacaatgccacggaggatttttatacaccgtttcggtagtgaaaaagagtcagaaatgcgtgtttttgtggatgtaagcaataaaatctggtggatgttaagcttaaatttgaatggtgctacttttgctttttttgaccttaacgctgtataataaattagtacagagacatctgagtaccaatttagcaattcttggactctaaaccttctccatgcaacagaagcttccgttttagtcttgtgccccaagtttttaaaaaaagttaaaacaaaggtttctgcgtggtgttggtcttggctaatcttttaccctctctggttgtccgaatttacaggattgccactgaggttgcttgcattgtctttatctacaacgtcccaacaattaactgagggaagaggaagagacttttgagcgtagcaacacacacacagtttctgtgattcactagcaaaagcacatcggagaaaaaggtatttggtttttatttagtaaaatgcctccttctctttcacatcctcaagtttgattgttttcattctgataaaatctagaaaataaaacaaaaaggttttttttcttcacaacaagtcatttctttttgttctctactcactttcatgtttgtagatgtgataaaacaagactgtggatcaaacatttcttcagtttttgttttgtcctgatctagagaataagaaaggtaacagctttaggtcttcgttgccctaaagaacctgactttggtcttatgagtaactaaaatctttggattatctatttctgcaaagcttttttcctaataaaaccaaaaaggtttgtctttttactcatagttcatgcaaaatcaaaactttgatgctctagaaacatggaaagtaaccaagtcttttcatttttggttgtatcttgcgttctcatatgggttctctttgttgaacctctaagatggagaagcaggagttttcagttggagattcgtccggagagacaaagaaaagtgagtgtactgaagagaagtttgtgtggccatgggttggtcttgtagctaacatacaaacggaggttgataaaacaggtcggagagttggcagaagcggttcaacgttccgtgatgagctcatcgagaaggggtttgatccaacaagagtccaacccatctggaacttcaagggacactctggtttcgccttggtggagttcaccagagacattaaagggttcgagaacgccatgaacttcgagaggagttacaaatcagacggccatggcaagaaagattgggagaaaggtaacaacaactgcttcttctgaggtttgagatcgttttgtttgctatatgacatttaaaagtttctttcttttttttttggatcaggtgttcacttgagagatgataagccctacggatgggtcgctagagaggaagactacaaccgaggtgggattgttggcaagaatgttaagaagaagagagacttgaaaactttatcacagcttcaagaagaggaggaaaggaaaatggttcagcttgttgaaagcatgtctcagtccattgagatgaagataataagcaagcaagagctcgaacacaaagtggatgagacttctcgtgttctggagagtgtggagttgcataactatcagctaaacgaaacgtacaaacaaggtatgaaaacacctgaactagtcttacagcatatgttacttgtttggttgttgacatagttatttttgtattcttgatgagaagaggttgagaagatgcacacgaacttgcaagggctgtatcagcagattctggcaggacatgacaagtctatgtctgacctggagacagagagagagaagctggagaatcgtgcgaggcagatctacattaacgaagctgagatggaaaaatccagactcgaaatagaaatggtgaatgattctttctttctttctaaattagaccaaaaggaatcatataacagagttaaaatctgttacctttttttgttcttacagaatcaaaaggcgatgatggagcagaatgaagcgaacatggaagccatgaagcttgcagagaagcaccaggcaagtacttctttagtttgactgaacatatcccaataccttttgagtgtctcaaaaacatgaaaacttattgcagaaagagaaggagaagcttcacgagaagataatggaaatggaagcgaaactaaacgaaacacaagagctggagctggagatagagaagctgaaaggcagcaccaatgtgatgaagcatatggctgggagtgatggagatggggagttgatggagaagatggtcaagactcagatggagctagaggctagagaaacagctctacatgataagataatggctgtgacacaaaaagaacgtatggccaacgacgagtaccaggaggctaggaaagagatgattcaggtacaaaacaaaaacaatataaaatccatttgtgtgtccttttagctgatcatattactttgatgagcagttctggaaggagaatgaggatttggtgagtggggaggagataagagtgaagacgatggggcacttagacacgaagccgtttgtggtagcagtgaagaagaaacttagatgttcagaagcaagggcagggctaaaagctatggagttgtgttcattttgggaaggacaaattggaaatgtgcattggcatccatttaaagtggatgaatctgatggaatcgcaaaggtatggatggggacttaaaacatattagatttttgaacatttcctttattattacaaagtattattatctcaagatgtcttacatgtgaaaattgcagctagtggttgataaaaacgatttgaagctggttaggctgaagagtgactacggtgaggagctttacaatgaggtggtgagagcgaaagtggagatagtggaatacaacccgagtggtggctatgtggtttcggagatgtggaaccttgagaagaaccgaaaggccacgatggaggaaggaacggatgtgatgttgaagatgaggaagaagctcgtggctatgaagaacaagcgaaagaggcgttga

SEQ ID NO: 347 - DNA, 2662 bp, Brassica rapa
  source 1..2662: mol_type = genomic DNA
cttcttcttgaatcttgacgacacttgagtaccaatcgcccgctttgccatcgtcaatcgtcatcttcttcttccctcggtaagttcattttttcttatttctttaatctgcattcttcagagaaactaggaacagaaacataaactgatgtgaagaccgatctcatctgaatccgaactcgctgtccaaattcccttaactctaagcatctgaggctccttaattacgaaaaaaatcttcataatttctttgaaaaataaacatgcaattgacataatgctttgtttaagaatgaaaaaaggaataacgttttgatcatatttttatttttggaacaacaagatgggtagcacggtggttttaagctcagacgaagaagattcagacatgagcgaatctgaaatggaagcgcatgcagacaaaatctacccaactcttaaaagcggaaagctgaaagtgaaactctctccacaagctttcaagtgtccttactgtccaaacaagaagaaaccaagtttccagtacaaagatctcctccaacatgcttccggagttggtaacagcaactcagagaaaagaacctcaaaggacaaagctagccaccttgctcttgtcaagtacctccaacaagatctttctgactcagcagctgcagagccttcatctaagcgccaaaagaccggagaccctattcaagactgtgaccaggacgagaagcttgtgtgtccttggaaaggtatggtaaataaactcactctgcatccaaatattgttactttattgattgtgtgtctatcacattcacaggtgttgtggttaacattccaacaagaaagacacaagacggtcgatcggcgggtgagagcgggtccaagcttagagatgagtatattcaaagagggtttaaccctactagggttcgtcctttatggaatcactgggggttttcaggaacagctattgtggatttcaacagagactggaacggactccacaacgctcttctgtttgacaaggcttatcaagtagatggtcatgggaagaaagactggctgaagaaacatgggcctcctaagacagggctttacgcgtggatagctcgtgctgatgattacaacggaagtactctcataggagaagacttgaggaagaagggtgatctcaagactatagctgaggttacggaagaggaggcgaggaaacagcagaagctcgtgcagaatctgacgcagcttgtggaggagaagaagaaaggggtgaaggagtttgaggagctgtgttcagtgaagtccaaggaacttaaagagaggttggaagagaaggagaagagtttgcaaaagcataacagagagctgaatgctatacaggagagaacaatgggtcatgttaacaagatctttgctgatcatgagaggttgaagatgaagctggagttggagaagaagaaacttgaactcaagggtattgagttggctaagcgggaagcacacaatgaaaccgagagaaagaatctctctgaagatctacaacaggtgttccacctactctcttattcaaatataagttaggcttaaaactgaatagttttggtctttgttgttatcagaatgcctccaagaatagctctcttgaactagcttccatggaacaacaaaaggcggatgaagaagttaaaaagctggctgaatatcaaagggtttagtgtctttcctcttcttattctcccttaacaaaggcttttattgttcattagtacttgtgtgatgttgtaaactctcagaggcaaaaggaggagctccatgagaaaatcataagactagaaagacagagagatcagaaacaagccatcgagctagagatcgagcagttgaaaggagagctaaacgtgaagaagcacatgggatcagacggcgacgctgagattgtgaaagaagtggaagaaatctataaaggtttaacggagaaagaagaagaactagcagacctggacaagtttaaccaaacgcttatactcagagagcgcagaaccaacgacgagcttcaagaagctcgtaaagagttggttaacgtacgtatcaaaagtgtttgttttctttctttttttcactcaaaacgttttaatcttttgtttttcttgtagattatgaaagagtggaagttaagtatcggtgtaaagagaatgggagagctggtgacgaaaccgttcatggatgcactgcagcagaagtattgtcagcaagacgtggaggacagagctattgacgttctccagctctgggaagactatctcaaagaccctgattggcatccattcaagcggatcaagctcgaaaatcaagaaagagaagtggtaagaagaccaaaatggttttgtactgcttttggttaatgttgttgtatcctttctctctgaaagattaaagcttttttttataggaagtgattgatgagagggacgagaagctgaaggagctaaaggacgatttaggagatggtccttataatgcggtaacgagagcattgttggagataaacgagtataacccaagtggaaggtacattacaacagagctgtggaacttaaaagaagacaggaaggctacacttgaagaaggtgtcacttgtttgcttgatcaatgggacaagtcgaaacgccgctga

SEQ ID NO: 348 - DNA, 3929 bp, Brassica rapa
  source 1..3929: mol_type = genomic DNA
atactgattcttttaataatttatgtatattttgtcatattgattgtttagaatttaaggcgaaaaccatattttgttatatatcctagaccagtttacaaataccgaaaaatctgttcgcaaggtttctcattcaacgagttaactccatcacaaattaggatacactgttgtttttaacacaatttgtcgctgttttctaatttaacacgagatccggctaacactgaaaacgaataagatgtcaaataaatataaaatatctcgatacatttgaaatgttatgtttcaaaatgcttgtgaaatctacgtaggaggatgatggaaaataaaactgaatgtagtatttaaacgagacccaaaactaactcaaagctaaaactgatccttctcctttgggctctacaaattgtaaaacgtctaaaagctcacaagtagaaatgggcttctaactttagatcgacccgattctctgtttagattcgaaagtacagaagtagatacgtaacatgtaacatgtaacatgtatcacataatactgaacagtacgacgacgcaactcaactactaactgtaaaagtcattacgcgtgtgacaaacgcgcatcagtgctacagcgatcatcaatcaaatcaagccttggaacacacaaaaattgtctttgttaagtgtactgtggcaaaaacaatgttttacagattccaacaagtaataaaaatagttacgagttacgactctctgatgtcagtgaaaaagaaagtttgtatgccactttaagaataaaaaataataaacggtaaaaaatctaaaagagtaaaaattaaaaagtggatggatatatggtgaggattgaaagacagtaaatattcgatacgtcagttttttagtcttgactactctctctcatctcttattgactttttcctttttactttaaaaaaaatctctgataggaaaagtaataaattaaaataaaggacatacataaactgtagagtatttttaatttggcttcaaccctaaagctagtgagaagagagagagaggttcgtcttcttcccgacactatcgccggcttcaccatctccatcatcatcatcatcttactcctcccctcctgtaagtttctccggtgaactattttatttttttcaatttgcattcctcagaagaggacaaaacagagtttcactttcagatcgatgatgtagtttgaattcccaactctcttctcaattccctccctctttaattacgaacacatcttcataaatctctttcaaaatatcaaacatgcaattcacttatcacttcgctcaacaatgtaaaggaataaactttaaataaaaaaggaatcatctttagaggaaaaagtaatggaagggaaccaaccacattgctaaaattcaaaaccagaccagatcagattctttttaaaaatattgataattgagttcatattctgttttgcaaaactgtaatcttaaaccaaggaacaagatggggagcacggtgatcttgagctcagacgaagaagattcagacattagtgattccgaaatggaagagtatggagacaagatctacctatctctcaaaagcggaaagctcaaggtcaaactgtctcctcattctttcacgtgtccttactgtccgaacaagaagaaaccgagtttccagtacaaagatctgctccaacatgcttctggagttggtaatagcaattccgacaaaagaaccgcaaaggagaaagcaagccaccttgctcttgccaaatacctccaacaagatcttgctgatgattcacaagctgagccttcttccaagcgaagaaaaactggtgatcctattcaagattgtgaccaggatgagaagctcgtatgcccttggaaaggtacacacttattaaactcttaagggtcccaatggcaacatgcggttctaatagtaacaaaaacatatatatatatatatatatatatagatttttgttactattaactgcggtgctgtttctaaacattcagactctaaagaaactcactttgttaggtaatcttgaggaagtttttattgattgttgtgtgtgtatgttctactgaaacaggtgttgtggttaacattccaactacaaagacagaaaatggtcgaaccgcgggtgagagcgggtctaagctaagagatgagtacattcaaagagggtttaatcccaccagggttcgtactttatggaaccactgggggttttctggaacagcgattgtggagttcaacaaagactggaatggacttcacaatgctcttctcttcgacaaggcttatcttgtagatggtcatggtaagaaagactggttgagaaaagatggtcctcccaagtcaggtctttacgcgtggatcgcacgtgctgatgattacaacgggaataacatcattggagaagacttgaggaagaaaggtgatctcaaaactatagctgaggttacggaagaagaggcgaggaagcagcagaagcttgtgcagaatctgacgcagcttgtggaggagaagaagaaaggagtcaaggaaattgaggagcttcattcagcgaagtcaaaggagcttaaggagaagttggaagagaaggagaagagtctgcagaagcacaacagcgagctgaatgctatacaggagaggacaatgggtcatgttaacaagatctttgctgatcacgagaggttaaagatgcagttggagttggagaagaagaaactggagatcaaaggtgttgagctggcgaagagggaagctcacaatgaaaccgagaggaagaacttggctgaagatctgcaagagaatgcttccaagaatagttctcttgagctagcctccatggaacaacaaaaggcggacgaagaagttaaaaaactggctgagaatcagagggttagtgtctttcttctttcttgttaaggcttttattttcataatcattattaaaaaatgtgatgtgtgacctctcgcagaggcaaaaggaggagcttcatgagaagatcataagactggaaagacaaagagatcagaaacaaatgatagagctagagattgagcggttgaaaggagagttgaacgtgaagaagcacatgggatcagacggagacgctgagattgtgaaagaagtggagaatatctataaaggtttaactgagaaggaagaagaactcgctgacctcgacaagtttaaccaaactcttatactcagagagcgcagaaccaacgatgagcttcaagaagcacgtaaagaattggtaaacgtacgtatcaaaatgcacataaacgtatatatctagcattatctaaatctttggttttaagttttatctaaatcactgcctttttttcttgtagattatgaaagagtggaaacaaaatatcggtgtaaagagaatgggagagctggtgacgaaaccattcatggatgcactgcagcagaagtattgtcagcaagatgtggaggacagagcaatagacgttctccagctctgggaagactatctcaaagatccagattggcatccattcaagcggatcaagcttgaaaatcaagaaagagaagtggtaagaagaccaaatgtttttactctttttggttagtaacttaatattgaatcattctctctgaaagattgaagcttctttttttgtgggtttattaggaagtgatagatgatagagacgagaagctgagggagcttaaggaagatctaggagatggtccttataatgcggtaacgagagctttgttggagataaatgagtataacccaagtggaaggtacattacaacagagctatggaacttaaaagaagacaggaaggctacacttgaagaaggtgtcacttgtttacttgatgaatgggaaaaggctaaacgcaagcgtggaatggcttaa

SEQ ID NO: 349 - DNA, 4116 bp, Brassica rapa
  source 1..4116: mol_type = genomic DNA
tcgtgtggcccatatttacaaaatattatatatataataaatataagaaaaatcagatgtatttatttgttaggcgaaattaatttgattcaaaaatgttttctaaatataccttaacgaatttctaaatgaagtaaaaatacagtgacattttctaaaatcatgaacataaatgtttgatagatatttgccttttttaaatcttacaataataattgcgctataaagttttattttacgaacacaatatgtctagatttacgatctaacaattactttataaatttcaacattaataatgatgatatataatattaccataaaaaggatagttttaaggttgctatatagatttaagattagtgtatagtcgaattaattatatatatagtatatcttcttttaaattcttacgtagaattaagttggtttcaacataatatttccgttttaataagatagatttttttcgtacgaatatctcaatagaaattataactaaactatgaataaaaacatagaaaatagaacaactccagttcaactccggtatggaagcgttagaccgaatcaaagcaaattcaattccagttaagacaactgagattggtttggtttggtctacaaagaccattcctatgcacgcgctagaggattaagccacacaatcgacgtgtttgtttgctactctgcatatttcgtcttcctctccactccaacaagcttacgtgcgtctctcccatcccacctgctcccaactcgtcgccttcctcttcgctctccaaaggtttcgcatctctctcctcccgcttctttcccttacacttctccttaaactgtatctacagacatctgcaaaatttgttctttctgaatttttttttatgggtttcatttcgtttcgttgatttacgagtttacagttttgagctctgtagaagagtaaagacctcaacttttctgatcttctcttttagttagcgaaatgtcgttggatttgagttagggttttgtgttctgtagctcagtctcactaaagttggtgtctttatgatcccctgggttgtttcttactctgatctttccaaagatgtgaacttttagtaagtttatgtaactgggttagtgaatctcaggttctgaatgggtcttgtgtgttctgtagctcagtcttactaaagttcgtgtctttatgatgttctctgttgttttcttactctgagctttgtagaggagtaaaaacgtcaacttttttcatgatcttctcttttgggtaacgaaaatgtcgttggatttgagttagggttttctctgagctcagtctctactaaatttcatgtgtttgtaacttccctgtgtcgttcttcttcgtctaagctttcaaaagatgtaaacttttagtaggtttatgtgaatttcaggtataaggttcagtgattagtgttaattatatatgtatttataccaagttcctttgcatctttgtggttgcaggttgcaatgtattcaagaagagagctggatgatttggagtacagatactactctgaaatgaaagatggaactcgcaaggtcaagatctctgactctctcttcaggtgtcccttctgctacttagaccgcaagcgtgattacaactttgacgacttgcttcgtcatgcttacaacatcagcggtagttcccgcactaaggatgggcgagagatagctagacatctcgcacttgagagatacatgaagaagtatctccgccctctggaaagaccatcatcagatgtctcttctcttcatacagaggtgttaaccggaagctggataacagcaggctcatcaagctctgctgcaggggaagtgaatagcagcgttgtcaaatccagttcaccatgtatcgctgaagctgaacctatgtctgtctcaggaggagatgatcctgtaccaagcggtgaagaaagacagatgttttctcctaaacacaactcctctttgagcaaccaagacaatacacacccttccaaaagagcttgcctcactgctggtggtaaagagggagaagaacctgtccaacagagtggtctcagccatggtgctccaagatatcctcagaggcgtgatcctttggctgctcgtaatgatggtctgatgtttgtgcatccatggaaagggatcttggccaacatcagtagaacttttagtgagaagacaaggaagttcactggcgagagtggaagcaaaattagggaagagtttgttagcaaagggttcaatccccacaaagtggagccactgtggaacggcagagttggtttcacaggttttgcgattgtttactttggcaaagactgggaagcttacaggaacgccaccatgtttgagaagcactttgaagtcaatcagtgtgggaagagagactatgattctgcacgtgatcgtggcgaagagctttacggttggatagcaaaaagggaggactactactcgagaactgtagttggagaccacctcaggaagcaaggggacttggtgactgtttctggaaaagaggcagagcaacaaagaagggcattcacgcttgtctccaacttggaaaacacactcgagaccaaaagcactaaccttgaagaaatagagagcaagtacaaagaaaccagtacagagcttcagaggagtatgaaagagaaggatgaaatgatcaacgctcataatgaaagtatgttttttctctctctcttacttactgatgaaattaaattagtattctcaagcttaatttgttttttaactaatttttcaatgtttagagatgagtagcatgcagcaaaaggcgcgtgattatttggcgagtgtgaaaaatgaacatgaaaaggcagctcagcatctggaagctcaaaggaaagagtttgaagagagggagagatatcttgataaatgtcaaacgctgaacaaaactgagcgacgaaagcttcaatggcaaaaacagaaggtaatgttcaacatcctttgtacaatccctttttctttgttaaagttttcgcaatgaaatcttttaaattgatttgtcagaacttaatggctactgaagagcaaaacaaaactgatgaagaaatgacgagagtggctaaacagcaacaggtgtaggctttttcttttagtgcatggataatgttgaagttgcagtgtctgttttgatttgctggctgtttgttttggcagagggagaaagatgagttacgtgagagagtcaaaaagctggagaaaaaactagatgatgagctggcattggagctggagatagagagaatgaggggtgggctgcaggtgatgggacacatggaagatcctgatatgaaggaagagatagaaaagacaaaggaaaaactaaaggagaaagaagaggagtcagagttccaagagtcactctatcaagctcttgttgttaaacatggctacactaacgacgagcttcaggatgctcgcaaggcgtttatcagagtaagcaattctcatcctctctcgctgtgtctttcttcctgtaaggggaagaagtgctttgccatttgatgttatgatactaaccacgtttaagctatgtgtgcagtcaatgcaagagttgaccttacgtggtcagatctctgtgaagagaatgggagctttggatgagaaacctttccaaaaactaactaaagagagatatccagcagaagaggctgatgtagaagcagcaaagctttgttccttatgggacaaccacttgagagactcggcttggcatccgattaaggtcgtcctaatagacggaaaccacaaggtaacaacaatacaattcaatacacctccttttctctctctctcttaaacaatgctgtatacaaattttggcaggaggtgctgaatgaagaggatgagaagctgcaggaactgaagaaagagctgggggatgaagtgtttgaagctgtgacacaagcgctgatggagaggaacgagtacaatggaagtggaaggtacatagtgcctgggctttggaacttcaaagaaggaagaaaagcgactctcaaagaaggtgtggtttatctgatgaagttgtggacgcacctcaagccaaagcccaagcgtaagtaa

SEQ ID NO: 350 - DNA, 7865 bp, Brassica rapa
  source 1..7865: mol_type = genomic DNA
catcaactctcgaggatcctttgattcacaaagactctccttctcccaccacaactctaacccgagttccttgcgagccatcaatacaccaatgtcctcttccatcggctcttccctaacaggagcaagacgccgtcccgtgagataagctttcacgacggcatccacggtagagtgaccgaaggagaagaaagagacgttggactgcgaagaaggaggagtcgccaagattgctatctgtgcgtcggcgagaagacagagctgcgcggctttgctgtaaagtccggaacaacgtttggagaaagtagtcgcgcgatactctctcttcgggatcttttccatcttatcgatctttctcttagtgcctcctcctcctactcttttcaccattctgatgaaactaattaaaccctaagtcgagagacgtttttgagtctataatttttctatgttgcgttgtggagaagaaacaagtcacactctctccgcgtagggtttgcttttataaactcgcttcaagttgatttttgttctttccttttttctaataaaactatcaccaattagaatgtttcgtgcatgttactcgcttacataaaaacggaaatattgaggagtcttgggaggcaagtatcaaaacatcaatctaattcacatggtcacatgtcgaagaatctacaaatatctttttcctaagtaacactaaatttacagataggtagagattaggatgaaggaatgactgaatttcgttcaattaggcaacaaaatatccactgtaaagtgaagcttaataattttataaaacttcgtactctcaggagaacaaaaacacagttcaagcttttgctagatatgaatgacaaatatgagactcaagtgtaatttctttagaaaatggtacaagctttttaccatgttgaattagtatgaaacaacactgctatgcgttttggccattgcttcttctctttttcttcttgcttgctgatacttccataccctcttgtgctccgcatggttctatttttcagtcaaaatgtgattttgttatattatgtaaaaagtaattttgctacttttcacatcaaagtgtatgcattttttaacctcagatttttcactcatgttttgaccaaaagtcttaacatagttttgatttggtggaatttagagaatttcattttagaaaaggatataaattttcaattttataaataaaaaatttgatgttgcagataaagaaaaggattatgaatatacatctcactgtgagaagttaaggatttttttctatataacaccctccatttttagccaaaatcttttttatatatattctacttaatagccgaataaaaatatacacaaaatatccgattccattttcagtcttttcataatggttatatatattctagtgttttaagccaaaatcttttatatattctaaagaaattcttgtaaagggatccccatatgtctcaatcaaataaaggaatggatgatggaaactcatggatgattgagtatgattcatcaatggtatcgatttcaatacatacagatgtggcctggtaagctttccattatatatatatttttttttgcaactagctttccattatattacttagagtatcctcctccctcgttctagagacggggatgctattacgtaccccaaagttttctaagttgcatgaaaactagagaaacgttaggtgtatactagagaaagtatattattatttaaaacattaagaaaagttagtgtttattgggtagttttgtatagcaacctaaaaatcataagaatttagttgtgttagtatgtttttaagttaattaacaccctaagcttatattaaccaagacaatttatacataaagtacctgagaaacgtaatctatctatactataatttgagaagagattttgcatatttatcattttttccatgattttataataaatcattagtccaattagcccaattaatattattattaaaaaacatatttaaatatatttatcataatatttaagataatgaatcaataaatagatataaaaattccaccaatctatatatgtactattatttaaaatataatataattatatatacttatgatgatattttgggttattagttaaatatattaacaataaatatttttcttttcttattcttattatcatgatattttgggttattaattaaaagatatatgcaattatactattggataattgatcataaattaatatgataaaactgtcaataaaacatattttcaagaaaaatataattcttatatatatattgtgttgctaccagcaaataatatttttctattataacaattaaaataattttaaaaaatatgtttcagaagcgattttgcttatttgtcactttctccatgatttaggataaatcattagtccaattagttaaattaatattattattatttaatatatttatcattatatataagataattaataaataaattaaaaaattctaccgatctatatatactattatttaaattattatttaagtatatatacttatcatgatagttttcgttattaattaaataaattaaccatagatgttattgttttcttattcttattatcatgatatttgttctattggataattgattatatatatgataaaattgtctttaaaaaaagatatttcttatatatattgtgttgttttctggaaataatattttctattatcaaaattaaaaaattaagatattaatcaagcaaaaaaaattgtatgaagaaagtttctaaaatatttcttatatgtgagtatttttaaaaatacaacacaataataagcatatatatatattgaagaaaaactttgtaatacacaataatttaatgtctgatttaaatttttgtgaataaaaataataacttatcatgttggttattgaattaaaaaaaacatagattaataaatattcataaaaatattttgactgcatgtgcgggcaaaatatctaataagtacataattaagacaaattgaggattattttgttgtataaataattttaaagtatagttgtatttcctattcgattaacaccctcgttataatctctaacctagaaaaattgaacttaagtacatgagaaacgtagtaactaaatatttataaaatgttagagatttatttgattgttttagtaacttaaatgttagttaagttatgacttataaatgtgaggttttctttttctagtccaaattattacttaaaagttaaaaactagaagtacatgaaaacgcaataactaaatatttaagaaatgttaaaaatattttgttaatttactaacttaagagtttaattaagtgatcataattagtgtgtgtgtgtgttttttcctaagtgatcattagtgcctatccatttgtgttttggtttccatgcaacctagcacctttttgtactgtttatttttctttccaattgctgacgtgtcaggtctatgcatgattgcaggtatcgacttgggaaaccatcaacgcaataccccccttggcgtgaacctactctgaaaacagcaagggttgcgaaaagcattatttccttgctggtgaagcaagcaagaatggctaggctttcatttcgagatgtcatcaaaaaagtttccgagttccaaaagaacgataataaagcttacatttcttctgatccctcagctgtggagagatatttggtcctccatgggcaagttattttgcagatttttgcaaaacaccctataaaggaactcaaaaagtgtgcatttattactggtcttgcaagtaaaatggaggaaatacaccacacaaaatgggcaatcaagaagaggaggaaaatattgccaacgaaacccaagaataaaatattgccaaagaaaccgaagagcaaactaaggataggtaagggatatgtggcatccaagaggagtgctatgcaagcaacaaaaactcacctggttgatagaatttggggacagtattactcagaatatggggccattggtgcagaaaatggcaaggaaaaggttcaagaggagagaaaaaatgaagaagaagatgatgtagaggaaccttcggtcctggaaacaagatgggaaggtgatattctaggaagaacatctgctggtgagcctctttatcaacaagccctcgttggaggagaggtagtggctgtaggtggtgctgtcctcttggaagtcaatgaaacttcggtcatctactttgtggagtacatgttcgaaagttcagatcactgcaaaatgctacatggaagacacctagaaagaggatccgagactgttctagggaacactgctaacgagagggaactattcctgaccaatgcatgcatgactgttcagcttaaggacataaaaggaacagtcagttttgagattcgatcaaggccatggggacatcagtataggaaagagaacaacgctgctgataagcttgaccgagcaagagcagaagagagaaaagcacaacacttgccggctgaatatttctgcaaatgcttatattcacctgtgagagggggtttctttagtcttcaacccaacaacataagtagcggtacaggatcttgcagtccatgtaagatcagggaggaggaaaaggagcggtcaaaacccaagctgaatgcaacaatgaccgggtttttcttcaacggggttgactattgcatggaggattatgcatatgtcaaccctaaatttatatataaaccgaaaaaggataagaagtttgagaggaacgttgatttaaaatccttcgttgtgtgtcaactacttgaagtagttcttccaaaggtatcgtcattaaatggtttatttgaggttatagtgagaagattttataggcctgaagatacacctttagagaaggcatattcttcaaacatccaagaagtaagtactaagaattatctcttatgtaatgatgtttgatgtaaaggaggttattatgttggtttgtcttataatcttttttcgtttttcttttttgcaaaatttgttataggtgtattacagtgaggacgtacatattctccctccaggggcttttgaaggcaaatgtgaagtaaggaagaaacatgatatgcccttacgcaatgattatctaacattagacaatatcttcttttgtgaggtatataactagtttgttaacattattgctttattcaatacaaagttgaagtgttactataaactgtcttgtaacagatgcctgtccatatcaaaccgaagttctctaccattaaagacgacacacttctcagaaagcaaaaggggaagggaatagagggtgaaactgattatgatgagttacctaaagagatgcgtctggctacacttgatatcttttccggttgtggtggcctgtctaagggactggaacagtcaggtatgaattgtctcaagtcaacacttttatgtatttgagcaagtttgattcatttgtatgctttatgcacacaaggtgtatctgaaacaaagtgggctattgagtatgaagagccagcagggcaggctttcaaacaaaaccatcctgagtcaacggtttttgttaacaactgcaatgtgattcttaggtaaaaatggtcaacaagattaaaaaaacttactcttaatgatgaaggtttatttcttgtgtttgtgatgagttgttttgagattaattatcggcagggctataatggaaaaatgtggagataaagatgagtgtctctctactacagaggcaaatgaacttgcagctaaacttgatgaagaacagaagcttgctctgccactgcctggtcaagtggatttcatcagcggaggacctccatgccaagtatttttttttcaatattgctgctatattttgtctacagtctttgttaaagaagtgactattaaactgcttcaattttgcagggattctctggtatgaacaggttccaggaaggctcatggagtaaagttcagcgtgaaatgatactagcattcttgtcctttgctgagtatttccggccaaggtattttcttctggagaacgtgaggaactttgtgtcattcaatggagggcagacatttaaactcactctggcttctcttcttgaaatgggttaccaggtaaaaacatcctagtgctattagtagtgttttcaaaaccgggcgaacctgatgattcaactaagttcggccatggaccgatcagatactgtgttgggttttaaaattattcaactggataaaaactattaagattatcaaaagttcatgaaatgaattaacaaaaatactagttaatacttcagtgttctatatttgatatttatttatattttaactatatattatatattttaactatatattatatttactaaaattaattttacatttattgaacaaaattagtatccatataatttttgtgaaccaaattcgatctgatctaagcatattaaaacatgacccaaatatttatcgtggttcaacttccagttcggtcttaaaaacattggctattagttagtcacattctctttgtgttcaacacttgattactatttagtagaagttggcatgtccacttacaaagtctgtgaagttgaactcagcatctgtttaacaatggaagtgttttccaggtgaggtttggagtgttggaggcaggtgcatatggagttgctcaatctcgcaaaagagcttttatttgggcagctgcaccaggagaagttcttccagaatggcctgagcctatgcatgtctttggtactccagagttgaaaataaaactatccaaaagatcacactatgctgctgttcgtagtactcaatatggtgcacctttccgctcaatcacagtgagagacaccattaacgatcttccacctataaaaaatggtgaatcagagaccaacagagaggtatgtatgatataacacatcatgaaaaaatatatttatgatacatatatcgaatcatttttttttcttgtgtcttgtagtatggagctgatccagtctcttggttccaaaagaagataagaggagacatgttagttctcactgatcatatatgcaaagagatggatgaaacaaacctcatccggtgtgaaaatataccaaagactccaggtgctgattggcgtgacctcaaaaacctcaaaaaaaaaaaggtcagtctaatgcatcatcctaactagcttaggggaactaaaaggaactcaactgtaaaatagagacaaacttaaatgctttgcttttcaaatgtaatacagattaagttatcaagtgggaagatggtagatatgattccagcctggctgagaaacaaagctaagactcacaacgggtggaaaggactctttgggagattagacatggaaggaagctttgcaacttccatcaccgatcctcggccaatgggtatggttggaatgtgcttccatcctgaacaagacaggattatttctgtccgtgaatgcgcccgatctcaggtaataataaaaactcttctgtgcatcagtaaacattgtggagatggcagagtacttgtttgtatggatggaaagatgtttcagatgttatgttgagtgttttcaatatatatagtaactgattggtatataaacaatggtgcaggggtttccggatagctataagttcgtagggggaatactagacaagcataggcagattggaaatgcagtgcctccaccattggcttttgctctaggtcgtaagctcaaagaagccgtacttctcaagaaacctcctcttcaacagaaaccctaa

SEQ ID NO: 351 - DNA, 6995 bp, Brassica rapa
  source 1..6995: mol_type = genomic DNA
atagacttcacaaaccaaacattcaacttttctgtataaagctcaatggtttgtaacagtgtaacgaagtgtatatcagtatatatatcattcagaataagataaaaaaacgaaaaactgacatgaaatctttggcaaaaatattgtaaggtatagttggctatagggggggcgttcagatacacattcggattcggtttagatctattcagattacagattttcatggtcaaagatttcaatttcattcgaatatttacaaatttcggtctggattcagttcggatcttttcaggtttgttcgggtttggataacccgcttaaattattttttaaaattttaaattcgttatatactttaaatttcttaaaatttaaaaataaaataatatattacatataaatttgaatagcgtatgccaacatgcctaaatttaacatataaattgttttgactagaatattttcatagagaatcaatagatatttcaagtgtttttttgaagtattgtttaactattttagacatttactttcaactatttgtatatattttaaagtttttttggaaacttcaaaatatcttatgtattttggatatttttatatattaaatctaaaaattattaatatattcaggtatataaatttattttgaattcattcggatattcgaaatactggttcggatcgggttcggggattcggttctctatatacaaaattttgaaaccgttcgaataattgaccaattttggttctggatttgatactattttcggatcggattctgttcaattttcaaattcgaatttttggtccagtcctactcgcatggttggataggggttaagtcccgttatgtcaataaaaatctctaaaaatgctggaatatcaattatgaatttttttcatggggggtaaatggaattaaatatctctcggatttctggactgccctaagagacgcgaaagagattttaggcgggatttgtcttttattttttccccttttagaacagaattttttagcgccggttgttgccgcgcgtcgcgtcgtttccctccttcttataccttctctataactcagcgaccccttagccaaatcctaatcctcctcgtcgtcctatcttcaatcgctctacctctcataagatcctttcgcatctctcctctcgatttcgcttctcaacgtaagtcttccactgttccgatctctaattacaacgcttgttaaacccctagcgctcattgctcaaccttataacctagattcgaactatctaacccgaaattgccatgaatctttagttgcttcgcctcaatttcgcttttaataataaaattttctgctgttttgatctcaattttaaaacccttgcgctctaattattcaacatttcaacctagattcttagtatctaactgttaattttgtttgtttcgcggcgattaattaattaactttgtgttttgctgacgtgtaggtttacggagatggtgagaaacggaaccaaggctggggagcaaaagaagagacctctcccagagatcaaatcagactctgacggcgaagacctctccacgaggcacactaggccgaagcgcgccgcagcatgcaccaacttcaaggagaagtccgtccgcatctccgagaaatccacaaccgtcgaaaccaagcagcaccagactgtggaggacgaagttgtagctctacacttcacagcatctcctcagggcggcggcgacgagcctcgtcagaccaggaggctgactgatttcatcttgcacgacgagtacggagtcccgcagcctgtggcgatggttgagatcggtgacattttcgtcacgggcgttatcttgccttctggtgaatgcgatgataaggagaaagggaaaggcgtgaagtgtgatggctttggacgcgtggagaattggagtatctcggggtatgatgatggctacccggtggtttggttctcgacggagctggcggattatgactgtggtaagcctgctactagttacaagaagatgtatgactatttctatcagaaggcgtttgcttctgtggaggtttataagagagtggctaagtctgcgggtggggactctggtgttagtcttgatgagttgcttgtggcggtttcgaggtctatgagccttgaaagtaaatgcttttctactgatttcttggttattagaaatttccttatacggcaaggagagtttatatataaccagcttgctggtttggatgagacggcaaagaaagatgaagctagctttgcggagattcctgtgctcgttgctcttagagatgagaatagtagacttgacaatggtgctgttattcagatggaaggaagaccttctaacggggttttgaggattgatggagtttctgaagctgcgaagtgcgaggccttgacatctgatcaagaaatggttgacgaggatcaaagatatgctagaattatgcaagacgaagaggataggaaaactatgcagcggcctaaaagaaaaaacggcgcagctttggcttctaataaaggatatgtaaaaaccactgaggatgagattgctggtgattatcctctcccggcttattacaagaatttcaaagatgaagcagatgagcttatagttgctgatgactatgaggttaactacgaggacctgcctcgcaggatgctgcacaactgggcactgtacaactcggattcaaggttcatatccctggagcttctcccgatgaagccctgtgcggatattgatgtgacgatatttgggtctggtttgatggcagaggacggtgggttctggtttggtctagatgatcctgatacttctacctctggacagccaaagaaggatcttgaggggatgcccgtattcctcagtcaaataaaggaatggatgattgagtgggggtgttcaacaatctctatttcaatacgaacagatgtggcatggtaagctgtctattctctattatttgtacccccatgtttctgcattgctttcttcttcttcttctgctgatgtctcgggtatatgcaggtatcgacttgggaagccgtcaaagcaatacgccccttggtttgaacctgttttgaaaacagctagggttacgataggcatttttggtctgctagaggagcaaactagaatgtctaagctctcatttgaagatgtcacgaaaagagtgtctgagttccagaagaacgataaagctttcatttcttctgatcgcttggctgttaacagatttctagtcggccatgggcaaattattttgcagatgttctcagaatttcctaaaaaggatatccagaggtgttcatttgttagtgatcttgcaaggaaaagggctgaaaggcacaacacaagatggaccatcaagaagaagaagattttgtttaaagtaaattgtaatccaagggcaggcatggcacctgtggtatccaagaggaaagctatgcaagcaacaacaactcgtctgatcaacagaatttggggagagttttactccaattactctccagaggaacccgtgcaggcagttggtgcagaaaacgaggaggaagaggttgaagaggagggtgaaattgaagaagatgacgcagaggaaactgttccagaacctgttgaggaggttgaaaagtctcatacccctttgaagaaaattcgaggcgtttctggtaaaacggaatcaagttggagtggcgagagtctaggaaaaacttctgctggtgagcctctctatcgacaagccctcgttggagaagaaattgtggctgtaggtggtgctgtcgtgttggaagatgatggaaacgaggtcatctattttgtggagtacatgtttgaaaaatcaaacaactgcaaaatgcttcatggaagactcttacagagaggatgtgacactgttctgggtaatgctgctaacgagagggaactattcctgaccaatgaatgcaagactgtatcgcttaaggagataaaaggaacggtcagttttgagattcgttcaaggccatgggggcatcagtttagaaaagagaacaccaccgcggacaagcttgaccgggcgagagcagaggaacgaaaaacgaaagacttgcctacggaatacttctgcaagagtttatattcgcctgagagagggggtttctttagccttccattaaatgatatgggctgtgcatctggaacctgcagttcatgtaggataagagaagatgaagagaagaagacagagatcaaactcaactcttcaaagacggggttttcgtgtaatggggttgactattccgttgatgattatgtctacgtaaagccagaagatatagatggatcgaaggaggctaatgggagatttaagtctggtcgtaacattggcttacgaccattcgttgtttgtcaaatactggagatcatcgtcctaaaagaatctagaaaggcttcctttgaggttaaagtgagaaggctttataggcctgaggatgtttctgacgaaaaggcctatgcgtcagatatccaagaggtatatagcgatgttcaaattaagttgctttgctggtttcttcatttgtgtttattacaatctttttaactctttttttttttcttctttttttggaatttgttttagttgtattacagcgaggacacagatgttctccaaccagaagctctagagggaagatgtgaagtaaggaagaaaattgatatgccctcacgccgtgagtatccaatatcagataatatcttcttctgtgaacagatctatgacccgtccaaaggttctctcaagcaggtacatatttttctaaaatcatataataggtgttcatataactcatttgttatgattattgctgtttccgatacaaagttgaagtgtttctttgatctgacctgtaaacagttgcccgtcaatatcaagccgaagtacactactgttaaggacgaggcacttttaagaaagagaaaggggaaggggttagtgactgaaactgattctgtgactgacaagcctgaagaggtatctaaagagacgcgtcttgctacactagatattttcgctggttgtggtggactgtctcagggacttgaacaggcaggtatgtattatctccagtaaacgcttctttatcaaccataaaaccctagaactagttggattcatgggcatgctttttatgtacaaggtgtctcggcaacaaagtgggcgatagagtatgaagagccagctgggaaggcttttagaaaaaaccatcccgaaacaacagtttttgttgacaactgcaatgtaattcttaggtaagtagccgacaaagataaaacactttctcttccaatgtggctattttctgtgttgagatctgttgtttgtaattatctatagggctataatggagaaatgtggagatcaggatgaatgtatctctactaaagaagctaatgaactcgctgagaaacttgatgaagaccagaaacgtacgctgccactgcccggccaagtggatttcatcaatggaggccctccatgccaggtatatgttctggtctttacaattgtcgttgaataagtgaagaaaaggtgttaaccagtgcaatttttcagggattctccggtatgaatcggttcaaccaaagctcttggagcaaagttcagtgtgaaatgatattggcattcttgtcatttgctgattatttccggccaagatactttctcctggagaacgtgaggacctttgtgtcattcaataaagggcagacgttccaacttactctggcttctcttctcgaaatgggttaccaggtgacactcgtgctctgtattttccacatatgaatgctcccgagtagtttagaatgtgaatttgacatgtgtgaatatgatgtgatgtgtggtaggtgagatttgggatcttggaggcaggtgcatatggggtttcccaatctcgcaaaagagctttcatctgggcagctgcaccagatgaggttctccccgaatggcctgagccgatgcatgtctttggtgttcctgagttgaaaatctcgctgtctaaaggtgtacattacgctgctgttcgcagtactcaatacggtgcacctttccgcccaatcacagtgagagacacaattggcgatcttccatcagtagttaacggagaatccaacacgaagagagaggtatgatgatgtcacacatgaggagaaaaaagtatcaacatgtaggaaactcatatgattcttttatcttgcagtataaagctcaaccaatctcgtggtttcaaaaggagataagaggagacaatattgctctcactgatcacatctgcaaagagatgaacgaactaaacctcattagatgtaagaaaatcccaaagaggccaggggctgattggcgtgacctcccagaagaaaaggtcagagtcttttgtattatcacactgtaaatcaaaggaatagttcagtgacgttaaatgctacatcttgtttacccttttttttcaggtgacgttatcaaaagggcaagtggtagatttgataccatggtgtctgccaaacactgcgaagcgacacaaccagtggaaaggactgtttgggagattagattgggaaggcaactttccaacatcaatcactgatcctcagccgatgggtaaggttgggatgtgcttccatcctgaccaagacaggattatcactgtccgtgaatgcgcccggtcacaggtatatagatattatgttcctagtcaagacggaagcttttgatttgttcctaaagtctaagtaatgaaattgattggttgtattataaaaaattgtggcaggggtttccggacagctatgtgtttcaagggaacataatacacaagcataggcagattgggaatgcagtgcctccacctttggcctttgctcttggtcggaagctcaaagaagcggttcaactcaagaaggtcaccaaaacaaactag

SEQ ID NO: 352 - DNA, 7049 bp, Brassica rapa
  source 1..7049: mol_type = genomic DNA
tcccaaaagaaggcaaaaaatcgtttttccaccaaaacgtaaaatttattttaccaccaaaacctaaaatttcatttttctgataggaaaacaaaacttgtttttctagcaaaaacaaaatttgttttcctgccaaaaagccaaattcagtttccagttaaaaaaacaaaacttgttttcctgctaaaacataaactcgttttttcgcctagaaacaaaaaaaaatcatttttccaccaaaacgaaaacttgtttttcccgctaaaacgtacaatttcattccccctccccccctcccaaaacacaaaaaaatagtttcccgccaaaacacaactcgttttcccaccaaaatacaaaactcgttttccctatagaacatagaatttcattttccactagaaaaaaaaacttgttttcctatcaaaaacacaaaaactcggtttccaaaaagtaaaatcttatttttctctcagaaacgtaaaatttcatgttcccaccaaaacataaaattttgttttcttgccaaaaacacaaaaattgtttctcaccaaaacgtaaaatctggtttttccaccaaaaacaaattttcatttccgccaaaacacataaattttgtttttcgcctaaaacgaaaaatcatgctcccaaaaaaaaatattaggtgtaactgttaaatataaaatagaattagtagaataaaaatgaaataaaggaatgaaatatgatgaaaaatggaatatatttctttccatgtattcatgaccaaaattgtaagtaaatgattcttttaaattttgtttacttttttatggaactgacgaaatgaacatttcatttcattaattacaaatggtaaaaattactgcggaataaatgaaatagaaattttacattatttcattccaaaaatcgacaatccagtcgcaacttcaaatgttgttttatctcgtttgcccaaaaataaaataaaatttcccaaggtgtacacactattcatgccaatgcgaaagacaatcaaggcgggcttattatttttaagttttttttattaattattattttacgaaaaatgtttaagcgccgatgatagccgcgcgtcgtttcactctgtctcatctccttcttatatactcttcaacccatcctcaagccctacctacctagtcatagcctcctcactcactcattcgctctcctctcgatctctccgtaacctaacgtaagctctcttctgctccgatctcaaagtagagtcattgttaaaccctacctctctcgctgctcatcattctaacctaaattcaaacgatccaccctgaagcttatatcgtatgttttattctgcttcgattttcaaattgctcactgttccaacctagattcgaaggattctacttaaatttctgtgattattgttgtttcgaagcgatgtaatgtttgattctcatttctagagttttgatcatgattttgagtatttttttctgtaggttttagaaaatggtgagaaacggaagcaaggctgcgaagcagaagaagagatctcttccagagagcaaagagaccgaccacgacgatgatctctccacgaggaagacgaggccaaagcgagccgcagcatgcacaaacttcaaggagaaatccatccgtatctccgagaaatccgccaccgttgcagcaaagcaccatcagactgtggatgacgagattgtagctctacacttgacagcttcttctccccagagcggcggcggccacgagcctcaccaaaccaggagactgaccgatttcgttttacatgataccgacggagtttcgcaggctgtggagatggtggaacatgtcgacatgttcatcacaggtgtgatcttgcctactggtgaatgctctgacaaggagagagcaaaaggtgtgaggtgcgaagggttcggacgcgttgataactggagtatctccgggtatgaagatggctccccggtggtatgggtgacgacctctctggcagattacgaatgcgttaagcctgctaccacctacaagaaggtgtatgattatttcttccagaaggcgtatgcctcggtagaggtttacaagaaagtggccaactctgacttgatgagtcttgatgagttgcttgtggcggttgcgagggctatgagcctcgagactaagtgcttctctagcgattacttggccatcaaaaatttcgttatatcccaaggagagttcatatataaccagctcgccggtttagatgatacggccaagaaagatgatgcaagattcgttgagattcctgtactcgttgctctcagggatgctagtagtagtagcatacttgaatatgatgctggtcaaccttctaatggggttctgaggattgatggagctgcggagaggaaggccatgtcatctgatcaacacatggttgacgaggatgaaaaatttgctcgacttgtacaagacgaagagtatatgaaatccatgcaaaggccgaggaaaagcagcagctcagcttctgtttcaaagaacggatacataatgaccactgaagatgagatcgccaatgattatcctctcccagctcattacaagaactcccaagtagaaacagacgagcttttgttataccatgacgacgactacgaggttgacatcgatgacctgcctcgtaagatgcttcagaactgggcgctttacgacatcgattcacggttgatatccctggagcttctcccgatgaagacttgtgctgatatcgatgtgaccatctttggatccggtgtgatggcagatgatcaagggatctggattgatctagatgatcctgctacctctatgccgtcagaggaacatggtgggatacctatattcctcagtcaaataaaggaatggatgattgagtatggggtgtcaacggtctcggtttcgatacgaacagatgcggcctggtatcgacttgggaaaccgtcaaagcagtacgccccttggttcgaacctattctgaaaacagcgagggttgcggtcggcgtttttgctctgctggaggagcaaactagaatggctaagctttcgtttgaagatgtcgtaagaagagtgtgtgagttcgagagtaaccataaggcttacatttcgtctgaccgcgcggctgttgacagatacgtggttggccacgggcagataatcttgcagatgttttcggagtttcctaacaaggagatcagaaggtgtgcgtttattactgggctcgcgaataaaagggcggagaagcacaacacaagatggaccatcaagaagaagaagattttgctgaaagtgaatttgaaccgaagggcgggtgtggcacctgtctccaagaggaaggctatgcaagcgacaacaacgcgtctgatcaacagaatctggggggagttttactccatttactctccagaggagccgttgcaggcagttggtgcggaggaagaggctgaagaggatgaggaggaggacgaggaggaaaatgaagatgacgacgcagaggaaactgaacctgaagctgctgaggtcgaagaggctcatacgcttccaaagaaaattgtaggcaaatgtggaaaaatggaaacaagatgggatggtgagagtgtaggaagaacttctgctggtgagcctctctatcgacaagccctcctcgaaggggaaagagtggctgtaggtggtgctgtcatcgcggaagtcagcggaagtcaggccatctactttgtggagtacatgtttgaaagttcggatcactgcaaaatgctacatggaagacttttacaaagagggtccgagactgttctggagaatgctgctaacgagagggaactctttttgacgaacaaatgcatgactgtacagttcaaggacgtaaaaggaacagtctgtttcgagattcgaacgaggccatggggacatcagtttagaaaagaggacgccgttgcggataagcttgaccgggcaagagctgaagaacgaaaggcgaaagacttgcctacggagtacttctgcaagagtttgtattcgcctgagagaggaggcttctttagtcttccgctcagtgatatgggctgtgcttctggatcatgcacttcatgcagattaagagaggatgaagtgcagaggaaaaagatcaaactaaacgcttcaaagactggtttttcctcctatgggattgactactgcgctgatgattttgtctacgtatacccagactgtatcgatggatcgaagaaggctaatgggaagtttaagccagggcggaacatcggtttaagagcctttgttgtgtgccaacttgttgagatcattgtcccaaagaaatctagaaagggttcctttgaggttaatgtccgaaggttttataggcctgaagatgtatctgaacgaaaggcctatgcttcagatatccgagaggtagcaattatttgttctgtaatataatatgcttcataagtttatcgtacaatctttttaactctgtgtttttttcttcctttttttgcaatttgttttaggtgtattacagcgaggacacctttgttgtccaaccagaggctctaaagggaaaatgtgaagtaaggaagaagaaagatatgccctcttgtagtgagtttccaatatcggagaacattttcttttgtgaacaaatatacgacccatctaaaggttccgtcaagcaggtatataatattgtttatataactcatttgttatgattgttgctgttcaaatacaaaattaaaattaaaatgtttctcttaactatcttgtaacagttgcccctcaatatcaaaccgaagtactctacagttaaggacgacgcacttttaagaaagaaaaaggggaagggagtagagagtgaaactgattctggtattgttgtcaagcctaatgagttacctaaagagatgcgtctggcgaccttggatatttttgctggttgtggtggcctgtctcaaggactggaacaagcaggtatgtattatatctccagccaacacttttatcaaccaaaagcgcttgaataagctggtattcatgtgcatgcttttgttatgtacaaggtgtatctgcaacgaagtgggcgatcgagtatgaagggccagctggggaggcttttagaaaaaaccatcccgaaacaacagttattgttgataactgcaatgtgactcttaggtaattaattagtagacaagatacagcgctttactctctctctcaatgtggatgtttcttgtgttgtgatcagttgtttgagattatctgcagggctataatggagaaatgtggagatcaagatgagtgtatctctactacagaagctaatgaactcgctgctaaacttgatgagaaccagaagcgtactctgccactgcctggtcaagtggatttcatcaacggaggccctccatgtcaggtatatatacatatattaagattgtttctcgtttgcataagtgaagaagagactttaatctatccaatttggcagggattctctggtatgaaccggttcagccaaagcccatggagtaaaattcagtgtcaaatggtattagcattcttgtcttttgttgattatttccggccaagatactttctcctggagaacgtgaggaactttgtctcatatagtaaagggcagatgtttaaactcactctggcttctcttctcgaaatgggttaccaggtaaaaaagactcatgctctctgtaagcattgcaatgtgaaaataaaattctcaaagtgtgtgctaatatgatgttttgtcaggtgagatttggggtgttggaggcaggtgcatatggggtttctcaatctcgcaaaagagcttttatatgggcagctgcaccggaagacgttcttcccgaatggcctgagccgatgcatgtctttaatgtttcacagctgaatatctcactatccaaaggtttacgctatgctgctgttcgtagtactcaacatggagcacctttccgtccaatcaccgtgagagacacaatcggcgatcttccacctgtagagaatggagaatccaatatagacaaagaggtatgatataacacacacacacacatcaggagaaagaagtgtttttatgatatgacacatatcaaaatatgtcttgtgtgttgttgcagtatgaaactgatccagtctcgtggttccaaaaggagataagaggaaacaagaatgttcccactgatcaccttagccaaacgatgaacgaacacaacctcatccgatgtaaaagaatcccgaagaggtcaggtgctgattggcgtgacctcccagatgaaaaggtcagagtcctataataagactcttatgcatatccgcctagacaaactttactaaactcaattatttttaacactctaattacaggtgacgttatctactggactggtggtggatttgattccagggtgtctagcagcgaaacctggtaaaaaaaagcagtggaaaggactgtttgggaggttagattgggaaggcaactttccaacttgcgtcactaaacctggtcccatgggtatggttggtaagtgcttccatcctgaccaagacaggatcgtcactgtccgtgaatgcgcccgatctcaggtaatatatgaacctcctttttctctttattagttaacgttttaggatcgcgttggcaaattaataaaatattttttacgattactttacaataaaaataaaaatctgtttaactacgataaaacaaaagctacataacacaaaggttaatgaatttgacattgaaaactaaaattagcatataaaaaatctgtaaaaatgtcaaatatttagaaagagagtaagtattgtgttccaagtcaagtaatgatattgatttggttgttatgtggcaggggtttccggatagctatgagttcgaaggggacatagcacacaagcataggcagattgggaacgcagtgcctccccctttggcctttgctcttggtcgcaagctcaaagaagcagtacagctcaacaacttcgccaaaagtaattag

SEQ ID NO: 353 - DNA, 2310 bp, Brassica rapa
  source 1..2310: mol_type = genomic DNA
gagtgtgggtcgacggaaggtctaaaagaacagacgatgtctttgtatttgtctgaaacgctttctaagaaaaagcacgggttcgaattcggtgcactggacatcaagagccacttggagaagctcagtttctcagagattgtttcaacgtctatgataatgttggtagcgtgaaactgtcttttctttcaatggcttctcctaacaaatgtttatctttggttaatagattttctccgaggacaaacacaaagatgcctatgagctcgtgggtttgccattttcacatctccaaggtacaaaaccacatacatgtgtgtctatatatggaataatattctaaaggaatttcccttttttttttttttttgtaaatgtgcagaaagttctgaagcagaaacaactggatgtcgaatctgttgtctcttcattaaacaagcagtatgcaaacaggaagaaagagctgaagcttgatgtaattgatttggagatacaaagcacgtaagatacatcctcaaaaatacagtattggcatttttatgtctatattcaatactaatctgttatatattttatgtgttgttgattagaaaccactgttcttgggatgataagtcaatggaagatgatagattctgcatcacagttactgttcttgaagcctccacacacggttctttggaacttgatgctattcgacttgtcttgatcccttttcttctcgactctccggtgaaaggtaaaaaaaaaaaaaaaagaacggacagttcttgttttgttagtagtacgagttgtgtcatatgatgtttcttgcaggctacggagagattaaaaaggtggagatcttatgggctgacagaccaaaagcgccgaaaaggaacaagaaacatatggcgggtgagcttttcgtgaaggttacaatgcatggagttcgtggcaaaaagaacatctggagcgctcttcttgaaacctgtcttcccattatggatatgatcgattggacaagaagccatcctgataatatccgacaatgctgctcggtttatggaattgacgctggacgtagcatcttcctagcggttagtttcttttgtacagtttgtgggagtcttgcagcttctaaagttttggtgatggttgcaggatttggagtctgctgtggctgatactggtaaggggatgctgcgagaacatctgcttcttgtagcggattgtctctccgttacgggagagtttgtggcattaaaccccaaaggttggagtaaacaaagacaggctgaatccactcctgcaccttttactcaagcttgcttctcggtattgtaaactaaactctaccaacttctttttccggttgtgacatttggtttaaatatctacagagcccaagtcaatgctttctcaaagctgctaaggaaggtgttacagacgagcttcaaggatctatcgacgcattagcttgggggaaagttccttctttcgggactggagatcagttcgaaatcatcatctccccaaaggtaataacttcttctttaacattattgtttagtcacgacttcttgtaaaggtttttaaattagtggtgtattcatgcgttgattaggatcatgggtttagtagtacaccagtaaaagtgtatgactttctgagtagtacagcaacgcttccaaagagaaaggcaagctccttgcccaaatcagacaacttcacggtccagccgttccccttactcgatactgctctctccaaagcagtgaagacactcgatgggaaaggactcaccaggtcgcagctcagaacgatctttacatgggacgacattgaaaagctttcccggtcactgaaacgtattctctacaagtaaggaaacaaaatagtcttttcttgctttcaaaccttttgacattcagattcttttgttagttacgagatcgatgctacgttgaatgagagggatgaaagacttttgatgatggctcttctctttcaccccaacagagatgagaagctaggaccaggcttccaaggaatcaaggtaaatcatcctaagaaaaaaaaaaaaaaaaactctttatatgtttcttgaaaaacattataagattctgacctggttttgtcttacaggtggctaattctaagcatgggaatgctcgttgcttcgaggtggtgagaacagacggaacaacagaagatttctcttaccataagtgtgtgttgggagcgacagagatcattgcccctaagagagttaacttctacaaggccaagtaccttagaaacggtacggtgcaggccggtgctatctaa

SEQ ID NO: 354 - DNA, 7444 bp, Brassica rapa
  source 1..7444: mol_type = genomic DNA
accaattgatgaacaaatattcttattttctgacgtaaagattataattttcaatttaaacatggttttaaacccccaaaaaaatctaatacagctaataaaatagtgttaaggaaaagtggggatcgcaggattataaagttctgcttttcaaggcagattcaaagtcttatacaaataaagtaactgaactaaacagagaaacaaataaaagaaaaaattaaaaagaatgaaataccaaaaaggtaaaagtaattgtagtacaagtcaaggggtaatttcggtattccaactacatcttcttcctctttttttttcttttttttttcaattttcacaaaccaaaagactctgaaggcagatttttcgtttcctctgcttcctcctctggcgtttccttcgggagaacaaacgccggtcatcgggtttcgaaaaccagtaaggagcttttactacattgttctcagttctctcagtcttcttctttgctggtttacttttttttctttctctcttcttttccttttttggttatttacgatcaatctctctgatttctcgtctcgattttctttgtttttgatcgaccctcttctgtgaaatccaagtttcttttactaacctctgtaagattctcgatgattctgtgaatttgcgatcgtcaaaattttgcaaagttgagtgttttttttagtgagccttcttgaaaagggttcttgtctttctttctttctttctcagaactccattagtggggttcttagctctgtgagttttaaagtacataaaaataacaaactttcagtaacatgtgttcaaagttgaaacctttttgtatgcgtttgtgtttggaaatgattttctcttctgtgggtcttgttgaagttttttctaagatatttaaataatgtgtgttcaaagttgaaaccttttctgggggttgtgtctggaacagaatctcctttttacgatctgtagatgatttgtctcctttctgggttttgttgaagacttctctttgatattcaaccagtgaatctattatatgtgtactattaagtttaaagttccgaaagtttgtacactttgtgtgttcaaagtttgaacctttttttttgtgtcttctgcaaacaaaaaaagttttttttttccagggttgggaaagatagagaatctgctttgtctaaacatgtttttctcctttttgtgggttcatgctagattccatctgtgatttcaatataaaatctccacttttttcttttaaaaaaaaatctatcttgtttgtgataggccagtgggagagacatactttgctcagtgttttgtccgtacacaatagttgtctatttatctgtaaacagtggtgtatcttgatcatgtgggagacttttttggttctgtctgattggtgaactatataagttactgatgaaaaatatggtttttttttcacttggccttagtgatgaactttcttgttgtaggtgattctgcaacatggaggaaaaatgcgaggagcttgaggtgcccatggggactctaaagtcaataagctttagcatttcgaataacaaagaccgagtaagtgttgctttgaatattcaatatcctatagttacatcaacttacgtctgttgttagtgagtgcattaagccaaaacttaaatgtaaatggtatattatagaaaaacatgtctgtcatggaggttgaagcagcgaatcaagtgactgattcccggttagggctcccaaatcgggatgatatatgcaaatcatgtggcagcaaagatagaaaagtttgtgaaggtatatattaatgaatccagttttggtgatatatacatgtggaagcttattaatgattgtttttgtttagggcattttggggttataaacctcaggtacccggtgattaacccgcatttacttaaggaggtagctacattgttgaacaagttctgccctggatgtaaatacacgaagaaaaaacagtctcagtctcaggttcaagagtttttttttttaattacatgtaagagagtaaatgtaaagactaatactgactttttggtttggtacagaatcctgaagaccggcctgacagatgtagatattgcattgtaagattactgctaataataacattctccttttttaatgaaagtaaaaacttgtgtgtttcttcttacaagtgtttttgttttttttgtttttgaatctcttcagtcaaatacagattaccctctaatgaagttcagggtaacaacaaaagaagcctttaggcgatctggaatcgtttgtgaagtgagtgaagacaatgtgttgaagctcagtaaacggggactatcagcattacctccagattattgggattttatgcctaaagacccaaatatcgacgaaagctgtttgaaaccaagcaggcggattctaactcacgcacaggtgtgtgtgtatacaagtgtgacatgttaaataatccaaatactcatttgttttttgggtttgaattaaaaacttttcactttattttgctcgtaggtttatgcactgttgagtgggattgatgagagggtgatcaggaaggagatccccatgttcgactctcttcctctggcatcttttccagttacaccaaacggtcatcgtgtatccgagatggtcactcagttcaccgggcctcgactagtttttgtaagttgcaaaaaatctataattattttcttttcttttttttgatgtaatattatgtctcattgttacacttttgtttctaggatgaacggactcgtatctacaagaaactagttggctttgaaggaaatggtcttgagttgagttcacgtgtgatggaatgcatgcaatactcaagagtaagcagtagcttccttccctctcttgtaatgatctgtgatggttagttaattcttgttttatgtcacagctcttttcggaaaacgtgtctccgagtcaagaatccgcgaacccttaccagaagaagtcagatactcccgagctacgcggtctaaggttcatgaaagatgtgcttctcggcaaaagaagcgaccacacgttccgcacagtggttgtcggcgacccttctctcaagctcaacgagatcggcatacctcggagtatcgcagagaggcttcaagtatccgagaatctcaacgactggaacagagatcgtctcgtcacttcctgtttccacaagctcctcgagaaaggagagactcacgtgaggagaggaggtcgcttagttggtatcagagccatcgacgatctccaaacgggagacagcttcttacgcacgttaaaggatggagacacggtgctgatgaacagacctccttccattcatcagcactcgctcatcgcaatgtctgttaaagtcctccccactacctccgttgtctctttaaaccccatctgttgcttaccctttcgtggtgacttcgatggagactgtcttcacgggtacgttcctcagtctatccaagccaaggctgagctcgaggagcttgtggctttggataagcagcttgttaacagacagaacggtcgtaacttgctttcgttaggacaggacagcttgacggctgcgtatctggttaacgtcgagacgaactgttttctgaaccgagctgagatgcagcagcttcaaatgtattgcccctttgagcttcctcggcctgcgatcatccgaggttcgtctacgagcagtgagccgcaatggacggggaagcagctgtttgggatgcttttccctcccgggttcgagtacgcttaccctctgaataatgtggttgtaaccaacggggagcttttgtcttcttccgatgggtctggttggttgcgtgacggagaaggaaacttcatccagggtttgatgaagcacgataaagagaaagttcttgatataatcttctcggctcaagagatgctctctcagtggttactgaatcgaggactgagtgtttctttatctgatttgtacttcgcatctgataaacactctcggagaaacttgacggaggagattagttacggcttgcaagaagctgagcaagtctgcaacaagcagcagctcatggtcgagtcccgcagagacttcctcgcggtcaacggagaagaagatacggtcgtcgctgatgatttggagctgttctgctacgagagacagagatcagctaccttaagcaagctcgcggttagtgccttcaaggacgcgtatagagacgtccaggctctggcgtatagatacggagaccagtcgaacgcgtttctcgtcatgtccaaagctggtagcaaagggaacatggggaagctcgctcagcacagtatgtgcattggtcttcagaactcttctgttgcgttgtcctttgggttcccacgtaagctgacttgcgcctcgtggaacgaccccaacagcccgcttcgaggcgcaaggggagaagaccgaacggctcatgagtcttttgttccctttggtgtcgttgagagttcgtttctgacgggtctgaatcctttggagtcttttgttcattccgtgacgagccgagacagctccttcagcggtaatgctgatcttcccgggacgcttagcaggaagctgatgttctttatgagggatatatacgctgcttacgacgggacggtgaggaactcgtttggtaaccatttggttcagtttcgttatgagagtagtgatgatgcagaagaggacatgactggtgaagcagttggatcactttctgcttgtgcgatcaccgaggctgcttacagcgctcttgaccagcccattagccttcttgagacttcgcctcttctgaatcttaaggttctctctcttcttgttattacttctcctcttggcgtttttgataaatatatctttcttgtgcagaatgtgttggagtgtgggtcgaagaaaggtctgaaagaacagacaatgtctctgtacttgtctgaaacactttctaagaaaaagcacgggttcgaatacggggcactggacatcaagaggcacttggagaaactgtgtttctcagagattgtttcaacgtccatgataatgttggtaactttaactgtgaatctttttttccagtggcttcttctaacaaatgtttatttttggttaatagattctctccgaggactaacacaaggatgcctatgagctcgtgggtttgccattttcatatctccaaggtaaaaatataaactcacccacatcacatgtcttataatatggaaaaaaaaacattctaatttttttgtacctcttttctaacattgcagaaagtactgaaacagaaccagctggacctcgaatctgttgtctcttcattaaacaagcagtatgcgaacaggaagaaagaactgaagcttgatgtaatagatttagatatacaaagcaagtaagtacatcctcaaaatattcgcatctttatgtctatattcgatactaatttgttatacgtttattatgtgttgttgagtagaaaccactgctcttgggatgataaggcaatggaagatgatagagtctgcatcacagttactgttctcgaagcctccaggcacgattctttggagcttgatgctattcgccttgtcttgatcccttttcttctcgactctcctgtcaaaggttaaaaaaaaaacgaacagttcttgctttttgttattgttaccgttcttactagttgtgtcatgttgtttaatttcttgcaggctaccgagagattaaaaaggtggatatcttatgggttgacagaccaaaagctccccagaggaacaagaaaggcttggcgggtgagcttttcttgaaggttacaatgcatggagttcgtggcaaaaggagcttctggagcgctcttctcgaaacctgtcttcccattatggatatgatcgattggacaagaagccatcctgataatatccgacagtgctgctctgtttacggaatagacgctggacgtagcatcttcctagcggttagtttcctttatacagcttttgatcttgcagcttctaaagtgttttaagactttttctttggtggtgatggcaggatttggagtctgctgtgtcggatacgggcaaggcgatgctgcgggaacatctgcttcttgtagctgattccctctcagtcaccggagagtttgtggcgctaaaccccaaaggctggagtagacaaagacaggccgagtctactcctgctcctttcgctcaagcgtgcttctcggtattgttaactaaaccgtaccaagttctttttcccggttatgatattggttttgacattggtttaaatatatctacagagcccaagtcagtgctttctcaaagcagctaaggaaggtgtcacagacgagcttgaaggatctatcgacgcattggcttggggcaaagttccttcttttgggactggagatcagttcgagatcatcatctcccctaaggtaacaacaacttactttaacatcttgtctaacaatattcaacaagggcacatgggatgtttgatgacgtgttatgatttagtataagtattaggaaggaataaggagaaaggttatctagagattagatcacactattaattcggcatttcactatcaaatcaacgtttctttgctttgttctttgtttctcgtcttcttgtaatggttttttaattagtctattaatgcgtttcatcagaatcatgggtttagtacaccggtggtagacgtgtatggctttctcagtaggacggccacgcttccaaagagaaaggctgtccgtgcaacaagctcctccttgcccaaatcagacgagttcacggtccagccattccccgtgctcgacacggctctctcgaaagcagtcaagacactcgatgggaaaggactcaccaggtcgcagctcagaatgatctttacatggaacgacatggaaaagctttctcggtcgctgaagcgcattctctacaagtaaggaaacataacttttgactattctggtccaagaacagtaaagattcatcatcctcttggctttttgttttattagttacgagattgatgctacgttgaatgagttggacgggagacttctgatgatggctcttctcttccatcccaacagagatgagaagataggaccaggcttcaaaggaatcaaggtacaatcatcataagaaaaataactatttatatgtttcttgaaaaaaacatcgaaagatcctgacatggttttgtctttggaggtggctaattctaagcacgggaatgctcgttgctttgaggtggtgagaacagacggaacaactgaagatttctcttaccacaagtgtgtgttgggagcaacagagatcattgcccctaagagggttaacttctacaaggcgaagtaccttagaaacggtacggtgcagcccggtgctatctga

SEQ ID NO: 355 - DNA, 9819 bp, Brassica rapa
  source 1..9819: mol_type = genomic DNA
ggaagaacaagttaacattagtaaaagacataatacatgcgtaaaaattaactcatcttaaactatatacacaaataaattcaaatatattgtttcatgcattaattcttttaataatcaaacaaaaatttgataacataaatatataataaaagcgacaaatacatgtgacaatttaaactttagcatataaattgtaaaactacaatttattgtatttgaaatagtcatattagcatttaaatatatgtttgatgctaaaatatatatcactaataatgtaaaacatatatatatatatatatatatatatatatatatatatatatatatatatatatatatatatatatatatatatacgtttgcggaagtcaagatttagttttttattttatttcggatatatgtttgagtttggatcacatttttggtctcattcagattgttagcttttaaatattcttcaaaataaacatgaaaatgtatatttaaattacttatatagttccaaaattattttggatctaattcttttacagattattttcagattttcaatctgttcgaacctaattgaattcagataatacacaaaacctaaaataaaattttacaagatccattggtataactatacaacccgaccggtttaaagtttttgtggtggttgggattccaaaagttcttagccctagattttaaccattttcaccatcatcgtttagtgctatctaactcgtaagactgtatcacatttaataatttactcagaaaattaaagcgagcatcctttttttggtcaaagtgagcatctttttcccactttgcatgcaatgtgtattgtttagaggctgaggaagaaaggattttgggagaaaatcagattcttgggtctctctctctccgtcactttcactcttttcttcactcagattctccctcctctcttctcctccaaaaacccttgtctccggttaactgggtcaaactcctccgtcgatccttaggtattttgcctttacccagctctctctctctctctctctcttccagtgtggatcatgaacttacgccgccgtgtttctgggttttattttatccgttctgggtttagggtttcaaatgtagcttctttctctcggtgtgaaagtttggagatttcgttgttttctgctttcgatttcgtgaaaaacagaacataaaggttgttcctttacctgtggggttttgaaatgtgggtttctcccggttcgaaagttacgagctttcgcctttatcttgtctcttctgctctcgattttgttgaaaacgagcagaaaggttgttcctttaagcagttttttttttcgattcttcaaaaaaatgggtttctatttagagatttgtgggttttagtgagacttgatactgtcttcgtttctctgtttggttgatctggtaagtgctctaactcggtctcgctgttgtctggattaaacttttttttagggttttgtcatggaggaagcatcttcatcagatattctagaagcagagattgttggaatctcattcgctcttgctactcatcgtcagatcgtaagttaaccaagagtttgtcctctctggactacttgcatttttgtttggagttgcatgtatggctttgtttagttctaagttagaatattcatgattagttagttccaaacacaagaagtaaggaagacgagtagccaaaacccctttctatgtttttggttaagttcgcaccaagttttgaagtgataagtgagctcagctctgttatatagtcgcttcagctatagtgctatatgtttgttctgagatatatcctctgctactcttgtattactcactggtctatctttctttcttgcagcgtctagcatccattagtgacgctgggatcaaccatgctagccaactctctaacgcattcttggggttacctctggagtttggtaaatgtgaagcttgcggtgccactgagcctgataaatgtgaaggtaaactagttctgttttcttgctatcttcttgttcttacatgggttgttgtaatattgatgttcgtttcttcatttttaggtcattttgggtatatacatctgccagtgcctatataccatcccgctcatgttagtgagttgaaacagatgctgagccttctctgcttgaagtgtctcaagataaagaagattaaggttagtacctcattgagttttctcaaatttagtaagatctagcatgaaccgtaaaaaaccttgaccaattgtgttcaccttatgattacagagcacaagttctgggcttgcggagcgcttactaggcgtctgttgtgaggtgagtaatgccatacacattctgattgtttcatgtcgcctttctatagttgggttgtcttaagtttaactaactgagttactcttttaggaagcttcgaacatcacaattaaagataaatcatcagatggtgcctcatatcttcaactgaagctcccatctagaacaagacttcaggagggcttctggaatttcctggaaagatacggttaccgctatggaagcgaccatacccggcccctgctagcaagagaggttcttactttcttctccatgcttttgtttcttatgcgttaccttaaatactttgttttgtatttatataacatgtgcagaaccttttgctaggatttttctgtaaattcaagttcttttggtataatctaggcttcctatcagattagttaacgttgttggatacaagcatgctaagctaaatatctatacttttgaatttctgtgcgaatgtttgggcagaagaagcaattagtatacatttgtaaatggctgctatgtgatcttatagtttcctggatcttctagggttttaatgtcacaggcattcttaccttctgtccttgtcaggtaaaggaaattttaagacggattcctgaagagacaagaaagaagctcacagcaaagggacatattcctcaagaaggatacatcttagagtatcttccagtcccgcctaactgtctgtcagtgccagaagtttctgatggttccaactccatgtcagtggtaaggccgtcgaaaccaaaatgctttcttgagttcattgattacttttggcttgtttacaaactaacccggaatgtatgccattcttttttttcaggatccgtctagaatcgagctaaaagacgttctcaggaaagtggtagcgatcaacaactctaggtctggtgagacgaactttgagtcgcatagagctgaagccaatgaaatgtttagagtggtggatacctatcttcaggtgaggggtactgcaaagccaacaagaaacattgacatgagattcggggtgtccaagatctcggacagttcctcctcaaaagcttggacagaaaagatgagaacacttttcattcggaaaggttcaggcttctcttctcgcagcgtcatcactggagatgccttcaggaatgtgaatgaggtggggatccctatggaaattgcacatcggatcacatttgaggagagagttagcgtccacaacattggatatctacaagagttggtggacaacaagatgtgcttaagctatacccaaggttctactacctattctctgagggacggttccaaggggcatacagtccttaaacccgggcagattgtgcatcgcagggtcatggatggagatgttgtgtttatcaaccgtcctcccacaacacataagcattctctgcaagcacttcgagtgtatgttcatgaagacaacacggtgaagatcaatcccctgatgtgtagccctctcagtgctgattttgatggtgattgtgtccatctgttctacccccagtctctcacagctaaggcagaggtactggagctcttttcagtggataagcaacttcgcagctcacatactgggcagctgattctgcagctgggtttggattctttgctgtctctgagggttatgatggagcaggtgtttttggacaaagcatctgctcaacagttagctatgtatggctctcgatctctcccaccaccagctgtagtgaagtccagtaaatctggcccggcttggacatttttccagatattgcagcttgcctttcctgagcgtcttagttgcagaggggacgggttcatagttggtggaagtgatttgctgtcctttgattttggggttgatgcgttggcgtctataatcaatggaattgtaaccgcaatcatggtggagaagggtccaaaggaagcactggcattctttgattcactgcagccgctactgatggaacatctagatcctcagggatttagtttaagtctggaagacttgtccatgtctagggaagacatgggagttattcacaatctcatcgtccgggagatttctcctatggtgtctaggttgaggttatcgtatgaggacgaactccaactagagaacagcatccagaaagtgaaggaagtggctgctaatttcatgctgaagtcgtattcgatgaggaacttgatcgacatcaagagcaactcagcaataaacaagctggtgcagcagattggcttcctgggtcttcagctttcagacaagaagaagttgtacacgaagactctggtggaagacatggctcagttttataagaaaaagtatgtcagtacttcttcctctggagattttggaattgtgaagggctgcttttttcacggacttgatccttatgaagagatggctcattcagttgcggcaagggaggtaattgtccgctcttcaagggggttagctgagcctgggacgctcttcaagaatcttatggctgttctgcgagacatagtcatcaccaacgatggaactgtaagaaatacatgcagtaactccatcgtgcagttcaagtatgagctgagttctgacaatgagaatcaaggtttatttgaagcgggagaccctgttggagtattggcagctaccgccatgtcaaatcccgcctataaagcggtgcttgattcttccccaaatagcaactcttcatgggaactaatgaaggtaaagtgttctcggtgctgtcttctcaataaagctttgttcttctgtattgttgtatgcttatactgctttctgtttttgttcttctaccaggaagttctactctgcaaagtcaacttccagaacaccaccaatgatcggcgcgtgattctttatctgaatgaatgccgctgtgggaaaaagtactgccaggagaattctgcttacacagttaggaacaagctgaagaaagttagtctgaaagatactgcagtggagtttctagtcgagtaagtactggtcttagtaaattatgttgttcgttttagtgtttttttttttttttgcttttacttatcctctttgcgttggtctatgtctttacttgcatgcagatacagaaagcaacaagcgatttcagaaatttttggaatggatatatgcctacatggccatattcatcttaataaggtttgaattctaatctctgtactgttaaatctatctggaagactctacctgccattgaatctttttaattcttgcttgtaattggtgttttggtttactagacattgttggaagggtggaacatcagcatgcaggacatacttcagaggtgcgaggatgcaatcaactcactagtccaaaaaaagaagaagaaagctgaggactttaagaaaatgaatttgtctgtcaggtatgtccatgatatgcttttcctatgaacatcgcctctggttgaattattgatggtggtttctcgcttactagttctttctgtccatcatctttgttctttgtcttattatgtatacttgtctagcttcttaaactttgtgctctgattatgtttaatttcttctcgaatgaacagtgaatgctgctctttccgaggtccaggctcgagcaaagattctgatatgccgtgcttgatgttttcctcctacaatgccactgatcctgatctggaaagaactctggatgttctctgcaatacaatatacccagttctgctcgaaacagtgatcaaaggtacttgaagaatgctttcattataactgtcaatcactttgatttatcgaacagggtagagtctttcttttgaaatctttctagttagattgattacctgacggataaaagatttaaaatcattttcctcaactagtctgaatgagttgtcttccacgttgtagttgtgctatcaagcttatgttacagtagactaatgttgttttataatacttctgtctctaggtgatccacggattgcctcagcaaatataatctggaatagtccagaaacgacaacctggatccggagtcgtcatgcatcccgccgaggggaatgggtattggatgtcaccgttgaaaaatctgatgtcaagcaaagtggtgatgcatggagggttgtgattgactcatgtctttcagttcttcatctaatagacacaaaacggtcgatcccatattccataaagcaagttcaagagctgcttggtttgtcctgcgcctttgagcaagctgttcaggtactcaattactttactcctgatccgtgcacttaaagcatgatactttgtcatatttaacgtatggtatcatatgtgctcattgttttgcagcgtctctcagcttcagtgagaaaggtctccaaaggagttctgaaagaacatatcattctcgtggcaaacaacatgacctgttcaggggatatgctaggtttcaattctggaggttacaaggctttgactcggtccttgaacatcaaagctccattcacagaagcaactcttattgttagtcttctgatgcttgaatgtccaattacaaagtattttctatactggccatccatactaacaagagttacttcttatgctttcaggcgccaaggaaatgtttcgagaaagcagctgagaaatgccataaagattctctatcaacagtagttggatcttgttcttggggaaaacgcgtggatgttggtacaggttcacagtttgagcttctatggaacaaaaaagaggtagacattctcaccagatattgagttttgtcttctaaatttttttcgtgcaatctgatgttctttatttgtcaacttatttgcagactggtctggagaatgatgatgaaactgatgtattcagctttctccagatggtaagatccaccaaaactgcagatgcatacgtttcttcccctggttttgatgtcacagaggaagaaatggctgaatgggctgagtctcctgagcgagactctgctcttggagagcccaagtttgatgacagtgctgagtttcaaaatctacttgatgaaggcaaggcatcggaatccaagtgggacaacggttctctttgggagaatggttgcagtagtggctcagaatggggagtctcgaaaaacgcaggtggtgaggagaacacgcagtctggttggggaaaggctgcaaacattgagaaggaagatgcttcgtctggttggaacagtaaaaaggatgctcaagaagctaccaatacagattcatggggcgcttggggatcaaagacaaaagatgatgctgaaaatgcaacaccgaactggggaacaaaaccagctcaaaatgattctgttgtcatagaaaacggcgagccttcttctgacgtttggggacccaaagctgtttcagacaaaccttggggtaaaaagaactctgaaactgagccagctcctgctgcatggggtaaaacgaactctgaaagtgaatcagctgctgctgcttggggctctactaacaaaaagaacacgggaactgaatcagacgctgctggttggggctctactaacaaaaagaacccggaaactgaatcagatgctggtgcttggggttctggggccaaaaacaaagaaacagaaccagctcctgctgcatggggttcctggggcaaaaagagctcagaagctgtatcaggtggtgcggattggggtaataggggcaaacgggtttctgaaactgaatcaggtgctggtggttgggcttcccggaacccgagcttggaaactcagtcaggtggtgctacttggggttccagggataaatctaaatttgaaactgaatcaggtggtgctgcttggggctcgcaggctaaaaataattttgagagtgagtcaggctcgggtgctgctgcttggggtaagaagaaaccagaaactgaatcaggtggtgctgcttggggttctcaggctaaaaacaaatctgagattgagtcaggctcaggtgccgctgcttggggtacttgggacaagaagaaatcagaaaccgaatcaggtggtggtgcttggggttctcaggctaaaaagaactctgaaactgagtcaggcgcaggtgcttctacttggggtgcttgggacaagaagaaaccagaaactgaatcaggtggtgatggtgctgcttggggttctcaggccaaaaataattctgaaactgagtcaggctcaggtgctgctgcttggggtaagaagaaaccagaaactgaatcaggtggtggtgctgcttggggttctcaggccaaaaagaactctgaaagtcaattaggtgctgctaattggggttctaaggacacaaacaattcggaaaatggatcagattctgctgcttggggtaaaaagaagaattcagaagctgaaccaacttctgttgcttggggttcttggggacagccaagcccccctgcttcagacaaggatgcccaagaagatgatggaaacccgtgggtatcattgaaggcgaccaacagcggagagaaggaagggaatgagacaagtcagtggggagttccaaacaagagatatccatctgctggctcacagtcacagggtggtggtggcggcgcagattggaagaggaaccgtcctcctaggacccctggatctgagagtattatgggtccaatgttcacagcaacaagacagcgcgtagacatgttcacctctgaggagcaagagcttctctccgatgtcgatccagtcatgagaagactcaggaaaataatgcatcagtccgggtatgcctttccagctctatgtgtcacttacgcagttacagattccatatatatatatatacatctttgtaaaactgtgttgtttcgatgaaggtacactgatggagaaccaatctcggatgaagacaagacatatgtactggagcagattttgaactaccatccagagaaagatgctaagcttggtcccggtcttgatttcatcacggtaaaaatagctttcaactttatagcatctcttctaaaagcttacttagccttatataggtctgatgtgaaaatattcttgtaggttgataagcacacaacgttcacagagtccaggtgcttctttgttgtgtcgactgatgggacaaaacaagacttttcatacaggaagtgcatcaacaactatctggtggagaagttcccaaacctagctgaagagttcatcgcaaagtacttcagaaagagggacaatgaaaacagagacaagaacagccaagaagccacaccacctggtgaaaaagagtctcagactcagcctattgataatggaagccaagactcccagcctcagtctattggtaatgaagatggcgacactcagcctcagtctcaagctgaagacactcagcctcagtctcaaattgaagacactcagcttcagtctcaagttgaagaatctcagcctattggtaatggaggtgaggactatcagacagagcctcagggttag

SEQ ID NO: 356 - DNA, 6581 bp, Brassica rapa
  source 1..6581: mol_type = genomic DNA
ccggatttgtctatgtttgcatctgctgatttgaacagagaagcagttgtatgggacagagcctccagagaggtaactaaagattttttagaacctgaccatgaatctccaacactaacactgatcttacatctttttttttctttcaaaaaaacagatgaagctgaagaacatgctgtaccatagcgcccgcataaactgcctagcttggtctccaaacagcagtatggttgctacgggatccttagacacatgtgtgattgtgtatgaagtggacaaaccagcttccacacgtatgaccattaaaggagctcacttaggtggagtttatggtctgggtttcgctgatgatacccatgttgtgagttctggtgaagatgcttgtatccgggtttggagcttaactcctcaataaagacttgaggtgtgaattttataaatatctctggaaagctccccttgtctccttttgaaaaagtttttacttcttttgaaggctttgggtcttttgtatggccgtgtgtctgtgacactttgttggtgtgtgcgagtcttgttgtctgcatatctttgtcaaaaacaatactttctgttcttttgtgtgtgaaaatgagattgtgagtttcttctatgttcattgatttttggatgattttggctatgatatatgtttcataacttcattttttttctttactgaaattgttactctcttaagttgctcactatacagcaatacctctggagaattcatctaaaaagttggaccaagattaaggctggttcgaccttatgggattacattgcttaatctatctatacatatgatgatgatatgcagatgcaaataatgagaaaccaattggtccaaagggtgagtaatgattttatttgacatattccaaagcaacaacaaagaagacgttgaagcaccagtaaatttgcattttccactcttgtcacttccatatttcattaaacccctatggaatatgaatttgcatttttgcaacaaaaatatggaaaagctttatttttcatttcttggttaattgaaaaatgtaaaaaaataataatacctgtgttaagcaacttccatcaaatagacattactaccctttttaatcacacagacacgagaacaagcgtaggggcacatccgtcatttagaaaaggacactctttttggttttatctgcacagtcctcgttcactgagcgagagcaagggtttttccactcgacattttagaaactttcccggcgacgacggttaactctactctccccgccaccgccgtttcactccgaataggtactcatcctctttatcaaactctgattctaccatttacctctggatttcccgaaattctgctttatttgtttacacggtcccttgttctggagaatggtgaaaagttttgcgatcgacacatgcatttgtgttgttgatgacattagcgaatccttttttttttctgtgtaggtttctgtaaacatgactgatatagacattgaagagattgaggccgccggggaagtcgatttacgcgacctaggggatccttttctccagagcttctgcaagaaagctgcgacgtccttcttcgacgagtacggcctcgtcagccaccagctcaactcctacaacttcttcatcgagcacggtcttcagagcgtgtttgagtcctccggtgagatgctcgttgagccgtcctttgatcctacgaagaacaaggaccatgagtggagatacgcgacggtgaagttcggagaagtcagcgtggataagcctaccttgtactctgatgataaggagcttgtgtttctcccgtggcacgctaggcttcagaacatgacctactctgccaggatgaaagttaatgtcgatgttgaggtaaggaaaatgattaaaagtatcacctttttgttctaaattgtgttaatgtggttagtcttaaagagttaataacgtatggtatgaaatataacgggaaacgttttggggttaacttagttttactacatctccctcacgtcctgcttacattgtgtgtgatctatgcgtgtatgcaatggctcttatctgtcaaacttttgatgaagtttttggtttgctgccttcttattactggttattttgttgtgtaactgactcttccctttataaattgactaggtgttcgttaagaaagttgttaaaagagacaagttcaagacgggacaagacgaatacgtcgagaagcagatattgtctaagaaaacgcaggacatcccaattggtaggatacctgtgatggtgaagtctgtgctttgcaacacaacggagaaagggaagcatgtggaaagctacagaaagggggagtgtgcatttgaccagggtggatactttgtgataaaaggagctgagaaggtgagttactccaaatagttacattcccactgtcatggattactattctgaactattggattgtgtgttcttcacataatatgcatattgcacttatttgcctaaactgtttcaactgctgacaacgttttttgctttctttcgttccaatactgtatatatatatactggaaaagatatccaagctgttatacaagttactaacgtgaagaaatgtgttttgcaggtctttattgctcaagaacagatgtgcacaaagagactttggatttctaattcaccatggaccgtctcctacaggtccgaaaccaaaaggaatcgtttcattgtgcgtctatcagagaatcagaaagctgaagactttaagagaaaagagaaagtactgacagtgtacttcctgtcaactgagatcccagtctgggtcctgttctttgcgctgggtgttgcgtcagacaaagaggctgtagatctaattgctttcgatggtggtgatgcaagtattaccaacagcgtcgtagcttcgatccaggaagctgattcggtttgcgaagattttcgccatgggaggaatgctctggcatatgttgaacagcagataaaaggcacaaaattcccacctggtgagagtgtggatgaatgcctaagtctgtacctgtttccaggcctcaagagtttgaagcagaaagcacgtttcctgggctacatggtgaaatgcctttttagcgcatatgctgggaaaagaaagtgtgagaacagagacaactttaggaacaagaggatcgaactagctggagagctgctggaaagggaactaagggtgcatttggcgcatgctagaagaacaatgaccaaagccatgcagagacacctcacgggggatggcgatctgaagcctatcgagcactacttggatgcttccattataacaaatggacttagtagagccttctccactggagcatggtgtcatcctttcaggaagatggaaagggtttcaggtgttgtcgctaatctgggtcgtgcaaatccactccagagtttgattgatctgcggagaacgcggcaacaggtcctgtataccggcaaagttggagatgctagatatccgtaagtggaatttccaaaaccccctgctttgtttgaaatataagtatatgctcggtcttacatgttcttcagtctgttttagtggtattagactctttcatatagttgtgatgatgaccactgtttcctgcagatccttctgtgtttgacccaaatgtatactgattttgtttaaattttactgccattaagcaattccgatactgtttttcgtgtttcttttagtcactctatcttgtgaatttttcctgatgtcgacaatgaggttatccattatagttacattgtaatgtgagctgtgaaatgttggaacgttgttgggaacttaacattgtgtttttttttggctttaaaaactgaaatgtgactgcatttgtttataatgtatgcaacaggcatccctctcactggggcagagtatgctttttgtcaaccccagatggcgaaaattgtggtcttgtgaagaacctgtctctccttggacttgtcagcactcaaattatggagcctgtggtggaaaaactcttcgatagtggaatggaagagctggtggacgataccagtacaccactgagcgggaagcacaaggttctcctcaatggagactgggttggagtatgttcagattctgactactttgttgcggagttaaaaagcaggaggcgtcaaagtgaattacctcgtcaggtatctcctgttttaacaaatttcttgtattgcatttaccttggatcttattacagttctcaaatgtttttatgtcattctttgcagatggaaattaagctagataaagatgacaaggaggtacggatttttactgacgctggcagacttctccgtcccctcatggttgtggaaaatctccacaagttgaagcaaagtaaaccatcgaagtacacctttgagcatcttcttgaccaagggattctcgagctgatcgggattgaggaagaagaagactgtaccacagcatggggaaccaagcagcttctgaaacagcagaagagttacactcactgcgaactggatttgtccttcctgttgggtgtgagctgtgcgattgtgccgtttgcgaatcatgatcatggtaggagagttctctaccagtcccagaagcattgccagcaagccattgggttctcctcaacgaaccctaacatccgctgtgataccctgtcccagcagctgttctatccccagaagccacttttcaagacaatggcgtcagagtgtcttcagaaggatgtgttgttcaatggtcagaacgcaattgttgctgtgaatgttcatctcgggttcaaccaggaggactccattgtgatgaacaaggcttcgctggaacgtggtatgttccgttcagaacagatcaggagctataaagctgatgttgacagtaaagactcggagaagaggaaaaagatggacgaggttgttcagtttggaaagacacacagcaagattggcagagtagacagcctagatgatgacgggttcccctttgttggtgctaatatgcacagtggtgatattgtcattggcagatgcaccgagtctgggactgatcacagcgtgaaactgaagcacactgagagagggatagtgcagaaggtggttctatcatccaatgacgatgggaagaattatgctactgtttctctgagacaggtaagttatcagaccttagtgagctgtctttcagataacacatacctttgagctattatattgtttccattgatctgtcttttacatcttgcaggttcgttctccatgtcttggagataaattttccagtatgcatggccagaagggtgttttaggctatatagaggagcaggagaattttgctttcacgaatcaaggcatagttcctgacatcgtgatcaacccgcatgcattcccttctcggcaaacaccgggccaactcttggaggctgctctgtccaaaggaatagcttgtcctatgcaaaagaagaagggcaagtctgatgcatactccaaagtgacacgccatgccactcctttctccactcccagtgtcgatgacataaccgaccagcttcacaggtaccttcttcacactgtcacttggtttgatcattgtctacatagtgttgaaaaggactgaaacagtacagggatgtgtgctaaagtcggtagataatctgagcgtcatttgccttgtgattatgtgattttattgaatatatttcattgaaactgtacagggctttgtgctaaagtcagtagataaactgagcgtcatttaccttgtgattatgtgattcattgaatgtgtttcattgaaacagtgcatggctttgtgcttaagtcagtaagtagtagataaactgagcgtcatttgccttgtgattatgtgattctttgaatatgtttcattaaaacagtacagggctttgtgctaaagtcagtagataaactgagcgtcatttgtcttgtgattatgtgattaattgaatgtgtttcgtagattattcttgattcttgacacctgatccattacggattataaaatgtttgtctgtggtctcagggctggcttttcaagatcgggaaacgaaagggtctacaatggaagaacaggagagatgatgcgttcactcatcttcatggggccaaatttctaccagagactcatccacatgtcggaggacaaagtcaagttcaggaacaccggaccagttcacccactcacgcgccagccagttgcagacagaaagaggttcggtggaatcaagttcggagagatggagcgagactgcctgattgctcacggtgcatcagcgaacctgcacgagcgtctgttcactctgagtgactcttcacagatgcacatctgcaggaactgtaaaagcgcagcgaacgtgatagagagggtggcgagcagtggaagaaggatcagaggaccgtattgcaggctgtgcgagtctccggactatgtggtgatggtgaacgtgccgtatggagctaagcttctgtatcaggagctgttcagtatgggcatctgtctcaacttcgaaaccaacctctgctga

SEQ ID NO: 357 - DNA, 5397 bp, Brassica rapa
  source 1..5397: mol_type = genomic DNA
catcttcactatcagcttccgaagaggaacagctttccagaacaacttcagtaagagcaggaacagcttcaaccatgaccagttgtaaagcaagtacaaatcctttaactgcgatgttgctcagggacaaggccaccacatcccgctctcggatactaaccataagcaagtcaacgcaagtcttccccacggatatgcaaaaaattctccaagatcttcgattgcttctgcatgctctctacaaatcttcatcttcaagcttgttggaagaagaacggaggacagaatcgccaggcaagcatatttgatacggattttcgtatcagttaccgtcctcctccgaagcatcttgatcacagaagccaccgttacaacttcactcttaccaaatagcaccggccagtagggtttctccgctatggattcttttaacttcatctttgatctccgtggaaacggcccgcatggcaatccggtgacaatcgcaaattcccgtaacgaaaaccgaatcggttttccagcaaagcggaaccacgcctcgaacttcttcttcgttttcaactgtctagacattatataacgagcaaagcgaccggaaaataccggtttcgcagcaatatcgacgattttgccaaaagctgaatccctgataacatcaatttcttcatctcccaacgcatttaagattctttttatcgctccagatgattggtaagtaaggacgcaaaccccgactggttcttcgccggccgcaaacatcatctccggaaccagcttcctcgtcggtccttccggtgaatcgggtaaatcaacaaggcgcgacgaaaccatcgactcttctcaaactccgcctgatctcaaacggttctctcgagcttatcgaaaagtaggataagaaaagtaggttaagaaaagcaaaaagactgaatagagttgttctaataatgtagacaaacgattctttgcttctttcgatatttccagacgcgtgagataaacagtggtatagataggtattattgcaagtctagctctgtctagatgtctaggacctataatctaaggtatagactactcggactagtgttgtaacgagatagggataagagcgtcattaatgaaacagtaaatagcgacgtggtgcacatgctcatatttgcaaataatgtttcaaacgtgtatatagagtgcaattgctctaaattttaattcgggaaaaaaaaagaaccggtcactggtgaaatattagaaatcaacggttgagatcaatgatatatgatcgtatggttattatcataagctgtattaaactttaagtatacgagaaacacactaacccttctcttttcctctcgaagctttatgattccagaaaaaagtaacttttttcgagaaaggcaaactttctgattcttcgctctactcactctttctcgagaatctctctctctcttcttcactctctctttctctcgattctatctgctctccacgccaatcatggtctcagagataacgcgatcgacggttaaactcaccaacgtccctcaaaccatagttgccgacgaactcctccgcttcctagagctccacctcggcgcagactccgtattcgccctcgaaatcccgacctctcgcgataactggaagccacgcgacttcgccctcgtgcagttcacctccctcgaagccaagtctcgcgctcagcacctctcctcccagaccaagctcctcttcaagtcccgtaacctaagagtctccgaagcctacgacgacatcgtccctcgccccgtagatcccaggagaaggctcgacggcgtcgttttgaccgctgggtttccggaatcggaggaagggaggttttgtgccctacagaaatgggaaggcgtgaggtgttgggttatagaggagaagcggagagttgagttttgggtttgggaatgtggtgattgttacaagtgtgaggttaggtttgaggatgtcgttgaaactgttccctcctgcgtcgatggcgtggatgagatcaatgcgtttcttctcagggtaaacgttttgactcgcaatgtgtttgtgacaatgtgcatgtgaaagttctctactttcatagttttatctgatccttttgttcaactatagagattcaagaaagtaacttggtgaaccttagttctgctgagagttaagtttacaatgcaagagtgccttacggttaggtttaggttagggttttgacaaaactcttcactgatttataatttatataactaacgtttcaagtgagtttattttgcttgctgttggttttttatgttgcttggtttgttaagtgctgctacgttggttagtgtcttcttacttttgtttacctcttgtcttattttttagctgaaatatggaccgaagatatacaaacaagtatcaggacctcatatcgccacaaagttcaaatctggccgctacagtttctgcaaggacgattttgatttcatgtggattcgctcaactgatttctctggtctaaagtcaatcggtacatccacttgcttctgtttagaagtggataacgcctcagcgatgtctgacatcttctcaagcttaccttactacagagaagacactttgagcctaaccctggtgaatgggaatacatttgcctctgctaatcaaattgtccccctcttgaatgcagctaatctggggatagagattccatatgagatccttttccaactcaattcgctggttcatgcgcagaaaatcagtcttttcgcggcttcaaatatgggattgatcagcatcctctgtggtttgagcttggaaaccgcattggtggtcctcaagaaactgcaccagcaaagatctatttgttatgatcctatctcatttgtcaaggctcagtcgcagtatgtggttaagaagacggcgcattcccctgcatcagcctataagagattgactgagcagaacataatgagttgtcagagagcctatgttacgccttcaaagatttatctgctgggtccagagcttgagactgccaattacgttgtgaagaactttgcggagcatgcctcggatttcatgagaattacttttgtggaagaagattggagcaagattccagcgaatgcgctttctgtgaactccaaggaaggctatttcgtgaaaccctttagaaccaacatctatcacagggtgttgtcaatccttggagaagggatcaccgtcgggcctaaaaagtttgagttcttggctttctcagcgagccagctgcgaggaaattctgtctggatgtttgcttctaacgagaaagtgaaagctgaagatataagagaatggatgggttgttttcgtaagatccgaagcatttcgaaatgtgctgctaggatgggccagttgttcagtgcttctcggcagacacttaatgtccgtgcgcaagatgttgagcagattcctgacatagaagtgactactgatggtgctgactactgcttctccgacggcatagggaaaatttcgttggcatttgctaagcaagttgcacagaagtgtggactgagccatatcccttcagcgtttcaaattcgatatggtggctacaaaggcgtgattgccgttgaccgcagttccttcagaaagctgtctctgcgtgatagtatgctaaagttcgattcaaacaacaggatgctcaacgtgaccaggtggacagagtcgatgccttgcttcttaaaccgggagatcatttgccttttgtcgactctcggaatagaagatgcggtgtttgaggcgatgcaagcggggcatctatctatactggggaacatgcttgaagaccgccatgcggcactgaacgttctgcagaaattgagcggagaaagttccaagaatcttctagttaagatgctgctacaaggatacgcaccgagttcagagccttacctctcaatgatgcttcgtgtgcaccacgagagccagctttctgagctaaagagtaggtgcaggatacttgtaccgaaaggacgtatcttgataggttgcatggatgaaatgggtatactggagtatggccaagtgtacgttcgtgtaacactgactaaagcggaattggaatctcgcgagcagagctacttccgcaagattgatgaggaaacatctgtggtggttgggaaagtggttgtgacgaaaaacccatgccttcaccccggagacatcagagttcttgacgcaatatatgaggtcaattttgaacaaaagggttttctcgattgcatcgtctttcctcagaagggagaaaggtatatattataaaactatcctttaaaaagctatggcaccatagtagaaagaaaccatatgcttctgattcttgagttgatggtttgtttttgcctttacaggccacatccaaatgaatgttctggtggtgatctcgatggagaccagttttttgttagctgggatgagaagcttataccgagccaaatggaccctccaatggactacgctggaagcagacctcgtataatggatcatgatgtcaccttggaggttagattctcgaaatggttctgataatgtgaaagttttctaatctttggagcctaagctgctgattctcactgctttttgtaggaaatccacaaatttttcgttgattatatgataagcgacacactgggggtgatctcaactgcacatttggttcacgcagaccgtgacccggagagagcccggagccagagatgcatagagttagcgaaccttcactctagagccgttgatttcgcgaaaaccggagctccagccgagatgccttacgccttaaagcccagagagttccctgatttcctggaacggttcgagaaaccaatgtacatctctgggtccgtgtttgggaagctctaccgtgctgtgaaaagcactttagcacagagaaagccagaagacgctgagagcgaggacaagaagaagatggcggcttatgactcgacgcttgaagaagctggctttgacaactttatagagacggccaaagctcacagagacatgtacgccgagaagctgagctcgttgatgaactactacggagctgctaacgaagaagagattctcacggggattttgagaaccaaggagatgtatctgcagagagataaccggaggtatggtgatatgaaggataggattacgttgtcggttaaggatttgcagagagaggctatgggatggtttgagaagagctgcgaggatgaacagcagaggaagaagctagcatcggcttggtactatgtaacatacaacccgagctattgcgatgagaagccgagattcttgagctttccgtggatcgtaggcgacgttttgctggggataaaggctgaaagtgcggagagatag

SEQ ID NO: 358 - DNA, 5406 bp, Brassica rapa
  source 1..5406: mol_type = genomic DNA
ttcagatgttttgacgacggtgcttgggaccatggccgtttctactcctctatgactcgaccttctccgggttcaccttctcctctttccttctcgttcagatcactttgattcaacgggaccgaaagattcttcgtacgaagcctcctatattgatgcatgactagagttttgattctactaggattccaatttcaaatccctcaagaatgggaatgtgatgattaaaaagagagataaatgtcgattgaagaatgagtgagagagagtgaaaccgcaatgacttagacggttttgggaagttatagagaagaagatcttaattttatgggtcggatctggatggtccgcaaataaaataacccttggtaggatcgtagttatacaaattttccttggtttcgtggtattttacaaattttcttcatttaaataaagttttattaaattaataaaaaagggaaaaatatcacagaattttttttttcagttaatagtattggagcatttgactggtctctttctcggttatttgggataaaaaaaattggaactgttttataatatttctaaatccacgtagtatttataaattcaagtaaaatatacagatttttaaactttttcggattagtatttacaaatccggaagtttttcctcggagttgaatcattgtatatttaacaaaaaaaaattcaaacaaatctattcaaatctattataaaatcaaatttattagtaaatatgtacgattgaataacacttgatatagatcaatttacgaatcattaaaccaataacgccgcttatacaattgaaaagaataaaaaggcttggaagagaataaaaaggcccatatttaaaagcccataaagaaacgtctactcatacgattaacacaacactgtctcttccgttgactggtagaagacgatggttgatggttttaacttttggctatggcggttccagtgtcctagtatactaatcgctcactgtccttttcttctccgcattgcttccatgtctcttccgatctcactgccaaccttgggatcgaagatatcactttgtaagtctccaggttctctttgtataattttgtacggtcgttagggttttaattatctgcataattaaaccatcagtatcgtctcttaatttgatgtttcttctctttgtacgttatttgtctctgatcattggttgatgatgatgttaaatgctacttattaagaagaatctgagatgtatctttcagtgactcagagcattattaattcctcattaccataaacaatcaaaggtgcttatggcgtcactttcctttgttgatctcacctgtttggttgtctatgcatgatgatgattctaatgtctttttcattgcatctgcttattttcttggtgttttttttttcttttttaactattgtgtatttttggtgatctgattactgtgactcagaacatttgttctttttttgtatcttaggagaatggggtcagagggaaacatgaagaactcggttgtgacacaagtaagcattggtgggtttggggagtcaactactgcaaaagagcttacagattaccttgaagaagaagtaggactcgtttggcgatgcagattaaaaacttcttggactcctcctggttcttatcctgatttcgagatcactgacacttcaaacatccccacatttgatggttacaagagagtggagcctcatgcgtttgtccatttcgcggtccctgagtcagcaggtcgtgcaatggatgctgcggggcagtccaagctcatcctcgacggccagcctttgaaagtcagcttggggcctaagaacccgtacacacttaaccagagaagaagaacgacaacaccttataagctgactggtgtttcgattgagattgggaccttgattgcccgggatgagtttcttgtttcttggagagctgaaggggttgatttcctcgtagacccttttgacaacacctgcagattttgcttcacaaagagcactgccttctcgttgaaggacacaatgatgtatgctgtgatcaactgtgattataagttggagttattggtgagagacatacgaacagtaaggcagtatagaactctggatggctatgtgctactcttgcagctggcttcatcaccccgtgtctggtacagaactgctgatgatgatatatatgaaactgtccctgtcgatctcttggatgatgatgacccttggatccgtaccactgattttacccaagctggggccattgggcggtgcctttcatatcgagtgctcatctctcctcggtatgagaagaaaatgaatacagcattggactatctaagggcgcggagagtgcaagaggaacgtgtgaggtggcctcccaggattcgtgatgagccctgttttggggagcctattacagatcatttcttctgcattcaccacagggaaggaatctcctttgagatcatgttcctggtaaatgcggtgctgcacagaggggtttttaaccagtttcacttgactgagcgcttctttgatcttcttagaaaccaacccaaggatgtcaacattgcttctctcaagcatctctgtacctataaacgacctgtttttgatgcgtacaagaggctgaagcttgttcaggaatggattcagaaaaatccaaagcttttagggagtcacgtacagttggatgatatctctgagatcagaaggctagcgatcactccaaccagagcgtattgcctacccccagaagttgagctctccaacagggtactcaggaaatacaaagcattgtctgatagatttttgcgcgtaactttcatggacgaaagcatgcagaccatgaactcaaatgttctttcttactttgttgctccgattgtgaaggaccttacatcaagctctttctctcagaagacccacgttttcaaaagagtgaagaccatattaaccgatgggtttaaactatgtggtagaagatacagttttctagcattctcggccaatcagctcagagaccgctctgcatggtttttcgctgaagacgggaaaacaagagtgtcggatataaagacatggatggggaagttcaaagacaagaatgtggcaaaatgcgctgctaggatgggcctgtgcttctcctccacatacgccactgtggatgtcatgcctcacgaggttgacaccgagcttccagaaatagagagaaatgggtatactttctctgatggaattggtacaatcacacctgatctcgcgttagaaataatggagaaacttaagttggattcgcactgcagcccttgtgcttaccagatacgttacgccggtttcaaaggagttgttgctcgttggccatcaaaagatgatggaatccggttagcccttcgacacagtatggataagttccactctaagcatacaatcctggagatctgttcatggaccaggtttcaacctgggttcttaaaccggcagataattaccctcttatctgtgcttggtgttccagacgaaatattctgggatatgcaggaaactatgctctgtaaactgaaccgcatccttgatgacacagatgtcgcatttgaagttcttacagcatcatgtgctgaacagggaaacactgcagctatcatgctaagtgcaggtttcaaaccaaaaactgagccacatctacggggaatgctgtcttcagtcaggattgcacagctctggggtctcagagaaaaatctcgtatttttgttacgtcaggaaggtggctaatgggttgcttagacgaagcaggggtacttgaacagggccaatgctttatccaagtctcgaaaccgtctatagaaaattgtttctccaaacatgggtctcgttttaaggagacgaagacagatctgcaagtagtgaaaggttatgtagccattgctaagaatccttgtcttcacccaggggatataaggattctagaagctgttgatgtacccgagctgcatcacatgtatgactgcctactttttcctcagaaaggcgagaggccacatacaaacgaagcttctggcagtgaccttgatggcgacctgtactttgtggcttgggatcagagactcatccctcccagcagaacaagctttcccgcgatgcaatatactgcagctgaagaatcgagtaagggccgtcctgtcaaccaccaggtcaatatctacttacccactactcttttttttccggttagctgagattatgacgcttaagatggatagatgatttgtttttggatgcttgtagtgattatttatgcttgcatactgagttcatcctgctgcaggaactcagatgaatgaaatattagaaaactttgaatcgttgattctgattttcttagttattatcaaaagtgcagtagtctcatgatgctagcgtctgctaatctagtaatgatttctttgttttactttcttttctacgacaaggactttggtaactggtcggttttgttacaggacataatagagttctttgtcaaaaacatggcgaatgagaatctgggtacaatatgccatgcacacgtcgttcatgctgataggagtgagtatggagccagggacgaagaatgtttgctactggcggaactagctgcaacagcagtcgatttcccaaagacagggaagctggtgacaatgcctttccacctgaaaccgaaactctaccctgatttcatgggaaaagaagagtaccagacttacaggtcggagaagatcttgggtcggctttacagacgtgtaaaagaggtttacgacgaagatgcagaagcttcctcagaagaaaactcagacccgagtgacatcccttatgacactgatctcgaagtaccaggatttgaagattttgtccctgaggcatggggtcacaaatgtagctatgacgggcagctaattggtcttctcgggcaatacaaggtgcaaaaagaggaagagattgtgacgggtcacatctggtccatgcctaaatacacaagtagcaaacaaggcgagctgaaagaaagactgaagcattcttataactccctgaagaaagagctgaggaaagtattcgaggaaacaaaaccggagcacgagagtctcagcgaagaagaaaagaacgtcatgtatgagaaaaaagcttcagcttggtatcatgtcacttaccatcccgagtgggtgaagaagtctacagagctgcaagaacctggtgagtcgtctggtcatgcggtgatgctgagctttgcttggatcgcagctgattatcttgcgagaattaaagtccggtcaggggaaatgggaatgaaaatggactcggccaaacctgttgatgctttggctaagtatctttctcaacgtctctaa

SEQ ID NO: 359 - DNA, 3682 bp, Brassica rapa
  source 1..3682: mol_type = genomic DNA
aattccttttttaactttattaaaaaattcctttttttattatatgtatatgtttttggaaattttttaaaagaaagctaaaaaaaataatagtatttaatattttaaatttgttaagggtatcattgtaatcaaccattatgatagttaatgtgagagcgacacatatgataacgacttctcaattaatattatagagaatagatataaagaaagtattttattacttcaagctaaaaaaaaataatagtatttaatattttaaattcattaagaatatcagtgtaatcaaccatcgtgatagttaatgggagagtgacacatatgataacgacttcttaattaatattatagagataaaagtcaagaagaactgttttgctatattggtatctaacgttttgtttttgttttttttttccaaataaaatagtcaatacgttttattgtaaatatatagataattgtttatatacgtatatgtttataacggttgtttaataacagttttagcccttacctaccaatctaatagtacatttaaagtaaatagaaaatgtatttctaatgtttaattaggataacatttttaagtttttatcacaaaaatagcattcaatgaagaaaatgactaaaataagttttattaaaagataaaaaatgtatttttaccaaagagttaactaatttatacttagagtttagagttaagagatgaggttttggggatatgattttaaatttaaaaaattaaaaaataaatattaaaattttcataataaaaatgaactattttggtcatttttttctgagaacgatttttgtgataaaaacttcaaagtgttattatagagaattgccaaaaacaaaaaaatatatttctaccttttgcagtgtttatatgagtagcacaaacaaacaaatcatgttcgtacgtattaaatgggccaaattaaagttgggcagagaaaaaaaaaagaaaaaggtcgaaaacaaaatcaaatcgaatgaaatttggagtccggaccggacccggagaaaataggcccttctatatagaagcgacccactcagcttttctcatttgtctctgttcatcactctctcctttgtcctttgctcctcactagtactcaactgtctccgagcgtttcatccatctcgcgaaatctccgtcgccgtttgctctctgtaagttcttcatcgtcgatcgctctctgcgtacacaccacatgcttgatttcgttttcttcctcggataaacattaccctagaattctctatttttaagagtttttgttttatatttttgtatataaagatgtctcctttttgttgtgctctcctcgtttgcgccaagtggtgcttagtcgttgatgttttttttttgttttcacagcggaaaaatctcgactttttgagttttacctcatgtttttggcttgatctatatgagtggtgactgttggcttttggttgatgcaacaggtttggttcgatatgggttcaaggggtgataagggaaagaacgtctcttcgggtggctctaacgcagaggttgaacagctggcgaaaggcttttcggagacgaagctgggtccttcacaagacggtggaggagagtgggaggtcatctccaaacggaacaagaacaagcctggaaacgctgctgggaagtcatgggccacagctcctaaccagaaccctcctagagcgtggggtggtcagcagcagcagcaagggaggggtaacaatggctacgggagaggaaggggaacgcaagtctctactggtcgcggagctgggcgtggacaagcgatgaacagagggtatggtggtgcttcggctcctgttgctcgacctcctctggaaggaggatggaattggcagtctagaccgggtgctgctcagcagactgtgactgaggaggttccagaggtggatgatgatgatgtttctgagggagaggaggaggatgattgcgatgctttggatgattctgatgaagacctggcgagtgatgactacgactccgatgtgagccagcaaagccatgggacgaggaagcagaacaagtggtttaagaagtttttcgacagcttggatagcttgtctatcgagcagataaacgagccgcagaggcagtggcattgccctgcttgccagaacgggcctggtgctattgactggtacaaccttcagccgcttctagctcacgcgaggacaaagggagctagacgtgttaagctccacagggaactggctgaggttctggacagggatctgcagatgaggggagcatctgtcattccctgcggtgaaatttacgggcagtggaagggtttgggtgaggaggaaaaggatcatgagattgtctggccgccaatggttgtcattatgaatactaaactggacaaggacgagaatgacaaggttaacttttaattcattttctcttgcgttctgttgactataggtggaaaaactaactaatgttaatacatatcagtggctaggcatgggcaacccggagctgctggagtactttaacgagtatcctgctattagagcacgccattcgtatggtccgcaggggcatcgtgggatgagtgttctgatctttgagagtacagcgactggctactttgaggctgaccgcctacacagggacttagctcaaaaggggttagatagagacgcatgggagcgtcgccgcagttggttttctggaggtgttcgccagctttatggcttccttgcgatcaagcgagatttggatttattcaatcagcattgtcaaggttctctctctcccttacaaatatatgtttgaagtcttgattaagagttttgttggtccttgtttaaagttccatgtgttttttttgttagggaaagcaaggctcaagtacgagatgaaatcgtaccaggagtatgttgtgaaggagctgaggcagatagctgaagacaatcagcagctgaactggttcaagaacaagctgacgaaacagaacaagcacgccaaggtgcttgaggaatcgctgggaattttgagcgagaagctgcgtaaaactgcagaagataaccgtatcgtgagacagagaacaaagatgcagcatgagcagaacagagaagaggtgtgttctttttctctgaaaacacacttgatgttttgaattagtaccttctgatacacttttttttttattttggaaaaaaaaaacttggtgggttgatgaagatggattcacaagacaagtttttcaaagagtccatcaagcagatacatgagaaaagagacgcaaaggaagaaaacttcgagatgctgcagcagcaggagcgtgctaaagttgttgatttgcgaaagaggtatatatgtatactatcttatagaaatcctctgcgtttttagtgaaacagaagagcaaactaaattcttcgggtttgattcttctgcagggctgaggaggtatccagcttcatagagtgtcaagagaaagagatgaaagagtttgtggaggagagggagaagctgatagaagagcaggagaagaagatggcagagttgaagaaaaagtatttcgaggagatgcttgatctagagaggggatttgataaggcgttggagcagctcatgagcaagcacggcctccacgatgcagatgacacagatgactactag

SEQ ID NO: 360 - DNA, 4202 bp, Brassica rapa
  source 1..4202: mol_type = genomic DNA
tttaaaatcaaataatagtgcgtctcattttaattcttttcagaaaattaagatatttgaaaatattaaatatcgatattataattttttcataatataaacattacagattatattttttataaaaactataacctttttctgaatatagtaactttatgttattaaaattatttgttattctttgctatattatttataccttaaataaatagatatgtaaataaaataattttctaatatttctcctattttattatattggtgattcacaatatgaagaaaatatatgtttgctttgccgtaaaacaactatttgaaatgatttaaaacagaaagtacccagaaccgaaaaattcgaaatttttatatatccataccacacaaaatatcaatatatttaatcactttaaccaaaactcaacttcatatataaccagaattgttcatatatttctaaaccaaaaaccacaaccaaactgaaatcgaaaaccaataaaagcaaattagaatcgaacgaaaaccaaaaatatttataacgaaataaattagttaacaaacagttatatcaacaaatttgtcaacaaatatattcctgcgctttgaaagcgcgggtcaaaatctagtatttttataaagttggcatttttatatgctaatttctttttaaaatactgtttacatattttcttatattagtttaattattttattgatatttagtaagaaatacatgacacatgtttaatttaactacattttaaactttcagtaagaaatcatctaatgaaacatcaggacgattcaaaatattcgacatgtacccttaaaaaaattactgttcgtaagaaatgaaaaaccaaaacttgatcactacattttattttttcctattagtcaataaattttagatacaatgtaactaattttatttaaatatttctttccttaataattttttttgtatcaactattttctattaaatactaatttcctaattatgtatttttaatttctttattaaatactattagtttttgtgttttatatatgaatttaaatttccattaacgtttaaaaaatacccgacatgtgtttactttactttgactacttattaaaagttttagtaaaaaatagatgtctcatctacatatacttatgaaacgtcgtgaatctaagtatataaatcgtcgaagttttattttctcagtaaatcacattttattttttatatcaactatttttttattaaatactaattttctattttttgttttaaatttctatagtaaatactatttacatttttgttttctttgtaaatttaaatacccattaatgtttaaaaatatacacgacgcgtgcttactttattttgactaattattaaaaaattagtaaaaattagatatgcaatatatatatacttatgaaccgtcgtgaatcttacttgagaagaaaaaaaaatcaatcgaagctttgcatcttctcaagaaatgaggtattccgtcaacttttaattttgattctctttattttcataatcaattgtggctacaagctaccacgcatcttaggagggcttgttggattgatagtttggtgcgatttcaattttttttcccaaatctcatcttattagatctagtgtttgtaaaagttatcttaaatccttgcttattggacttatcatttattcaaactctagttgtagaagaactccaagtttttgaatccttataaatagaactgatgttaaactgaagtatttttttcaatattatgtaaagaactctagatctcaaaaaatatttaaactttcaaagatctaaaatgtatcctttgcaactgatacaacatggatgcatattcaatcattgaaatgtttaacatgtcttaacattgatactcatatccatatgacaaggtatgtggtctcgatattgggatttgtcaaaatagctcaaaataattaaattaataatacctgaatattataaatacaatataaaatatttagattatgtaagaaaactaaaaattacgaagaacattagagttcttttgatggaattttatggatataaaaacatacatatctgttctttctttttctttttgacaactcatatatatgtgttcttataaatagatttttttccattcttgatattttaaagtattttaaaatttattatattataatttggtgatattttaaattatttctagacttttatacttttttataatccaaattatctcaaaatctgaatatattattaaatccttagaagaatcgtaacctccttcttctggttgtaacatctggatgttgtcattgtaatctctgcctaacaggaaccacaactacaactccttgaacaacgtgaacgcacctggaaatgatgcatggtctgattcggatcgtggctcaagttctttccggacgcgaagcccaggtgctgttctgcctctctccgcttcatttgggagaatgactactctagtcccgttccccgaccttaatctcatgccggattccccaccccccgaaacctcctccaacacaagaatcaccgccgtacggtcattggctccgacactaggtgttgagagaaactccctcgcgatcttccccgtaccgggtcacgaaaaccaccatgctcgggtggttcaaacactccaccaagacaaccaggaacttgcccggtatgtcttcaaacggactcgaatgatctacgactctctcctgcttcagctcactgtggagtacggacctaatcccaagccagccgtcaatgtcagggcttcgaaactgatggaagaacgtgggttgtggctgaacaagggccaacacttggtaggtccagtccccggggttgagatcggggacatattcttttaccgcaaggagctttgcatgtacggcttacaccgccattcacaagccgggattgaatacacaaaggctaggctaagctcctttggcgtgcctatagcaaccagcatcatcgcatcgggtggctacgaggacaatgaggacagaggagatgtactggtttattcgggccagggtggtcgggacaaatccgggcagcaacgtcagcaccagaagctagtacgtgggaatcttgctatggtacaaagcatgcaactcggtgtcccggtacgcgtcattcgcgggtttcactacaaaaacgaagtcagctcgaatgtgttcatctacgacggcctgtacaggatcgtaaagtccagccgtgttagaaagtcagggtttgatatcttcaagtttacacttgttagaatccaaggacagcccgagatgggcagtgcaagactgatgcgtgcgctaacacttagaaacacaccattggcttggatgcctgctgggtatataagctttaacctttatggtaaaaacgagggtgtcccggtgtatctgtataacgacattgactatgaccgctcaccgctgaactatggctacatctcgcaatctgacattagtagtgtgattcttgctcaaggagggaacaacggtggatgcgattgtaacctctcatgcactgatgattgtatatgcgtgaggaagaatggtggtgagcttccttacagcccttatggatctttgttgagagggaaacacgttattttcgaatgcggggttacttgcaagtgcacttctggttgcacgaaccgtgtcgcgcaaagggggttgatgaagaagatggaagttttccgaaccagggaagctggttggggtgttaggtcgctggatttgattcacgcgggcgagtttatctgtgagtatgctggtactgtggtcacaaaagagctaggggagattatgtcgatgaacggggatggtctggtctatccgggacggtttgctgcaaactggaagttgtggggtgatttatctgatgtttacccgggtaatgtcccgccgagttatcctactattccgccagttgattatgcaattgacgtgtcgagggtgagaagcgtggctgctttcattcgtcacagcagagaaccaaatgtgatggctcagtttgtgttccatgaccataacaacttgaagtttcctcgcgtcatgctttttgcactggagaacatctcaccgttaaccgagctaagcctggactatgtggtggtcgatgaagtggacgagagactcgccatccgtggctga

SEQ ID NO: 361 - DNA, 3506 bp, Brassica rapa
  source 1..3506: mol_type = genomic DNA
tgaagatgaatacaccaatttaagtgctacagatcgaatcaatttgataataaatatagtgaattgagattagtaatgatgcattctccgactttatgtttgtatatctttgactcacttcgagtctgatcatgattgtttcttgtaacatgtatcttatcatctgttgttcctgtataagcttgaaaggtagtagcttgattagtctgctgagacatgagtcagttttgcttgcaggtttctgtgatctgtatagcatctaaagcttcagacttttcactgaggaagctttgtgttttgattaacaggtcttgcaaaaggctttggaagtgtggaacttacaagtgatccctctcaattgccgcgatgcagagcctgcgcagatagaccccgagcttgaaaacgcattcatctgccacttgcacgaccattggttctgcataaggaaagtgaacggtgaatggtataacttcgacagcctcctcgctgcaccgcaacacctgtcgaaattctacctttctgcgtttctcgactctctcagaggctcaggatggagcatcttcattgtgaaaggaaacttcccgcaggagtgtcccctgtcctcttctgaggcttcaaacggttttggtcagtggctttctcctgaagacgcagagaggctgttaaagaccacgggagcagtgcggaggagttctccttcttctgccagtggaaacagaactagtgataatgttgatcaacagagaccatacgaggcattgtcgagggaggaagtgagggctttttcggagatggaggatgatgacttgaaggcagcgattgcagcgagtttgctggatgcttgtgcggctggtgctaatcctggagcagttgggtcttcttctcaaaaggaaactgagaaacaaaagtagctgagaaaatagagaaccaaaggcttttcattgatgtgggtgaaggaacacttactttgattctgtttttgtttttgttgtctaaatattttacatacagaacatagaagctttacatcgacagagaccaaacgtttttgtgatatggtgttttgtttgagttcttttttttttttggtaaaacaacccatctttaattctgaaaatcttaaatactgaaatggtaaatgtttcaaatatttgtttatatattcatttaagaaaattaaaataaaatagataaatacttcttttttctgcgacatgataaatattaaatactgctttcgtaagttttggattcagtattttttgcttcagtacttttataaactgtaattgattttgacaaaatattaaatacttttagttaaacaataaatgtttcaaaagtttgtttatattgatcatttaagaaaatgaatgaagcttcttctcggcttagcttgaagaaccaaaaattaaaaaaaaaccctatttcttcgatttatcgctcaaaacctagttacccccttcttcttcttcttctccttgaaagagagagagagagatgacttctcacatacctatggtgatccctaagccggagccagtcactgattcctccccacaaactccgattccaccctcatccttcttcaatttcaacaccaccaccacccaatctcccctcgaacctaacttgtacaccgagttcaccaacgtcgccgagactttccgctccgccttcgcacagcgcctcaaacgccacgaggacgtcacggtcctcgattccctaaccggcgccatcgtacccgttcccgaggagcaagatccggatccggatccggtcagttacccttcgcagtccctcaagccgcgtaaacctcaggagcgctcgtctgagctcgtgaggatcaccgacgtcggccccgagggagagaggcagtttcgggaagtggtgaggaagacgaggatgatctacgattctctccggatcttcttgatcctcgaggagactcgtgaagtgctcggaaggaggagaggcaggcccgatagcaaagccgcctcgatgatgaaagagcgtttcctttggcttaatcgggacaaacgcatcgtcggttcgatccccggcgtccaggtcggagacatcttcttcttcaggctcgagctctgcgtcatggggttgcacggacagacgcaggctgggattgactatctcattggctcccgcagctctaacggagagccgatcgccaccagcgtgattgtctcaggtgaatttaaaccggttcagtcagattccggtttagttagattaattatggtttagttttcttttgagctgaataacaaactttctattgattgatttgattgaattcaggtggttatgaggatgatgatgatcaaggggatgtgattatctacacgggacatggagggcaggacaagctcgggaggcaggctgagcatcagaagctcgaaggtgggaatctcgctatggagaggagtatgtactacgggattgaagtgagagtggttagaggttttaagtacgagaacgctgtttctagcaaggtttatgtttatgatgggctgtttaggatcgttgattcttggttcgatgtggggaagtccgggttcggtgtttttaaatttaggctggagaggatcggagggcaggtggagatggggacgtcggtgttgaagttcgccaagacgcttaaaaccaaccctttgtctgtgagaccgagcgggtacatcagcttcgatatctccaacaggaaggagaacgctcctgtgtatttgttcaacgacgttgatgacgatcaggagccgttgtactatgagtatctcgccactacttctttccctcgcggcatattgggtggtagtaatggtgataatgcgagtggatgcgaatgtgtcagcggttgtagcagcggctgcatctgcgagaggaagaacggtggcgagtttgcttatgattacaacgggaatttgataagaatgaggccgttggtgcatgagtgtggaccggggtgtaagtgccctccgacgtgtcggaaccgcgtgacgcagaaggggttgaggagtagactcgaggtgtttaggtcggtggagactggctggggggttcggtgtttggatatattgcacgctggcgcttttatttgcgagtatgttggggttgctttgacgagggagcaagccaacattctgacaatgaacggcgatactttggtgtaccctgctcggttttgttctgataggtggaaagattggggagatttgtctcaggtgtttccggattacgagcggccttcgtatcgtcagatccctcctgttgattatgcgatggatgtttcaaagttgaggaacgttgcttgttacataagccacagtaatgattcgaatgtgattgtacagatggtactgcatgatcacaacaatctgatgttccctcgtgttatgcttttcgctgctgagaacattccgcccatgactgagctcagccttgattatggagtctctgatgatgaatggagccccaagctcgccatttgtaattaa

SEQ ID NO: 362 - DNA, 3473 bp, Brassica rapa
  source 1..3473: mol_type = genomic DNA
ttagctggtatatcatcaacatcaactaaattagatgatacgaccgctgatattatatatgttttcgacaaaaagtaaatattatgtatgtcatttaaattattcaaaagtacatatatgtttttccacgatcatataattcggatatgaattgaacatatcgcgatatgttggttatgaaaaagccattttctcgtctatgtacaatataaaatcataccaaaattaaaagattaatttctaaataaaaagatcttatttttaaaacagaatgttgaatagtttatacttctaatttagatcgtattttatataggaggtttattgaatccaagattcgtgtaaatctaagattcgagtaaatccaagaaaatcttagatttgagtaaatcttaaaaagattttgttccaatgtttatgagtttttgtagaattttttaaatttaaatatttatttaaaattatatttttatattttaaactactataggtcgatatttttatcgttttatgaaatatataaatatataaaaagaaattgtattttcccaaatatatgctcatgtagatgtagattaatacgtcagttaatttttcttatgaagataacacatatataatattattatttaaaaaaatatagttaagagcaatgttttttatagaaaatgtaaacgaatatatctcttatacaagattacatttttaattttactaaataatgaaatttataaaattttacatttcccaagaatatatttttataaaataactatttagatttattttatttaaaaaagtattctacacatgggatttcgtcggcaaaattagctggtatatcatcaacatcaacaaaattagatgatacgaccactgatatggcgacttatatatgttttcgacaaaaaagtaaacattatgtatgtcatttaaattattcaaaagtacatatatgtttttccacgatcatataattcggatatgaattgaacatatcgcgatatgttggttatgaaaaagtcattttctcgtctatatacaatataaaatcataccaaaattaaaagattaatttctaaataaaaaagattttatttttaaaacagaatgctgaatagtttatatttctaatttagatcgtattttatataggaggtatatcgaaccaaagattcgagtaaatccaagattcgagtaaatccaagaaagtcttagatttgagtaaatcttaaaaagattttgttccaatgtttataagtagactataagattagaaaaattcaaataccatcctatcatttccttatgcctataagtaggcaataagatcaccatagtctgttgtccaaaaagaaaaaagaaaaaaaaagatcaccataagtctttcaaagcatttcgaaatcattaaaaaaaaaaccaataaagtcggatccggatccggatctcggcccaaagcccaggtgtactttccgtctccgtcccgcttcatttagaagaatgaatactctattcgcatttccagaacttaaccgcacgccctccgccgccgcgatgatgtcactgcctccgagactacgcgtcaaggccgaaccaattgacgatcctacccctcctcctactcctactcctactccaactcccaccctcaccccctccgatatctacgccgagtactacagcctctgcgaacgtgtcgcttccgcattggctaaccgtaacaacgacctcctcgcgatcgtccccgtaccggaagaaaaacctcccctcctccactctcctccaccgatcccaaccccgccgggatcaggagacaaccgcgctctctcctcccgcctcccgccgaggttccagagaccgcatgagctcgctcgcgtcgccgacctagggcgcgaagaccatatacaccgcagagagatcctgaaacggactcgagcgatctacgactccctccgcctccatataatcgcggaggcgatgcggcttcccggtcggcggcgtaaacctagagccgattacaacgcctcgactctgatgagggagcgcggactgtggctgaaccaggacaaacacgtcgtgggttcgattcctggggttgagattggagacatgtttctttaccgtttggagctctgtgtgattggcttacacggccagccgcaagctgggattgattttctaacggctaaccgaagctcaaacggtgagccgatagctactagcattatcgtctcgggtggttacgaggacgatgaggatacaggggaggttcttgtttactcagggcacggtgggcaggacaaagtccacaggcagtgtcagcaccagaggctggaaagtgggaaccttgcgatggagaggagtatgcattacggtatcgaagttagggtgattcgtgggtttaagtatgataatgtggttagctcgaaggtgtatgtgtacgatgggttgtataggattgtacagtattggtttgatgttggcaggtcagggtttggtgtgtttaagtttaagttagttaggattgaagggcagggtgagatggggagtaggaggatgaagtttgctcaagcgcttaggactaagccgttggcggttaggcctaatgggtatataacgtttaacctttctggtggtggactaagccgttggcggttaggcctaatggggatataacgtttaacctttctggtgggaaggagaatgttccggtttatctgtataacgacattgattttgatcgtgaaccggaggggtatgactacattgtgagatctgcgattccctgtgtgatttctgctcgcggaggggctaacaggggctgtgattgtaactattcgtgtggtagtgattgtttttgcgcgaggaggaatggtggtgagcttccttatgatgacgacgggactctgttgaagggtaagcctgtggtgtttgagtgtggggttttgtgtgggtgtggtccgagctgtaagaaccgtgtgactcagaaggggttgagtaagacgctggaggttttcaggtccagggaaacaggttggggtgttaggacattggatttcattcaagccggggccttcatctgtgagtatgctggggtggttctcacaagagagcaagccaagattgtatcaatgagtggggatcctcttctctatccgggtcggttcacagagaaatggagtagtttgggtgatttatctcaagtgtacccggagtatgttcagccgagttatccttctctgccgccggttgattttgggatggatgtgtcgaagtttagaaacgtggcttcttacattagtcacagcaaagaatcaaatgtgatggcgcagtttgtattgcatgaccatagtaacttgatgtaccctcgggtcatgctttttgccctggagaatatctctccgttgaccgagctaagcctggactatgggttggacgataagctggaagagcggctcgccatctgtaattga

SEQ ID NO: 363 - DNA, 6169 bp, Brassica rapa
  source 1..6169: mol_type = genomic DNA
attaaccaaatctattcggagaagttaatatattttaaacaggaatcttcaaatattttgttaagattacaaatagcaattacaaattaatgaaatctatagtcttaaatggattcttattattgtaagtttatcatattttttatatatattctatcggctgatccgcttggttatttaacaattgttttaataaccaagttttcgtttatgccaatatatttaatggattattatatattttaacctaaatttattaatattcggaattaacatttaacacaatataaccttcgtgtaactcagccatataaatagtcatgcatttctaactttctaatctttacccttcagaaaaagacatgacttatactatgattagtctcactgatattaacccaaactctttattaatgaatgaatagaatcttgttgaaaaaaaaaaaattatagtataaattttagttattgttacgaatgttgagagtcagtcatgctcgggttcttacattatatttgcacttttgtaacccactatatttgtataatcaattttggtttggtcctcaactttctaatataattgaattggtccattaaactgataaccgcgtgaataaagaaagttagtcttcgtatttgttgtcccgtttttaactttttctcatattaaagtagctcaatacgaaaaatgctgctcaatatgcaaataaattaaaattcacaaatatctttatcgcgatacaaatccaaaagtaaaaaaaggcgagcgatcgtacaaaaaagaagataagaactaagaaaaaacaatattcctaaatcttcatcattattgaaatcatcgtttaccgatgcaaagatggcgcaagcttgtcatgatggtctgcatttaaaacggtaattatggatactgtcagatatcatatcaataactatcacattagctgagataatttttactattaatgttttttagaattttaactaaacgaaaatagtaatcaattgtcagacgtttcacctacgtgcaactaaacctatcctgataaatttgtgacaaagaatattgcataaattgaattagctgagctggtctacatttattcctaatcacaaaaagagcaaaaaacgtaccaaagatatctctttctttgggtagcaaacagaatcaaatttggaaagagtagagcctggtagggatcaaatacaaattacagaatagttattaaaaagcagtaatcgtggtattgttacagagtaggacccacaaataaagtagaggaaaaaaccacgaacttggagccaaagcaacaagggcataatcgtcatttcccgaaggttaattagttatttttacaaaatagtaaaaattcgtcaaccgtctcttcgctcctttaaaataaagtctcctcactcccctctctctacactactctctcctttgtctctctttccgttttcgaattttgttttcttccttcgtaagcttcccttcgaaaaatgtcgtctcgtggtggtcgcggcggcggtggaggacgtcgatctgaccagtcccccggtcccgttgcgtggcctgcactgcaaagctccggcgctcgcggcgggagaggtcgcggtaacgccgctcccgtcgcttcgagctcttcgtctcctccgtcggatgctgtttccggcgccatcggagcggttgacgtcgcttcgtcgtcgtccgtacgtgagaaacccaaggcctcggcgtcttcggattccgattcgtctctcggtcaggagttagcggagaaagtccagatcacgacggctcctccgtcgtcgtcgaaggcggtgacgtttccggtcaggccagggtttggtcaggcggggaagaaagtgacgattcgcgcgaatcacttcctcgttcaagttgcggatagagatctctatcactacgatgtaattagtctccttcgagttttctactttattgtaacaagtttgttacattaaaacaaaaaaaaaagtttgttatatttcttcagcttactgtatttgcgttacggttagggttgtttgttgcgttcgtggatgggactttatgtgtgttgattatttgtctgcgcacaggtgtcaatcagtcccgaggttatttcgaagaaggtgaacagggacgtgatgacaacgttggtgaagacgtacggagaatcacacatggcgaagaagattcctgcgtatgacggcaggaagagtctctacactgctgggcctctcccttttgagtctaaagagtttgttgtggatctgaacgacaaaaaacctgctgcgtcatctaagtaatgcatattgatctgtttgttgattggtttatagtggtagcgaaaagcacgttggttgacagtgttttggctctttttggcaggagggacaggaagttcagagttgctataaagctggcgtcaaggcctgatcttcatcagttgcaggagtttctccgtcggaaacagagagatgctccatacgagaccatccaagttttggatgttgtactcagggatctgccatcccaaaagtacgttaagaatttaaacatttactctattggactaaatattgactgaatatggacttagcattgactgtattgctttctcttcaggtttgtttccgttgggaggtctttcttcgaccccagtttgggaaggaggggtgagcttggtgatggtgttgagtactggagcgggtatttccaaagtctaagactcactcagatgggactgtctctcaacattggtaagaacttattataaatttttttcatgggttagttgcggttggttttgttgactgagatttgaattgttcatgtgttcatttcttatgatgcagatgtgtctgctagatctttctatgaacctatccttgtcactgaattcatcggcaagtacctgaatctgagggattttagcaggccactgagggactcggatcgtgtcaaggcatcttatctgatgtttattcaaccagttcagtagttatcttatagaagatattgcagttgttcatacggtttttattttgtggtggctaggtgaagaaagcattgaagagcttaaaagttgaattggcacagtttgacttcgcaagaagtgtcaaggtcagtgggatttccagctgtcccatcagcgagctaaggtatggttgcttgtttcaagaaaacctaaataaaatgcggactttgtttctgatctttgatttcctagttgctgatagtacttggtttttcatttcaggttcacgttagaggacaacacccaaaaaactgttgtgcagtactttgctgagaagtataattacagagtgaaatacccggctctacctgctatccaatcagggagtgactcaaggcctgcttacttcccaatggaagtatgattcagttccaaacaatttcatttttttctttaccttcatcatttttctgaattcaggtttctaccattaaagatctgctcactttgttttttttttttgcagttatgccggatagctgaaggccagagatacaccaaaaagctgaatgagaggcaggtgactgcgttgctaagagctacctgccaaaggcctgacattagagagaattcgatcaaaggggtatacttagtcctccttgaatcacatttacacagatgtctttatttttgcattcctcttttaatagacataacgtttgttgtttatattgttagatggtcaagaataataagtataacgagattgatcttgtgaggaaggagtttggaatgtcagttactgatcagctagccacagttgaggctcgggtcctacctccacccctggtgattttctcgactccatttttctattgttttttcttattgctatacaaattctcttttcaatgttggtcactgcgaggttctatttctgtctacagttgaaataccatgaaagtggcagagaaaaaatggtgaatccaaggctaggacagtggaacatgattgacaaggtaagtgatggatatttgtgcctactgcttctattggttttacatgtaatatcaaaattttcagccttttacatcgttttgattgttgtatatcttgtgttttagaaaatgattaatggagcaagagttgcatcttggactagcgtgtgcttctctactaggattgaccggaatttaccacaagagttttgcaagcaattgattgacatgtgcgtcagcaaaggaatggtatgacttagttgtgactctctccttttattctagaaagatcgctgactgttttttatatatacttccagcaattcaatccacagcctgctattccgttcatctcttgccagcctcaaagaattgaggaagcactttgtgatatccacaaaagggcacctggtcttcaaatgttgattgtaatattaccggatgtcactgggtcatacggtaaaccactaaatccttattgtaatattgcttagttggtatttttgtgatgtaaaagatgccaacaatttggttgcttccacgttatttatatatgcagggaagatcaaaaggatatgtgaaacagagctagggatagtatcccagtgttgtcaaccaaatcaagttcgtaaactcaacaagcagtacatggaaaatgtcgcattgaagattaatgtcaaggtcttgtgatctatttttcattttctttcatagttccacatgtttatatttatgatactgtaaatttaagggttaatttgtatcagactgggggacggaacacagtccttgatgatgccattagaagaaggattcctctgattagtgatcgcccaaccataatctttggtgctgacgtgactcaccctcaacctggagaggactcgagtccttctattgctgcggtattgtatcttcactgcttttacttttctctcactatcttttctaattcagcttataagtttctatttatatattttttactaaaggttgtggcctcgatggattggcctgagataaccaagtatcgtgggctggtgtctgctcaaactcatagggaagaaatcatcgaggacctgtataagctggtacaggatcctcagcgagggccagtccacactggtatgataaggtaagaacagaagctctttctcctttttcttcttgtttgctttgatttcgcagattcacaaaaacaagaacattatgtatctgaatgcagggaacatctgatcgcattcaggagggctacaggtcaaaaacctctgaggatcatattctatcggtaagtcaatattgatatagggcctgaaaataataatctgttttgctaatcgttttacctttctatgcagcgatggtgtgagtgaaggacagtttagccaagtgctgttgcatgagatgactgctatacgcaaggcgtgtgcctctctcgaagagcgttatcttccgcctgtaacgtttgtggtcgtccagaaaagacaccacacacgtttgtttcctgctcaacacgggaaccgtgagacaactgataagagtgggaacattcagccaggtatctcgccacaatctgctctttaattcgtttggatcattgtcaacatatacaaatttgaaatatttttttgcatcttcttcttataggtaccgtcgtcgataccaaaatctgtcatcccacggagttcgacttctatttgaacagtcacgctggcattcaggtaaatcaagaacttcccctagtatagttaaacatctttagccagtttcatcattaggaactataagctgcttttgtttggttatagggaacaagcaggcctgcacattaccatgtgcttgtggacgagaacgggttcacagctgatgccttacaaatgctcaccaacaacctttgttacacgtaaggaacaaaaacttacatttcccttttgacatgtttgtagtagagaatttttctgaaaattggtcttaaaccgtaggtttgcgaggtgtacgagatctgtttcaattgtgccaccggcttactatgcacacttggctgcattcagggctcgttactacatggaaagtgagaactctgatggaggttcaagcaggagcaggaacacaaccgcaagcacgagtgctgttgtctcgcttcttccagcaaccaaggataacgtcaaggacgttatgttctactgctga

SEQ ID NO: 364 - DNA, 3519 bp, Brassica rapa
  source 1..3519: mol_type = genomic DNA
atggggaaaacgattcaagtgtttggtttccctaacggcgtgagcgcagaggaagtcaaaaacttcctcgaaagactcactggcccaggcacggtctacgcaatcaaagtcagacaaccgaaaaaaggcggtcctagagtctacgccatcgttcagttcacatccgagagactcgctaggcatatcgtcactctagccagccagcgtctcgactacggaagatcttacctcaaggccttcgaagtcgaacaagacatcgtccccaaacctagagcttcgttgcacaacatgccgaatttaaaaatgtacttcggatgccaagtctctcccatgaagctttccgttttctggagtgctcaaaacgtcgccgtatcgtacggaacggggatgcggaaattccacttctcattgtcttggtgcgagaaagagtatcgcctcgagcttccttacgaaaacatatggcatatcgatttgcatttccctcaaggacgtagagactccaagtttcttgtgattcaggtcattggtgctccgaagatcttcgagaaagaagatcaacctgttaacctcttgttcgggttgctagacttctaccgcgacgggtccgacgagcagtggataagaactacagacttcacttcctcttcatgtataagccaatcatcagccttctgtttagagcttcccgttcatctcaacgtctctgacttcagagagaacttcgccaactacgcggaacacgaagacagcactttcgccctcgaatccgggcgtagcttctcatcaaacgcgaacaaactcgtccctgttgttgaccctcctccagggtgttacctccctttcgagatcttgttcaaagtcaacacactggtccaaaacgcgtgcatcccagggccagctctcgatcccgccttctatcagctccttaacccgcagagattcgatagagctctcatagaccactgcctcgagaagctttttcaccttcccgaatgttgctacgctcctgctcgttggctacgcgaagagtactcaacatgggtaacgaaagggaagcttccacagtctcctatgatatctctagacgatggactcgtgtatatgtatcgggttcaagtcacgcctacaagagtctatttctctggccccgaggtgaacgtttcgaaccgcgtgctacgtcactactcagactacatcaacaacttcctcaggatctcgtttgttgacgaagatcttgagaaagttcgctccatggatctctctccacgctcctctaccgtgaaaagaacaaagttatacgagaggattaactctgttcttagggacgggatcgtcatcggtgataagaggttcgagtttctcgcattctcttcctcccagctgagggagaactccgcgtggatgttcgcgccggtcaacgggatcacagcagctaacatcagagcttggatgggggatttcgacaatatacgaaacgtggctaaatacgctgcgaggctaggccagtcgtttagctcgtcgagggagacgcttactgttaggagagatgagattgaagtgattcccgatgtcgagatcagatattctgacgttcactatgtgttttccgacggaatagggaagatctcagctgagttcgctagacgcgtagctaagaaatgcggcttgacggagtttttcccgtctgcttatcaaatccgttacggcgggtataaaggagtggtggctgttgatccgaactcctcgaagaaactgtctttgaggaagagtatgagcaagttcgagtcggagaacacaaagctggatgtgttggcgtggagtaagtaccaaccttgttatatgaacagacagctgatcacgctgttgtctactctcggagtcgaagacaatgtcttcgagaagaaacaaagagaagttgtgaaccagctcgacgcgatcttaaccgatcctcttgaggcttttgaggctctcggtatgatggctccaggggagaacacgaagattctcaaggagctgatcttgtgtggttacaaacccgacgccgagcctttcctctcgatgatgcttcagaatttcagagcgtcgaaactgttggaactgcggaccaaaactcgggttttcattcctcgcggaagatcgatgatgggatgccttgatgagaccagaacgcttgaatacggtcaagtggtggtgcagtatacggatcccactaggccgggaagtaaatacatcgtcacgggacttgttgtggttgcgaaaaacccgtgtctgcatcccggtgacgtgcgtgttcttcaagctgtcaacgtcccagctttgagtcacatggtggattgtgttgttttcccgcagaagggcccgcggtaaactcttgtctaatcttgattataatttttgccaaacttctttaatagtctagaacttacattggaatctgatgttatttttgtgcataggccacatccgaatgagtgttccgggagtgatttagatggagatatatactttgtatgttgggatcctgaactcattccacaaggaacgtctaacccaatggactacactcctgaaccagctcaaatcttggatcatgatgtcactattgaggtaaaaatatctttgatcgcttgtttattttattttattttttgttatttttgcatttggatagtaattttgatatgctaaacctttttccaggaaattgaagagtatttcacgaactacattgtgaatgatagtcttggaatcatcgcaaatgctcataccgctttcgccgataaggaacctctcaaagcattcagtgacccgtgcattgagcttgcacgaaagttctctatcgctgttgatttcccaaaaacaggtgttgcagctgagatacctcagcatctttacgtgaaagagtatccagattttatggagaagccagataaaccaacgtacgagtcgaaaaacgtgattggtaagcttttcagagaggtgaaagagcgagctcctccgttgatctcgatcaaatcgtttactcttgatgtggcctccaagtcttatgacaaagacatggaagtcaacggattcgaggagtatgttgaccaagctttcttccacaagggaaattatgattacaaattaggtaatttgatggattactatgggattaagacagaggctgagatacttagtggcggtatcatgaggatgtcgaagtcattcaccaagagacgggacgcggaatctattggaagggcggttcggtcgcttaggaaagaagctttgtcgtggttcaatgcttctgaagatgaagaagaggtggttaatgaatctgcaaaggcctcggcttggtatcatgtgacgtaccaccgaagttactggggagtttataatgagggtttgaaccgtgaccatttcttgagctttgcgtggtgcgtttatgataagcttgtgaggattaagaaggctaatgttgggaggcgtcagcggcaggagactcttgagcggttaggcctcatgcgtttgagttga

SEQ ID NO: 365 - DNA, 10545 bp, Brassica rapa
  source 1..10545: mol_type = genomic DNA
ccactcaacgtacatccgccactgattagaagtagggcccggcaaataataagagaaaacattacaaaataataacatgaacaaatcgaaaatattcctactcatatatagattcataataacctgttttccaaccggttgataaatatatcctcccagaacaaaattcataaccttccctgcagcaacactttgactcctaccatatggctaagaagcccataccttggaaaagagaccacccatcagacctgcaaaatgttcccgggaaagtatgagatgctcccgtggtccaccaagtcacagtagagtattcaaaggtaccctgcagaatattgctttccccacaacttaagacatctctgcttctaaataatttgtgttaaaaccactatgggaccacagaatctagagctacgaggctgtggttatatgcggactatgccaccatccaccctacaacagtggaaagaaaaagtagatgtacaattcccatagagtttttcgtttcatggcttcacatctgacttaaaactttttttttcttttgaaaacaaaattaatataatgttaaccatataacaaaatgactcggaagattcgacgtaaccagaagcgagaaagaaacacctatagaaataacacatggtctgttcctatcaatctgaaatacagaccaaaaagaacaaacaacattataaacagaaacactaaatcatacacatacaaattgaacacgaatgagccactgaacactgacacacaaactacaaagaagccaacaaaccaggccaaatacatggcaaaagccaacaacatatggtcagacatatattattgtatactgctacacctcaagtaagggcacatcacaaaacatatactctactctaaaaatcatatatacataaacaatacaaattccatacactgcaaaactggatatagatacttcgagcaactaaatatatagaactccgcgcgaagcgcggaaaaccactagtgtttaaaaaaatagctaactagatgttttttttttcaattttgacggagtatggaaatgttttaaaacactttcattaaagtatcttacgatattcctaataaataataaaataaatacgttattaaacaatgattatgcatatctaaataatgaggataaatccctctagctaatcgaatttgaatttattaacaaactaaatcacctatcaatgtgtagtcgaatcatttcaaaggagacgacgacaaaagagagagaaaaaaaaaaagagaggaatcatttggaaggagacgtgcgaacgatcatgaataatgtgtgagagagcagttgacctcagcttgacccagagagaaaataaaaaagaaaaaagaaaaagagaaaaagaaataacttcgttggggaggcaaagctctgggaaaaagcaaaaagcaagtaagccaagccatctcaattctcactgccacactctctcaagtttcttcccttcttcaaccatgccggaccgcgaaatcggcgacgatgcttctgacactaacctctcctcttccttctcttccttcgcgtcttcctcctcctccttctcttcctcctactccgctgctggcgcttggacggatgatcactccgccaaaatggagaaagatcctagaaaaatcgccaggaggttcgatttccccactttcgcagctcgatttcacctttccgttagcttgctttcacgtttcggtttccgtacagtttcgtttatcttttagattgcaagtttgtagctgagtaaggtcatcggactagtaaattaacatgttatccaaaggaaatctgatgagatcgtctttgattgcagaagaaaaaaaacgagtttgttgttgattgtgctgagattcattggtgtggtttggttttgtgcatgaaggtatcagctggagctgtgcgagaaagcagtggaggagaacgttatcgtgtatttaggaactggttgtgggaagactcacattgctgtgatggttatatatgagcttggacctttgattctcagccctaggaagagtgtttgtatctttcttgctcccactgtggctttggttgaacaggtgagagcataaccctcttgattacgctttatggatctggttgattttggctctatgttcttactctcttgtttgtgcttttttttttctctttctcagcaagcgttagtcatagcaaagtctatcaacttcaaagttgcaacacattgtggtggcaatcggactgtgactacccattctgactgggagagagaggtttcagagaatgaggtgatctttctatccttttaaccctataagtctcattaagttgattgtttttttctctaacctttttatgtggtaactatcgttttgatcgatgagatcatcgttattggggctgtctgtttcctgcaggttctcgttatgaccccacaaatacttctgcataacttacagcactgtttcatcaggatggagtggatttcccttctaatattggatgagtgtcaccatgctcaagaacaaagcaaccatccttatgcacaaatcttgaaggtatctttctccgccttcttggtatgtggtgactgatcacatttaacatataaccaacttttaggggcttgcaaatgcaggttttctataaaacagaaggtgtaaaaggacctcgtatatttggaatgactgcatctccagtggttggcaaaggtaggccccatttctgtgatgtgaattcctgattacagttccatttctgtccaaatcattcattatcgcattatgaaatggtcaaaaattcccaataccagtcagagaaactcgtaggaagatttttttatattttttctttaccatttaaatttccctttataacggtgaaggaacatatgttccgcagaaatcctaaagcaagagatttagctcctacattgcttacctttcgtttttctctttcgatcatgaggtttatggtgaccttggtattagctgcgacctttgatcatattcgttctatacatgttcgagtgtttgacagcactacctgcttttcagggtcttttcaatcagagaatttatcgaaaagcataaatagccttgaaaatttgctcaatgccaaggtatgctggttcttaaatcccctaattttggcatgcaagatatttttgctaggcgtgattggtgatagcttatatgttaagacctgtcacactgtgttgacttgagtgataccgaagtagaaataacactcggctgggatcttctcgtcccaagattatggtgccaaacttttttttgatgcaatctaaagcaaaaatatcattctcttggttggaatcatgataatggtcttacactcagtttactttcgaacaatgttttaatatttccctttttgtgtactgatcttaaaggtttactcagtggaaagcaatgtccagctggatggttttgtttcatctcctatagtcaaagtatattattatcagacagctgggactgaagcatctcaatcgaccaacatatatgaaaacatgctggaggacatcaaacagcgggttgtctaatgtgtctcataactttttttgtcaccgtagctggatacatgaactgatattcttttcctgatatgaacagtgtttgacatcacttaagcagcagattgataaccatcaaacacaggtcctcttaaatatgaaaaagcttctgaaaagaactcatgataatctcatatatagtctggtgaatcttggcctttggggagcaatacaggtaagacatttcatactgaagctatttatagatttgatatacagttttctggttttggtttcagatgtctttatttccgaggctccttatattgagtgttgatcacttgtattacctggtttcttcaatgtttcacgaagcagcaaatgatatattttagggtgcagtaataatcacaattgccaagtaacttcaactttgcattagttgtttactagatcgaggtctaaggttacaccgactggcataagattccttactgtggattatttccgatttcccaattttataaaagttcctagagaaaaattatcggcaaggttccaagcatttttctttaatgtatgatgaccatttaacctcgatatgtaaaccttacatctagccaaaatgattctgtgttgtttcttgtttgtctcgtatgtgtctatatacatgctgtggcctcataatgtttccctcttcatttattataggctgctagaatccaactgaacactgaccgcaatgtacatcaagagcctttggaagagaataataagtcaaagatatgtattacatatctctctctggctgccgaagtcctttcttctaaagttgctaaaggtatgatggcatggtatcctagtttgtgttttctttaaaattaaaattttcttccaataatgcatatgctttttcggagttgcaacttgtgaaacttttaactatattctgcacttcattttgttattttcatgtgaatgccctgataaagaagtcattgattgcctcattatttgtttgcggtctttgtgattgtagatgagaatgcatctgaacttatcagcttaccagcgttgaaggaaccatttttctcaagaaagctattacaactgattaaaatcctttcggcattcaggttggtacttgggagaggtgacagagtcttggaatacttttgtgctgattattccaaagctattacaaatgtgctttagtttatttttttttgtaagatacgtttgagcacctagaagctagactttatagatacatgaaaaattggccataatcaatagatctatgttccgagacagaatatggcttttcctgaatagacaatttctagctcttacttcaccttcaaaagacattggatttttatatggaaatggtagttgttattgtccactagtcctgtgaaaccttgattgctttttattacatcgtgtttgattcaactgtcatgctaatgaggccattttgaaggaccacggtatattttgcagtaagcttcaatttgtatttttctttcaggatagagccacacatgaagtgtataatatttgtcaatcggattgtgactgcgaggacgctgtcatgcatactaaatagtttgaaacttctagagtcttggaagtctgatttccttgttggacttagttctggagtgaagagcatgtcaagaaagagtatgaagacaattcttgaacggttccaatccaaagaggtgatctttagccatctttgaatctatagttactattgggagatccatgtacactgtatgccttacggttcacacatataatatagaaacaaaatacaggcaaacacccgtttagacagacatgtattttctaggatcaattttcaagccacttccaactaacttctaagacttcctctttttgttccagctcaatctactggttgccactaaagttggcgaagaaggtcttgatattcagacatgctgtcttgtgatccgttttgatttgccggagactgttaccagcttcatacagtccagaggccgtgctcgaatgcccaagtctgaatacgcgtttctagtggacaggtctgtaggaatgagaaattgataaggccataattatgagatcgtttgtgctcctacgcatttacattttttcttctttcgtgattcaggggaagcgagaaagagatggatctgattgaaaattttaaagtaaatgaagatcgaatgaacctggaaattacttccagaacgtcagaggaaacttgtcctagacttgatgatgaggtatacagagttcatgagacaggagcttgtatcagtggtggaagtagcatctcccttctctataagtattgttctaggcttccacatgatgagtaaggcttccaatttttctgttggtgcttcttgtattcactttccacagtaagcaggcgtgtcataactgaatttccatttgccgccttttgttccaccagattttttcagcccaagccggagtttcaattcaaacctgttgacgagtttggtggaacgatctgtcgcataactttacctgctaatgctcctataagtgagatcgtcagttcactactaccttcgattgaagctgctaaaaagaatgcttgtctaaaggctgtctataagttgcacagcttaggtgtacttaacaattttctgttgccggattcaaatgaagaaactgaggacgagttgtcagatgaagaatttgactttgataaagttgaaggtgcgtaagtggttcagttataaatcttagttgtttatactgatcactcgttatataacggtcttttttttcttgccaggtgaagcctgttcacgaggtgaactgtatgagatgattgttcctgacttgtttaaacaaaagtgggatccatcaaagagttgtgtcaatcttcaatcttactacataaggtttgtgcctcatcccgccgataggatctacaagaagtttggtctcttcatgaagtcacctcttcccattgaggctgagactatggattttgatcttcaccttgctcatcaaagatctgtaagtgtgaagatttttccaaaaggagacgccaatttcgacaatgatgaggtattgagctttttaatttgataaaaatttaactagattgacgtttctaatttgatttatgttttatgcagataaggctagcggagcgtttccaggaggttgccctgaaaattatttttgaacggcgggagctaattacggaatttgttcccttggggctgcaagactcttttagaactagcaaatctaccttctaccttcttcttccaattaatctggatgcttcagaaagtgttttatttgttgattgggcgactattagaagctgcttgtcgtccccaatcttcaaggctccgtctggcttagtagaagatatggatcctcctgtgggatctcatttaaagcttgcaaatggctgctggagtattgatgatgtgaagaacagtgtggttttcgcaacccacaaaaagcaattttattttgtctcggatatctgccatggaagaaatggattcagtgctattagaaaatcaatcaccgaaacccatctggaaagcatatataattcgtaagctactaaactactactatttagtgattgttcgatggcatcttttctctggaggtcctgcgttctgcgttttctttgtgtcgctctagcttgattttgttacaatgttcttttcccagtttccagagaacagtataacaatccttatcactttgggtgggactgtagaattttataggatcacatgattttctgagtttaagaactttcccattttaattaacaaaaccaggtatggcgtgaaactcaagcatcctttacagccactcttgcgtttgaaaccgctttgttatgttcggaacttgcttcacaaccgaaagcgggagaatttgggtaattttcttatttgcctttttcatattacaaatttcttgtgcatgtacgcataacacaccttgtatactctaattttaccattctctcattaccaaaaaacagaaccaaatgaacttgaggaatatttcatagaaattcctccagagctttctcagttaaagataaaaggattatctaaagacattggaagttcgttatccttgctaccatcagtcatgcaccgtatggagaatttactcgtggctatcgaactgaaacacatgctgtctgcctctatccctgagatagctgaagtttctggtcacagagtataatctcatttcaattgataacccatttacttgattttcttaaaaatttgttatgtttgatcttttaccgatcgagtgaattggtataggtactcgaggcgctcacaacagagaaatgtcaggagcgcttttctcttgaaaggcatgcggtgcttggggatgcattcctcaagtttgctgttagccgacacctgtttctacaccatgataggcttgatgaaggagagttgactcggagacgctcaaatgctgtgaacaattccaacctgtttaggcttgcaaccaggagaaatttgcaggtcctcaaaacattccttagaaatctttggtggccggtacattttaaatatagtttgagctgttgctgcacagaacgcacatactgatatggtgcatagattaccaccagaacccttgcctacattgaatatattctcagttacatttgttcgaaatcaaatctcagatagaagcagactgagatgtagtaattagttaagtctagctttggattatatttaaccttggcattttcccaggtttacatccgtgatcaagcattcgatcctacacagttctttgcattgggccatccatgcagagtaacgtgtgacgaggtagcaatgaaagaggttcattccttggataaggttcctgggcttttggaatcaagtactggtgaaatcagatgtagcaaaggccatcactggttgcacaagaaaacaattgctgatgtggttgaggctcttgtcggagcattcttagttgacagtggcttcaagggggccattgaatttcttaaatggattggcataaatgttgattttgagtcattgcaagtaagagatgcttgtgttgcaagcaagcggtacatgccactgactacttgctttgatttggcggcccttgaaagcctgcttggatataagtttctccacaaaggtctacttttacaagccttcatccatccatcttacaacaggcatggaggaggctgctaccaggttatttttcttcttattatttttcatttctttttgatatccatctatggtaaccaaaattctctaatttggggtctgcagagattggagtttcttggggatgctgttctggactacttgatgacatcctattttttctcagtctttccgaaactgaaacctggtcaactgaccgatctaagatcgctctcagtaaataataaggcgcttgcaaatgttgctgtcagtttttcactacagaggtttctattttgcgattctacatatctccatgatgctataaaggattataccaacttcgtgacagcatcaccattggccagcggaccatctgaaggtccaaaatgcccaaaggtgtgtgtttggatcttccttccatatgaaggcagtattggctgcttatgttctgtatattagtgtgttttggtggaacctatgataattcgttgaagttttcttttagaacttgtcttgtttgatgtaatgtggatatatatatatatatatatatatataaagaactaatgtagttattatatttgcatgcaggttcttggtgacttgatagaatcctttttgggggctcttttcctcgactgtgggttcgacttgaatcatgtctggagaataatgctatcttttttagatccagtgaaaaacttgtctaacctgcagcttagtcctgtgaaagaactgcttgaatattgccagtcttacaagtgggatcaggagatatcagcgacaaagaaggatggtgctttctctgttgaattaaaagtgaccaagaaaagttcttgccttacagcttctgcaactggtcggaacaaaaaagagagtaccaaaaaggctgctcagctgatgcttacgaacctgaaggtagttgcggcttaactaccttctatttatgtgatgtatttctatcttatgctacctagtgttcagttttgtaacgggtttcttaacaaagtctttgggtaattcatccacaggctcatgggcatataaaaacctccaatccgttggaggatgttctgaagaatagcatccgaaatgaagctaaattgattggctacgatgaagagcctatagatgttgtggatcgtgatgggctggacgttgaaaacctaaatatccaagattcttttgaggaggatcctgtcactgaaagcaagactagtgaaacaagcagctcatacatcatcagacgagttctcaccaatgcaccaccatctgaaaaagaagaaagccttcctcaaaagaccatcaaagacgcaggtattttgatgacgaacttttgaagtaaaatgattggatattacttcctgcatctatatatcctgagttattaatttgatgactaaaactgaacaggtgggtcgatcatcaaaactgcaaaatctctcttgcgcgaaacatgtgttgccaactgttggaagacaccagagttcgtatgttgtgaggaagggccagcccacctgaaaacgtaagtaaattgatcaagtaatgcctacatctctaaactgctaggtactggatttgttgtcgtcaactatgtgcatgtttacaggttcagctataaggtaatcctggaggttgtagatgcccccaatatgacactggagtgttatggtgaagctaaaccaactaagaaaagtgcatcagaacaggctgctcaagctgctttatggtgtctcgagcatactggattccttcgccgatga

SEQ ID NO: 366 - protein, 922 aa, Brassica rapa
MDATTGNGAELESANGSGVSDALPPPPPVIPPNVEPVRVQTEVAVKKNLRVPMARPGFGSKGQKIQLLTNHFGVKVANLQGFFYHYSVALFYDDGRPVEQKGVGRKVLDKVHETYHSDLDGKQFAYDGEKTLFTFGALPSNKMDFSVVLEEVSSARTNGNASPNGNEEPSDGDRKRLRQPNRSKSFRVEISYAAKIPLQALANAMRGQESENSQEAIRVLDIILRQHAARQGCLLVRQSFFHNDPSNCEPVGGNILGCRGFHSSFRTTQGGMSLNMDVTTTMIIKPGPLVDFVIANQGAKDPFTVDWSKAKRTLKNLRIKVSPSNQEYRITGMSDKPCREQTFEYRPRNAPKNENGESETVEITVYDYFLRERNLELQYSADLPCVNVGRPKRPTYIPLEHCTLIPLQRYTKALNTFQRSALVEKSRQKPQERMNVLSKALKVSNYDAEPLLRSCGISISSNFTQVEGRVLPAPKLKMGRGDELFPRNGRWNFNNKQFVEPTKIDKWAVANFSARCNVRQLVDDLIRIGGMKGIEIAAPFDVFEEGHQFRRAPPMIRVEKMFEEIQSKLPGAPQFLLCLLPERKNCDIYGPWKKKNLTEYGIVTQCMAPVRQPNDQYLTNCLLKINAKLGGLNSMLSVERTPAFTVISKVPTIILGMDVSHGSPGQSDVPSIAAVVSSRQWPLVSKYRASVRTQPSKAEMIESLVKKNGTEDDGIIKELLVDFYTSSGKRKPEHIIIFRDGVSESQFNQVLNIELDQIIEACKLLDENWNPKFLLLVAQKNHHTKFFQPNSPDNVPPGTIIDNKICHPKNNDFYLCAHAGMIGTTRPTHYHVLYDEIHFSPDELQELVHSLSYVYQRSTTAISVVAPICYAHLAAAQLGTFMKFEDQSETSSSHGGVTAPGPVSVAQLPKLKDNVANSMFFC

SEQ ID NO: 367 - protein, 906 aa, Brassica rapa
MGSDEDKALPLPPPVLPPNLLPEVESIKKNTLLPMARRGTGSKGQRIPLLTNHFKVNFNNANGQFFHYSVAITYEDGRPVEAKGIGRKILDKVQQTYKTDLGSKYFAYDGEKTLFTVGPLPSNKLDFSVVLEDAPSSRNNTGNGSPNESNDADRKRSKRPNQSKKFMVEISYAAKIPMHAIAAALQGKETDSLQDAIRVLDVILRQSAARQGCLLVRQSFFHNDAQNFVPIGAGVVGVRGFHSSFRTTQGGLSLNIDTSTTMVVQPGPVVDFLLANQNVKDPYSVDWNKARRVLKNLRVKVAPSNREYKISGLSENRCKEQMFSRNSKNDMGEVVEHQTTVFEYFTEFRNIQLQYSGDFPCINVGKPKRPTYIPIEHCELVSLQRYTKSLTNLQRASLVEKSRQKPLERMTSLTTGLKNSNYNADLVLQESGVSIGSSFTHVEGRILQAPKLRVGNGEDFQPRNGRWNFNNKKLVEPTTVTRWAVVNFSARCDTNRLIPDLIRCGNMKGINVEPPYEVVFQENAQFRSAPPHIRVEKMFEQIQSKLPGKPKFLLCILAERKNSNVYGPWKKKNLAELGIVTQCIAPTARINDQYLTNVLLKINAKLGGLNSLLTMERSQAMPSVTQVPTIIVGMDVSHGSPGQSDVPSVAAVVSSRQWPLISKYRACVRTQSRKVEMIDNLFKLVPGKEEKMVDEGIFRELLVDFYSSSQKRKPDHIIIFRDGVSESQFNQVLNIELDQMMQACKFLDEKLNPKFTVIIAQKNHHTKFFQDKGPDNVPPGTIIDSKICHPRNNDFYLCAHAGMIGTTRPTHYHVLYDEINFTTDDLQELVHSLSYVYQRSTTAISVVAPICYAHLAAAQMGTVMKFEDLSLSETSSSHGGITTPGAVPVPPMPKLNPEVASSMFFC

SEQ ID NO: 368 - protein, 930 aa, Brassica rapa
MDSHEAKRLPPPPPVVPPNLVPEREPIKKTTLLPMARRGIGSEGVRTPLLTNHFRVNFNNANGHFYHYSVTITYEDGSPMEAIGVFRKILEKVQETYRTDLGSKYFAYDGHKNLFTIGALPSNKMDFLVVLENTPSSRNNTGNASPNDADRKRSRLPHRSKKFMVEISYAARIPMQAIASAIRGKETDNIQDATRVLDVILHQNAARQGCLLVRQSFFHNDARNYINIGGGVFGARGFHTSFRTTQRGLSLNIDTSTTMVVQPGPVIDFLLANQNVNDPKYLDWNNARRALKNLRVKVVPSNRECKITGLSEERCKYQMFTMNSKNEKGDVQITVYNYFTEIRGLKLRYSGDFPCINVGKANRPNYIPIEHCELVSLQRYTKSLSSFQKASLVENSRQSPPERMASLTNSMKKSNYNADLVLQESGVSIGSSFIQVEGRVLPAPRLRIGNGEEFQPRNGRWNFNKKKLVEPVTVTRWVVVNFSAECDTDRIISDLIRCGQMKGMNVEPPYKVVFQEDPNYRGAPANIRVEKMFEQIQSELRKEGKPKFILCILAEKKNSLVYGPWKKKNLIEHGIVTQCIAPPKNVKDQYITNVLLKINAKLGGLNSLLAMERSRAMMHLVTQVPTFIVGMDVSHGSPNQADIPSIAAVVGSREWPLISKYRACVRTQSRKMEMIDNLFKLVPNEKGKLVDEGIFWFDYSRVVFIACGSGFCHINEKLYALFRELLFDFYTSSGKRRPEHIIIFRDGVSDSQFNQVLNIELDQIMQACKFVEENWEPKFTVIIAQKNHHTKFFQDRGTENVLPGTIVDSRICHPHNNDFYLCAHAGLIGTTRPTHYHVLYDEIRFSTDDLQELVHSLSYVYQRSTTAISVVAPICYAHLAAAQMGTVMKFEDMSLSERSSIHDGITRSGEPPVPPMPMLNSDVASSMFFC

SEQ ID NO: 369 - protein, 1701 aa, Brassica rapa
MDPNKSTHLQMARSGNGSRGQKIDLLTNHFGVNFTTSKSQHFFQYSVAITYEDGNPVEAKGIGRKILAKVQETYQTDLGSKHFAYDGDKILFTVGPLPNNKLDFSVVLEDMSCTRSNTSTSDANTKRLRPHNQSKRFNVAISFAAKISMQAIQGALQGKETNDLQDAVRVLDVILRQNAATKGCLLVRQSFFHNDAKYFSNNHGGFHLCRGFHSSFRATQGGLSLNIDVSSTLIVSPGPVIDFLVLNQEVRDPSSIDWKKAERTLKNLRVKVDPSNREYKITGLTRLPCRDQTFLWKKKQGNGETKEVEVTVYDYFTKHLEIELRHSGGLPCISVGKPKRPTYFPIEQCHLVSLQRYTKAPTIFQRSKLVKESVQKPQEKMNVLNNAIKDSGYNNDPMLQDCGVRIDSDFTQVEGRVLPTPRLKVGNGEEFQPRDGRWNFNNKKLVEPATVTRWAVVNFSARCDTKRLISDLIRCGRMKGINVDPPYKVVFQEDPNYRGAPANIRVEKMFEQMQSELRKEGIEGKPKFILCILAEKKNSLVYGPWKRRNLVEEGIVTQCIAPTPKINDQYLTNVLLKINAKMMPLVTQVPTFIVGMDVSHGSPGQSDIPSIAAVVGSREWPLISKYRACVRTQSRKVEMIDNLFKPVTNEKGKQVDEGIFWELLFDFYISSGKKRPEHIIIFRDGVSESQFNQVLSIELDQMMQACKFVEENWEPKFTVIIAQKNHHTKFFRAEGPGNVPPGTIIDSRICHPRNNDFYLCAHAGLIGTTRPTHYHVLYDEIGFSTDDLQELVHSLSYVYQRSTTAISVGAPVMYAHLADAQMSTAVKFEDSSETSSRHGGITTSEAELVPPMPKLNANVASSIEGCCGGGDGKTEMILTEEALRKVLGISKAASSGTRIAAGSAWEDIRGPDPLPLFFRDVIESWRLWLGAGPDRRPMSSHIVGYPRIGPKRELKFALESFWDGKTGAEDLQNVAADLRRSIWKHMAGVGNKYIPSNTFSYYDQMLDTTAMLGAVPSRYGWESGEVGFDVYFSMARGNDSVPAMEMTKWFDTNYHYIVPELGPHVKFSYASHKAVEEFKEAKALGIDTVPVLIGPMTYLLLSKPAKDVDKSFCLLSLIDKILPVYKEVLTDLKSAGARWIQFDEPILVMDLDTNQLQAFSDAYSHMESSLAGLNVLIATYFADVPAEAYKALTSLKCVTGFGFDLVRGLETLDLIKVDFPRGKLLFAGVVDGRNIWANDLSASLKTLQTLEDIVGKEKVVVSTSCSLLHTAVDLVNEIKLDKELKSWLAFAAQKVVEVNALARSFSGVKDEALFASNSMRQASRRSSPRVTNATIQHNVAAVIKSDHRRSTKVSARLQAQQKKLNLPPLPTTTIGSFPQTPDLRRIRKEFKARKISEIDYVQAIKVEFEKVVKLQEELGIDVLVHGEAERNDMVEFFGEQLSGFAFTSNGWVQSYGSRCVKPPIIYGDVSRPKAMTVFWSSMAQKMTKRPMKGMLTGPVTILNWSFVRNDQPRYETCFQIALAIKDEVKDLEKAGITVIQIDEAALREGLPLRRSEQELYLDWAVHAFRITNCDVRDTTQIHTHMCYSNFNDIINSIINMDADVITIENSRSDEKLLSVFHEGVKYGAGIGPGVYDIHSPRIPSAEEIAERINKMLAVLDSKVLWVNPDCGLKTRKYSEVKSALSNMVAAAKLIRSQLNKS

SEQ ID NO: 370 - protein, 911 aa, Brassica rapa
MGCDKGKGLPPPPPVVPSNLVPELEPIKKNTLLPMARRGSGTKGVKTHLLTNHFRVNFNNSNGHFFHYSVAITYEDGRPVEAKGIGRKILEKVQETYRTDLGSKYFAYDGEKTLFTVGALPSNKLDFSVVLEDTSSSRNNTGNASPNESNDADRKRSRRPNRSKKFMVEISYAARIPMQAIASALQGKETDYLQDAIRVLDVILRQSAARQGCLLVRQSFFHNDVQNFVHIGGGVTGVRGFHSSFRTTQGGLSLNIDTSTTMVVQPGHVVDFLLVNQNVKDPKYLDWNKARRALKNLRVQVAPSNREYKITGLSEERCQDQMFTRNSKNEKGEVEEVQTTVYKYFTEFRGIPLRYSGDFPCINVGKPKRPTFIPIEHCELVSLQRYTKSLNSLQRASLVEKSRQRPPERMASLTNGLKKSNYNADLVLQESGVSIGSSFTQVEGRVLPAPRLKVGNGEEFQPRDGRWNFNYKKLVEPVTVTKWAVVNFSARCDTNRLISDLIRCGRMKGINVEAPYKVVFQEDPNYRGAPANIRVEKMFEQMQSELRKGKEGRPKFILCILAEKKNSLVYGPWKRRNLVEEGIVTQCIAPTPKINDQYLTNVLLKINAKLGGLNSLLAMERSRAMMPLVTQVPTFIVGMDVSHGSPGQSDIPSFAAVVGSIEWPLISKYRACVRTQSRKVEMIDNLFKPATNEKGEPVDDGIFSELLWDFYLSSKKRKPEHIIIFRDGVSESQFNQVLNIELDQMMQACKFVEENWEPKFTVIIAQKNHHTKFFQAEGPGNVPPGTIIDSKICHPRNNDFYLCAHNGMIGTTRPTHYHVLYDEIGFSTDDLQELVHSLSYVYQRSTTAISVVAPVCYAHLAAAQMGTVMKFEDMSLSETSLTHGGITIPGAVPVPPMPKLNVNVASSMFFC

SEQ ID NO: 371 - protein, 867 aa, Brassica rapa
MPVTPEEPSRRDYAVTARLGVGSTGRRIQLCTNHFNVSVGQPDVVFYQYTVSITTEDGENVQGKGIGRKLIDQLYKTYSSDLDGKRLAFDGEKTLYTVGPLPQNDFDFQVILEASFSKRDCGVSDGGSPSGSSKRSKRSFLPRSYRVQIHFSAKIPLRSVLATQRGVDTSDNSTQDAVRVLDIVLRQQAAERGCLLVRQAFFLNDVNSVDVGGGVIGIRGFHSSFRPTDGGLSLNIDVSTTMILKPGPVIEFLKANQNVELPRQIDWIKASKVLKNLRVKASHRNMEFKIIGLSAKPCNQQLFTMKIKDGECEGQTKEITVYEYFKQTYTEPTYSAYLPCLDVGKPDRPNYLPLEFCNLVSLQRYTKALSVRQRALLVEKSRQKPLERIKALNDAMHTYCYDKDPFLAGSGISIEKQMTLAEGRVLNPPTLKFGKNEDFLPSNGRWNFNKKMLIEPRAIKNWAVVNFSFPCDSSHISRELISCGMRKGIEIDRPFALVEEEPQSKNLSAVKRVEKMIAKMKSKFPIDPPHFILCVLPERKNSDIYGPWKKVCLTEAGINTQCICPTKINDQYLTNVLLKINSKLGGINSLLGMECSSNIPLINKIPTLILGMDVSHGSPGRADVPSIAAVVGSKNWPLISRYRAAVRTQSPKMEMIDSLFQPVEDPVNGDNGIMNELFVEFFKTSNARKPKQIIIFRDGVSESQFNQVLNIEVDQIIKAYQRLGETDVPKFTVIVAQKRHHTKLFQAKGHENVPAGTVVDTKIVHPTNYDFYMCAHAGIIGTSRPAHYHVLLDEIGFSPDELQNLIHSLSYVNQRSTTATSIVAPVRYAHLAAAQFAQFTKFEDISEEKVPELPRLHERVESNMFFC

SEQ ID NO: 372 - protein, 741 aa, Brassica rapa
MSYLLPHLHSGWSIDQAILAEEERLVVIRFGHDWDETCIQIDEVFCSLPCTNINSLLTLPHLPLPILLPNLPLPHIDMDRDYSYNESSDNESSTCESAKGNRLLYSLPPRPGFGTNVRIIPLVSNHFQVTLANLPEYFYRYRVVNFVHNGGRSPIDQKGIGIELIDLVHRVYDSDFVGIEFIYDGDHMVFTLGSLPDRHNDFPAVLGMNSSTMTNPLKSVEVSFNAARNLEIPLQSLVNAMHGQESPNSLEAIRVFDIILHQHAARQGSLRVRRSFFHNESREPIGPNILGYRGFHSSFRTTQGGMSLNMDVKTTTVIKPGPLIDFLIADQGARDVFDVDWNINYLLTLPHLPLPILLPHLPLPHIDMDMDYSYNEASDNESSTCESAKGNRLLYSLPPHPGFGTNGRIIPLVSIHFQVTLANLPEYFYRYRVNFVHNVGCSPIDQKGLGGELIDLVHRVYDSDFVGIEFIYDGDHMVFTLGSLPDRHNDFPAVLGMNFSTMTNPLKSVEVSFNAARNLEIPLQSLVNAMRGQESPNSLEAIRVLDIILHQHAARQGSLRVRRSFFHNESREPIDPNILGCRGFHSSFRTTQGGMSLNMDAKTTTVIKPGPLSDFLIADQGARDVFDVDWSKIRARNGLKWLLRDDVVPSTHLHSGWAVDQAILTEEERLVVIRFGPDWDETCMQEQRHYDRSRDGYNNKINWAMKDKHEFIDIIETVFRGARKGRRLVIAPKDYSTKYRY

SEQ ID NO: 373 - protein, 805 aa, Brassica rapa
MAPKRKVPSTEVEISGPTSTRPKISPKAPVEVAAEPIRSRPKFKVELVVDSKKDPSWVLDEPIADSEARTTWPERYQVIQKKEVVPLPKKKKKKYVEEEEIFLARRHFRRAILDDSITYNLYDDAHVQSEEDEKPFICKIAEIFEGCDGKMYFTAQWFYRACDTVIQKHEEMIDDKRVFISDIKDVNSMGVLLNKLKILMIPLTENTEVTESCDYYCNMKYHLPFSTLEALQSSQCITPNQRTDATMLDLYCGCGAMSTGLCMGAQLSGLNLVTKWAVDTCEYAVQSIKYNHPETEVRNESAEDFLYLLKEWEKLCIHFSLIESADSEKYENLYGMSAVEEVKDGSDESDVKDGGEVFEVEKIVGIKKEEGGRLHLKVRWENYGPSHDTWEPIENLSNCRKKIKEFVVHGFKTSILPLPGGVDVVCGGPPCQGISGYNRFRNEKEPLKDKKNEQLLEYMKIVEFLKPKYVLMENVVDMLRFVDGFLARYAVGRLVQMNYQTRMGMMAAGSYGLAQFRRRFFLWGAMSSETLPQFPLPTHDAVNRGHVPVNFHSNVVAYEETDNVKLADKILLSDVLTDLPVVANNERRAEMPYDKDPKTPFQKFIRLTQEGMLASPKDPKSNSKNEVLYDHHPLNLNKDDYQRVCRIPKKKQANFRDLPGVTVNANNKVEWDPKIPRIYLESNHPLIPEYAMKFVEGKSKKPFGRLWWDETVPTVIGRAEPHNHVIIHPNQDRVLTVRENARLQGFPDYYRLFGPTKKKYTQVGNAVAVPVARALGYALGQAFQGLTNGSDPLFTLPEGFPKPTF

SEQ ID NO: 374 - protein, 1447 aa, Brassica rapa
MEGDEPRGGGSDSLSVKRKFYEIDEDSSPMNGSSELYEVAQTRNTIALLETGVDKFGHCCEIRAHLNLKVEDYYGAKGVDKWTSHRWEEELFKNEANALRGGFLKVEMVRLLVIDECHRTTGNHPYAMIMKIFNPQGQKGVDKFVTKVKEGPVFYDPAPLCRLELKDKLRTSHLKFDASLLSLLQELEKGNCQDVEENKFKAYQKRLSADYHDILHCLDSLGLICAHLAAEICLEKISETETYNECSMVCKEFLSDVLSTLGLFLQKEEKNSVDLPQDNPSAVISGLVSPKLQELFHLLDSLRGEMQKPCLIIVERIITAEVIERYVKKQASLGYLYVLSLIGNNASTQALAQKMQDSFHVGKVNLVFITDVVEEGFHMPDCSCMVCFDLPKTVCSYSQSQELAKQSNSKSIMFLERGNPSQRDHLYDLMRRQVPKETPNQANCQDLKENGATVHDEPAPKEQSANKRLRQLQVLDKNLLQCSAKEKAPSSKSKSSASAAGSKKRKELHGTTRANALSGIWGENLDGAIFQAYKLDFWSNISGDAYSSFSLLIESTLADDVGNVEMSLYLVRKYIKASVSHCGQIRLSHEEIVKAKCFQQFFFNGMFGKLFVGSKSLGTKREFLLQTDTSSLWHPSFMFLMLPVETGDLVSSATVDWSAINSCACVVDFLKKNPLLELQVGEENHCNTSSGQEGTQKKETETNLIHFANALSDKNSIEEIVVIAIHTGRIYSIVEAVKDSSAMSPFEDEASLEYATYAEYFNKKYGIVLAHPNQPLLKLKQSHHAHNLLVNFSDEVIEKKEPNVSNVRKTKPNIHAHLPPELLVRIDVPRSVTKSIYLLPSVMHRLESLMLASQLREEIDCSIDNFSISSTSVLEALTTLTSAEAFSMERLELLGDSVLKYVVSCSLYLKYPNKDEGQLSRERQSIISNSNLHRLATDRKLQGYIRNGAFEPRRWTAPGQCSLFPVPCKCGIDSREVPLEPRFFTENMTIKIGKSCDMGHRWTVSKSVSDCAEALIGAYYVSGGLTAALHMMKWLGFDVEFDRELVNEAINRVSLRCYIPKDDELTELETKIRREFSSKFLLKEAITHSSVHESYSYERLEFLGDSVLDFLITRHLFNTYEKTGPGEMTDLRSACVNNENFAQVAVKNNLHTHLQRCATVLETQIKEYLMSFSEPDETGRTIPSMQGPKALGDVVESIAGALLIDTRLDLEEVWRVFEPLLSPLVTPDKLQLPPYRELNELCDSLGYFFRVKCANDGVKAQATIQLQLDDVLLTGDGSEQTNKLALGKAASHLLKQLEMRNISRKTGNGDDQSSMDIKLACNLSDRETPSSDSVEMQGTVVPVIGPINMKKGGPRGTLHEFCKKHLWPMPTFDTLEDKSRTPFEFTDGNEKRTSFSSFISTITLRIPNREAVMYSGEARPDKKSSFDSAVVELLYELERRMILTIKK

SEQ ID NO: 375 - protein, 445 aa, Brassica rapa
MEENLHRVSRSPDVGTHNQNDSVAEDNRRRRHYNHHTHGVQAKDSADWNAVDDLDFEILNFHSSPSNADDDMDFEIVNFHSSPSSPSPVVTNDEPLRLPIPMLGLGVPNEQLFVTQRSLPELARGPPYFYYENVVLAPWETISRHLYDVAPEFVDSSFICAAARERGYVHNLPISNRYLIQPPPKHTIQEVLPLTKNWWPTWDTRTKLNCIFTVNASSQLTNRIRSALEASRGEPPEEIKRYVIEQCKKWNLIWVGQNKAVPLEVNEIETLMGFPIYHTRGGGGISRAERLKSLSNSFQVDTLAYHLSVLKPLFPDGINVLSLFTGIGGGEMALHRLQIPMKTVVSVEFSQANKYILRDFWERTNQKGVLIEFEDVQDLTKDIIVELMKQFGGFDIVIGGSPCNNLAGGNRVTPNGLEGEQSLMFYEYCRVLNVVRQTAKEMRRS

SEQ ID NO: 376 - protein, 333 aa, Brassica rapa
MFATLVDMGFSDDVIDRAIQENVCPCLSVFSHLLYDYVVKMNCEPSSSKSKTIDHFLAMGFDEEKIIKAIHKHGEENMEEIANALLSSEADTLPIMKEEDNMDWSDSDDEMKYADLLSSDNEKDQDSFDSCNPLSSLVKMGFSELEASLAIERCGDSVSIADLADFICAAHIAREFDEFYIDPEEQKVDTVAYHLSVLTPLFPDGINVLSLFTGIGGGEVALHRLKIPMKTVISLEISEVNRNILRDFWEQTNQRGVLIEFEDVQDLARDKIIELMKRFGGFDLVIGGSPCNNLAGGNRVSRSGLEGEQSSLFFEFCRILEVVRETTMEMRRS

SEQ ID NO: 377 - protein, 601 aa, Brassica rapa
MAQDSADWNSDDDLDLQIDNYQSSPPSSPPAAVPSSDELFATLVDMGFSPENIARAIDEYGPNADTVVIIDAISKYTVTCEASSSKSKTIDHFLAMGFEEEKVIKAIHEHGEDNIEEIANALISSAAEVSPKIKEEEDIEWSESDDEKYANFLSSDDEKVSDSSSENGNQLRSLMNMGFSELEASLAIERCGTGEDVSIADLADFICAAQIAREFDEFHADPEEQKPNVKKRRIEPRREPRSSAADDEPLRLPNPMIGFGVPNEPGLITQRSLPAMARMPPFFYYENVALAPKGVWDTISSHLYDVPPEFVDSKYICAAARKRGYVHNLPISGRYQVQPPPKYTISEAFPLTKKWWPEWDKRTKLNCILTVNASAQLTNRIRLALEPYGGEPPESKKKYVIEQCKKWNLVWVGKNKAAPLEPDEMETLLGFPKNHTRGGGMSRTERLKSLGNSFQVDTVAYHLSVLKPLFPYGINVLSLFTGIGGGEVALHRLQIPMKTVVSVEISAVNRNILKDFWEQTNQKGTLIEFADVQDLSNEKIVELMKQFGGFDLVIGGSPCNNLAGGNRVSRSGLEGDQSCLFYEYCRILDVVRETTKTMRRS

SEQ ID NO: 378 - protein, 639 aa, Brassica rapa
MVMKSNNMTDYENNLYKKLKSGKLEVRVSYRTFLCPYCPKQKVGLYIDILQHASGVGNSSSKKRSLTEKACHRALAKYLRKDLADYATATVSRRSKALASLTGDIPLAYDDQFEKLVWPWKGILVNIPTKMGHDGLCCTGESGPQLKDELIRRGFNPIRVRTVSVWDCFGHSGTRIVEFNRHWNGLNDALLFKKAYQEDGHGKKDWLSSGGGAADSSLYAWLANADDYYRANYVGEYLRKMGDLKSVSRFAEEEARKDHKLVQRLNLISENIQSQLRMLEEKFSKTSIALKCETEEKDKILHGYNQDLTGRQQRSTDHFNRIFADHEKQKAQLESQMKELQIRESVLAKRDAENETQRKNVAKELEQSAAKYSYVQLVAVEQQKTREKVKKMAVDHKMQKEKLRERITALERELGQKQDLELVVEHLKRQLSVMRHMELDGGTEIVNKVETYLRDLSEKEGELAHVNKFNQDLVVRERKTNDELQEARRALISNLRDMRSHIGVRRMGELDTKPFMEAMRRKYCQEDLEDWAVEIIQLWEEYLKDPDWHPFKRIKLDAAETIVEVIDEEDEKLRTLKIELGDDAYQAVANALQEINEYNPSGRYVSSELWNFREERKATLEEGVTCLLEQWNQAKRHKP

SEQ ID NO: 379 - protein, 541 aa, Brassica rapa
MEKQEFSVGDSSGETKKSECTEEKFVWPWVGLVANIQTEVDKTGRRVGRSGSTFRDELIEKGFDPTRVQPIWNFKGHSGFALVEFTRDIKGFENAMNFERSYKSDGHGKKDWEKGVHLRDDKPYGWVAREEDYNRGGIVGKNVKKKRDLKTLSQLQEEEERKMVQLVESMSQSIEMKIISKQELEHKVDETSRVLESVELHNYQLNETYKQEVEKMHTNLQGLYQQILAGHDKSMSDLETEREKLENRARQIYINEAEMEKSRLEIEMNQKAMMEQNEANMEAMKLAEKHQAKKEKLHEKIMEMEAKLNETQELELEIEKLKGSTNVMKHMAGSDGDGELMEKMVKTQMELEARETALHDKIMAVTQKERMANDEYQEARKEMIQFWKENEDLVSGEEIRVKTMGHLDTKPFVVAVKKKLRCSEARAGLKAMELCSFWEGQIGNVHWHPFKVDESDGIAKLVVDKNDLKLVRLKSDYGEELYNEVVRAKVEIVEYNPSGGYVVSEMWNLEKNRKATMEEGTDVMLKMRKKLVAMKNKRKRR

SEQ ID NO: 380 - protein, 643 aa, Brassica rapa
MGSTVVLSSDEEDSDMSESEMEAHADKIYPTLKSGKLKVKLSPQAFKCPYCPNKKKPSFQYKDLLQHASGVGNSNSEKRTSKDKASHLALVKYLQQDLSDSAAAEPSSKRQKTGDPIQDCDQDEKLVCPWKGVVVNIPTRKTQDGRSAGESGSKLRDEYIQRGFNPTRVRPLWNHWGFSGTAIVDFNRDWNGLHNALLFDKAYQVDGHGKKDWLKKHGPPKTGLYAWIARADDYNGSTLIGEDLRKKGDLKTIAEVTEEEARKQQKLVQNLTQLVEEKKKGVKEFEELCSVKSKELKERLEEKEKSLQKHNRELNAIQERTMGHVNKIFADHERLKMKLELEKKKLELKGIELAKREAHNETERKNLSEDLQQNASKNSSLELASMEQQKADEEVKKLAEYQRRQKEELHEKIIRLERQRDQKQAIELEIEQLKGELNVKKHMGSDGDAEIVKEVEEIYKGLTEKEEELADLDKFNQTLILRERRTNDELQEARKELVNIMKEWKLSIGVKRMGELVTKPFMDALQQKYCQQDVEDRAIDVLQLWEDYLKDPDWHPFKRIKLENQEREVEVIDERDEKLKELKDDLGDGPYNAVTRALLEINEYNPSGRYITTELWNLKEDRKATLEEGVTCLLDQWDKSKRR

SEQ ID NO: 381 - protein, 645 aa, Brassica rapa
MGSTVILSSDEEDSDISDSEMEEYGDKIYLSLKSGKLKVKLSPHSFTCPYCPNKKKPSFQYKDLLQHASGVGNSNSDKRTAKEKASHLALAKYLQQDLADDSQAEPSSKRRKTGDPIQDCDQDEKLVCPWKGVVVNIPTTKTENGRTAGESGSKLRDEYIQRGFNPTRVRTLWNHWGFSGTAIVEFNKDWNGLHNALLFDKAYLVDGHGKKDWLRKDGPPKSGLYAWIARADDYNGNNIIGEDLRKKGDLKTIAEVTEEEARKQQKLVQNLTQLVEEKKKGVKEIEELHSAKSKELKEKLEEKEKSLQKHNSELNAIQERTMGHVNKIFADHERLKMQLELEKKKLEIKGVELAKREAHNETERKNLAEDLQENASKNSSLELASMEQQKADEEVKKLAENQRRQKEELHEKIIRLERQRDQKQMIELEIERLKGELNVKKHMGSDGDAEIVKEVENIYKGLTEKEEELADLDKFNQTLILRERRTNDELQEARKELIMKEWKQNIGVKRMGELVTKPFMDALQQKYCQQDVEDRAIDVLQLWEDYLKDPDWHPFKRIKLENQEREVEVIDDRDEKLRELKEDLGDGPYNAVTRALLEINEYNPSGRYITTELWNLKEDRKATLEEGVTCLLDEWEKAKRKRGMA

SEQ ID NO: 382 - protein, 727 aa, Brassica rapa
MYSRRELDDLEYRYYSEMKDGTRKVKISDSLFRCPFCYLDRKRDYNFDDLLRHAYNISGSSRTKDGREIARHLALERYMKKYLRPLERPSSDVSSLHTEVLTGSWITAGSSSSAAGEVNSSVVKSSSPCIAEAEPMSVSGGDDPVPSGEERQMFSPKHNSSLSNQDNTHPSKRACLTAGGKEGEEPVQQSGLSHGAPRYPQRRDPLAARNDGLMFVHPWKGILANISRTFSEKTRKFTGESGSKIREEFVSKGFNPHKVEPLWNGRVGFTGFAIVYFGKDWEAYRNATMFEKHFEVNQCGKRDYDSARDRGEELYGWIAKREDYYSRTVVGDHLRKQGDLVTVSGKEAEQQRRAFTLVSNLENTLETKSTNLEEIESKYKETSTELQRSMKEKDEMINAHNEKMSSMQQKARDYLASVKNEHEKAAQHLEAQRKEFEERERYLDKCQTLNKTERRKLQWQKQKNLMATEEQNKTDEEMTRVAKQQQREKDELRERVKKLEKKLDDELALELEIERMRGGLQVMGHMEDPDMKEEIEKTKEKLKEKEEESEFQESLYQALVVKHGYTNDELQDARKAFIRSMQELTLRGQISVKRMGALDEKPFQKLTKERYPAEEADVEAAKLCSLWDNHLRDSAWHPIKVVLIDGNHKEVLNEEDEKLQELKKELGDEVFEAVTQALMERNEYNGSGRYIVPGLWNFKEGRKATLKEGVVYLMKLWTHLKPKPKRK

SEQ ID NO: 383 - protein, 1032 aa, Brassica rapa
MDDGNSWMIEYDSSMVSISIHTDVAWYRLGKPSTQYPPWREPTLKTARVAKSIISLLVKQARMARLSFRDVIKKVSEFQKNDNKAYISSDPSAVERYLVLHGQVILQIFAKHPIKELKKCAFITGLASKMEEIHHTKWAIKKRRKILPTKPKNKILPKKPKSKLRIGKGYVASKRSAMQATKTHLVDRIWGQYYSEYGAIGAENGKEKVQEERKNEEEDDVEEPSVLETRWEGDILGRTSAGEPLYQQALVGGEVVAVGGAVLLEVNETSVIYFVEYMFESSDHCKMLHGRHLERGSETVLGNTANERELFLTNACMTVQLKDIKGTVSFEIRSRPWGHQYRKENNAADKLDRARAEERKAQHLPAEYFCKCLYSPVRGGFFSLQPNNISSGTGSCSPCKIREEEKERSKPKLNATMTGFFFNGVDYCMEDYAYVNPKFIYKPKKDKKFERNVDLKSFVVCQLLEVVLPKVSSLNGLFEVIVRRFYRPEDTPLEKAYSSNIQEVYYSEDVHILPPGAFEGKCEVRKKHDMPLRNDYLTLDNIFFCEMPVHIKPKFSTIKDDTLLRKQKGKGIEGETDYDELPKEMRLATLDIFSGCGGLSKGLEQSGVSETKWAIEYEEPAGQAFKQNHPESTVFVNNCNVILRAIMEKCGDKDECLSTTEANELAAKLDEEQKLALPLPGQVDFISGGPPCQGFSGMNRFQEGSWSKVQREMILAFLSFAEYFRPRYFLLENVRNFVSFNGGQTFKLTLASLLEMGYQVRFGVLEAGAYGVAQSRKRAFIWAAAPGEVLPEWPEPMHVFGTPELKIKLSKRSHYAAVRSTQYGAPFRSITVRDTINDLPPIKNGESETNREYGADPVSWFQKKIRGDMLVLTDHICKEMDETNLIRCENIPKTPGADWRDLKNLKKKKIKLSSGKMVDMIPAWLRNKAKTHNGWKGLFGRLDMEGSFATSITDPRPMGMVGMCFHPEQDRIISVRECARSQGFPDSYKFVGGILDKHRQIGNAVPPPLAFALGRKLKEAVLLKKPPLQQKP

SEQ ID NO: 384 - protein, 1528 aa, Brassica rapa
MVRNGTKAGEQKKRPLPEIKSDSDGEDLSTRHTRPKRAAACTNFKEKSVRISEKSTTVETKQHQTVEDEVVALHFTASPQGGGDEPRQTRRLTDFILHDEYGVPQPVAMVEIGDIFVTGVILPSGECDDKEKGKGVKCDGFGRVENWSISGYDDGYPVVWFSTELADYDCGKPATSYKKMYDYFYQKAFASVEVYKRVAKSAGGDSGVSLDELLVAVSRSMSLESKCFSTDFLVIRNFLIRQGEFIYNQLAGLDETAKKDEASFAEIPVLVALRDENSRLDNGAVIQMEGRPSNGVLRIDGVSEAAKCEALTSDQEMVDEDQRYARIMQDEEDRKTMQRPKRKNGAALASNKGYVKTTEDEIAGDYPLPAYYKNFKDEADELIVADDYEVNYEDLPRRMLHNWALYNSDSRFISLELLPMKPCADIDVTIFGSGLMAEDGGFWFGLDDPDTSTSGQPKKDLEGMPVFLSQIKEWMIEWGCSTISISIRTDVAWYRLGKPSKQYAPWFEPVLKTARVTIGIFGLLEEQTRMSKLSFEDVTKRVSEFQKNDKAFISSDRLAVNRFLVGHGQIILQMFSEFPKKDIQRCSFVSDLARKRAERHNTRWTIKKKKILFKVNCNPRAGMAPVVSKRKAMQATTTRLINRIWGEFYSNYSPEEPVQAVGAENEEEEVEEEGEIEEDDAEETVPEPVEEVEKSHTPLKKIRGVSGKTESSWSGESLGKTSAGEPLYRQALVGEEIVAVGGAVVLEDDGNEVIYFVEYMFEKSNNCKMLHGRLLQRGCDTVLGNAANERELFLTNECKTVSLKEIKGTVSFEIRSRPWGHQFRKENTTADKLDRARAEERKTKDLPTEYFCKSLYSPERGGFFSLPLNDMGCASGTCSSCRIREDEEKKTEIKLNSSKTGFSCNGVDYSVDDYVYVKPEDIDGSKEANGRFKSGRNIGLRPFVVCQILEIIVLKESRKASFEVKVRRLYRPEDVSDEKAYASDIQELYYSEDTDVLQPEALEGRCEVRKKIDMPSRREYPISDNIFFCEQIYDPSKGSLKQLPVNIKPKYTTVKDEALLRKRKGKGLVTETDSVTDKPEEVSKETRLATLDIFAGCGGLSQGLEQAGVSATKWAIEYEEPAGKAFRKNHPETTVFVDNCNVILRAIMEKCGDQDECISTKEANELAEKLDEDQKRTLPLPGQVDFINGGPPCQGFSGMNRFNQSSWSKVQCEMILAFLSFADYFRPRYFLLENVRTFVSFNKGQTFQLTLASLLEMGYQVRFGILEAGAYGVSQSRKRAFIWAAAPDEVLPEWPEPMHVFGVPELKISLSKGVHYAAVRSTQYGAPFRPITVRDTIGDLPSVVNGESNTKREYKAQPISWFQKEIRGDNIALTDHICKEMNELNLIRCKKIPKRPGADWRDLPEEKVTLSKGQVVDLIPWCLPNTAKRHNQWKGLFGRLDWEGNFPTSITDPQPMGKVGMCFHPDQDRIITVRECARSQGFPDSYVFQGNIIHKHRQIGNAVPPPLAFALGRKLKEAVQLKKVTKTN

SEQ ID NO: 385 - protein, 1520 aa, Brassica rapa
MVRNGSKAAKQKKRSLPESKETDHDDDLSTRKTRPKRAAACTNFKEKSIRISEKSATVAAKHHQTVDDEIVALHLTASSPQSGGGHEPHQTRRLTDFVLHDTDGVSQAVEMVEHVDMFITGVILPTGECSDKERAKGVRCEGFGRVDNWSISGYEDGSPVVWVTTSLADYECVKPATTYKKVYDYFFQKAYASVEVYKKVANSDLMSLDELLVAVARAMSLETKCFSSDYLAIKNFVISQGEFIYNQLAGLDDTAKKDDARFVEIPVLVALRDASSSSILEYDAGQPSNGVLRIDGAAERKAMSSDQHMVDEDEKFARLVQDEEYMKSMQRPRKSSSSASVSKNGYIMTTEDEIANDYPLPAHYKNSQVETDELLLYHDDDYEVDIDDLPRKMLQNWALYDIDSRLISLELLPMKTCADIDVTIFGSGVMADDQGIWIDLDDPATSMPSEEHGGIPIFLSQIKEWMIEYGVSTVSVSIRTDAAWYRLGKPSKQYAPWFEPILKTARVAVGVFALLEEQTRMAKLSFEDVVRRVCEFESNHKAYISSDRAAVDRYVVGHGQIILQMFSEFPNKEIRRCAFITGLANKRAEKHNTRWTIKKKKILLKVNLNRRAGVAPVSKRKAMQATTTRLINRIWGEFYSIYSPEEPLQAVGAEEEAEEDEEEDEEENEDDDAEETEPEAAEVEEAHTLPKKIVGKCGKMETRWDGESVGRTSAGEPLYRQALLEGERVAVGGAVIAEVSGSQAIYFVEYMFESSDHCKMLHGRLLQRGSETVLENAANERELFLTNKCMTVQFKDVKGTVCFEIRTRPWGHQFRKEDAVADKLDRARAEERKAKDLPTEYFCKSLYSPERGGFFSLPLSDMGCASGSCTSCRLREDEVQRKKIKLNASKTGFSSYGIDYCADDFVYVYPDCIDGSKKANGKFKPGRNIGLRAFVVCQLVEIIVPKKSRKGSFEVNVRRFYRPEDVSERKAYASDIREVYYSEDTFVVQPEALKGKCEVRKKKDMPSCSEFPISENIFFCEQIYDPSKGSVKQLPLNIKPKYSTVKDDALLRKKKGKGVESETDSGIVVKPNELPKEMRLATLDIFAGCGGLSQGLEQAGVSATKWAIEYEGPAGEAFRKNHPETTVIVDNCNVTLRAIMEKCGDQDECISTTEANELAAKLDENQKRTLPLPGQVDFINGGPPCQGFSGMNRFSQSPWSKIQCQMVLAFLSFVDYFRPRYFLLENVRNFVSYSKGQMFKLTLASLLEMGYQVRFGVLEAGAYGVSQSRKRAFIWAAAPEDVLPEWPEPMHVFNVSQLNISLSKGLRYAAVRSTQHGAPFRPITVRDTIGDLPPVENGESNIDKEYETDPVSWFQKEIRGNKNVPTDHLSQTMNEHNLIRCKRIPKRSGADWRDLPDEKVTLSTGLVVDLIPGCLAAKPGKKKQWKGLFGRLDWEGNFPTCVTKPGPMGMVGKCFHPDQDRIVTVRECARSQGFPDSYEFEGDIAHKHRQIGNAVPPPLAFALGRKLKEAVQLNNFAKSN

SEQ ID NO: 386 - protein, 478 aa, Brassica rapa
MPMSSWVCHFHISKKVLKQKQLDVESVVSSLNKQYANRKKELKLDVIDLEIQSTNHCSWDDKSMEDDRFCITVTVLEASTHGSLELDAIRLVLIPFLLDSPVKGYGEIKKVEILWADRPKAPKRNKKHMAGELFVKVTMHGVRGKKNIWSALLETCLPIMDMIDWTRSHPDNIRQCCSVYGIDAGRSIFLADLESAVADTGKGMLREHLLLVADCLSVTGEFVALNPKGWSKQRQAESTPAPFTQACFSSPSQCFLKAAKEGVTDELQGSIDALAWGKVPSFGTGDQFEIIISPKDHGFSSTPVKVYDFLSSTATLPKRKASSLPKSDNFTVQPFPLLDTALSKAVKTLDGKGLTRSQLRTIFTWDDIEKLSRSLKRILYNYEIDATLNERDERLLMMALLFHPNRDEKLGPGFQGIKVANSKHGNARCFEVVRTDGTTEDFSYHKCVLGATEIIAPKRVNFYKAKYLRNGTVQAGAI

SEQ ID NO: 387 - protein, 1443 aa, Brassica rapa
MEEKCEELEVPMGTLKSISFSISNNKDRKNMSVMEVEAANQVTDSRLGLPNRDDICKSCGSKDRKVCEGHFGVINLRYPVINPHLLKEVATLLNKFCPGCKYTKKKQSQSQSNTDYPLMKFRVTTKEAFRRSGIVCEVSEDNVLKLSKRGLSALPPDYWDFMPKDPNIDESCLKPSRRILTHAQVYALLSGIDERVIRKEIPMFDSLPLASFPVTPNGHRVSEMVTQFTGPRLVFDERTRIYKKLVGFEGNGLELSSRVMECMQYSRLFSENVSPSQESANPYQKKSDTPELRGLRFMKDVLLGKRSDHTFRTVVVGDPSLKLNEIGIPRSIAERLQVSENLNDWNRDRLVTSCFHKLLEKGETHVRRGGRLVGIRAIDDLQTGDSFLRTLKDGDTVLMNRPPSIHQHSLIAMSVKVLPTTSVVSLNPICCLPFRGDFDGDCLHGYVPQSIQAKAELEELVALDKQLVNRQNGRNLLSLGQDSLTAAYLVNVETNCFLNRAEMQQLQMYCPFELPRPAIIRGSSTSSEPQWTGKQLFGMLFPPGFEYAYPLNNVVVTNGELLSSSDGSGWLRDGEGNFIQGLMKHDKEKVLDIIFSAQEMLSQWLLNRGLSVSLSDLYFASDKHSRRNLTEEISYGLQEAEQVCNKQQLMVESRRDFLAVNGEEDTVVADDLELFCYERQRSATLSKLAVSAFKDAYRDVQALAYRYGDQSNAFLVMSKAGSKGNMGKLAQHSMCIGLQNSSVALSFGFPRKLTCASWNDPNSPLRGARGEDRTAHESFVPFGVVESSFLTGLNPLESFVHSVTSRDSSFSGNADLPGTLSRKLMFFMRDIYAAYDGTVRNSFGNHLVQFRYESSDDAEEDMTGEAVGSLSACAITEAAYSALDQPISLLETSPLLNLKNVLECGSKKGLKEQTMSLYLSETLSKKKHGFEYGALDIKRHLEKLCFSEIVSTFSPRTNTRMPMSSWVCHFHISKKVLKQNQLDLESVVSSLNKQYANRKKELKLDVIDLDIQSKNHCSWDDKAMEDDRVCITVTVLEASRHDSLELDAIRLVLIPFLLDSPVKGYREIKKVDILWVDRPKAPQRNKKGLAGELFLKVTMHGVRGKRSFWSALLETCLPIMDMIDWTRSHPDNIRQCCSVYGIDAGRSIFLADLESAVSDTGKAMLREHLLLVADSLSVTGEFVALNPKGWSRQRQAESTPAPFAQACFSSPSQCFLKAAKEGVTDELEGSIDALAWGKVPSFGTGDQFEIIISPKNHGFSTPVVDVYGFLSRTATLPKRKAVRATSSSLPKSDEFTVQPFPVLDTALSKAVKTLDGKGLTRSQLRMIFTWNDMEKLSRSLKRILYNYEIDATLNELDGRLLMMALLFHPNRDEKIGPGFKGIKVANSKHGNARCFEVVRTDGTTEDFSYHKCVLGATEIIAPKRVNFYKAKYLRNGTVQPGAI

SEQ ID NO: 388 - protein, 2059 aa, Brassica rapa
MEEASSSDILEAEIVGISFALATHRQIRLASISDAGINHASQLSNAFLGLPLEFGKCEACGATEPDKCEGHFGYIHLPVPIYHPAHVSELKQMLSLLCLKCLKIKKIKSTSSGLAERLLGVCCEEASNITIKDKSSDGASYLQLKLPSRTRLQEGFWNFLERYGYRYGSDHTRPLLAREVKEILRRIPEETRKKLTAKGHIPQEGYILEYLPVPPNCLSVPEVSDGSNSMSVDPSRIELKDVLRKVVAINNSRSGETNFESHRAEANEMFRVVDTYLQVRGTAKPTRNIDMRFGVSKISDSSSSKAWTEKMRTLFIRKGSGFSSRSVITGDAFRNVNEVGIPMEIAHRITFEERVSVHNIGYLQELVDNKMCLSYTQGSTTYSLRDGSKGHTVLKPGQIVHRRVMDGDVVFINRPPTTHKHSLQALRVYVHEDNTVKINPLMCSPLSADFDGDCVHLFYPQSLTAKAEVLELFSVDKQLRSSHTGQLILQLGLDSLLSLRVMMEQVFLDKASAQQLAMYGSRSLPPPAVVKSSKSGPAWTFFQILQLAFPERLSCRGDGFIVGGSDLLSFDFGVDALASIINGIVTAIMVEKGPKEALAFFDSLQPLLMEHLDPQGFSLSLEDLSMSREDMGVIHNLIVREISPMVSRLRLSYEDELQLENSIQKVKEVAANFMLKSYSMRNLIDIKSNSAINKLVQQIGFLGLQLSDKKKLYTKTLVEDMAQFYKKKYVSTSSSGDFGIVKGCFFHGLDPYEEMAHSVAAREVIVRSSRGLAEPGTLFKNLMAVLRDIVITNDGTVRNTCSNSIVQFKYELSSDNENQGLFEAGDPVGVLAATAMSNPAYKAVLDSSPNSNSSWELMKEVLLCKVNFQNTTNDRRVILYLNECRCGKKYCQENSAYTVRNKLKKVSLKDTAVEFLVEYRKQQAISEIFGMDICLHGHIHLNKTLLEGWNISMQDILQRCEDAINSLVQKKKKKAEDFKKMNLSVSECCSFRGPGSSKDSDMPCLMFSSYNATDPDLERTLDVLCNTIYPVLLETVIKGDPRIASANIIWNSPETTTWIRSRHASRRGEWVLDVTVEKSDVKQSGDAWRVVIDSCLSVLHLIDTKRSIPYSIKQVQELLGLSCAFEQAVQRLSASVRKVSKGVLKEHIILVANNMTCSGDMLGFNSGGYKALTRSLNIKAPFTEATLIAPRKCFEKAAEKCHKDSLSTVVGSCSWGKRVDVGTGSQFELLWNKKETGLENDDETDVFSFLQMVRSTKTADAYVSSPGFDVTEEEMAEWAESPERDSALGEPKFDDSAEFQNLLDEGKASESKWDNGSLWENGCSSGSEWGVSKNAGGEENTQSGWGKAANIEKEDASSGWNSKKDAQEATNTDSWGAWGSKTKDDAENATPNWGTKPAQNDSVVIENGEPSSDVWGPKAVSDKPWGKKNSETEPAPAAWGKTNSESESAAAAWGSTNKKNTGTESDAAGWGSTNKKNPETESDAGAWGSGAKNKETEPAPAAWGSWGKKSSEAVSGGADWGNRGKRVSETESGAGGWASRNPSLETQSGGATWGSRDKSKFETESGGAAWGSQAKNNFESESGSGAAAWGKKKPETESGGAAWGSQAKNKSEIESGSGAAAWGTWDKKKSETESGGGAWGSQAKKNSETESGAGASTWGAWDKKKPETESGGDGAAWGSQAKNNSETESGSGAAAWGKKKPETESGGGAAWGSQAKKNSESQLGAANWGSKDTNNSENGSDSAAWGKKKNSEAEPTSVAWGSWGQPSPPASDKDAQEDDGNPWVSLKATNSGEKEGNETSQWGVPNKRYPSAGSQSQGGGGGADWKRNRPPRTPGSESIMGPMFTATRQRVDMFTSEEQELLSDVDPVMRRLRKIMHQSGYTDGEPISDEDKTYVLEQILNYHPEKDAKLGPGLDFITVDKHTTFTESRCFFVVSTDGTKQDFSYRKCINNYLVEKFPNLAEEFIAKYFRKRDNENRDKNSQEATPPGEKESQTQPIDNGSQDSQPQSIGNEDGDTQPQSQAEDTQPQSQIEDTQLQSQVEESQPIGNGGEDYQTEPQG

SEQ ID NO: 389 - protein, 1169 aa, Brassica rapa
MTDIDIEEIEAAGEVDLRDLGDPFLQSFCKKAATSFFDEYGLVSHQLNSYNFFIEHGLQSVFESSGEMLVEPSFDPTKNKDHEWRYATVKFGEVSVDKPTLYSDDKELVFLPWHARLQNMTYSARMKVNVDVEVFVKKVVKRDKFKTGQDEYVEKQILSKKTQDIPIGRIPVMVKSVLCNTTEKGKHVESYRKGECAFDQGGYFVIKGAEKVFIAQEQMCTKRLWISNSPWTVSYRSETKRNRFIVRLSENQKAEDFKRKEKVLTVYFLSTEIPVWVLFFALGVASDKEAVDLIAFDGGDASITNSVVASIQEADSVCEDFRHGRNALAYVEQQIKGTKFPPGESVDECLSLYLFPGLKSLKQKARFLGYMVKCLFSAYAGKRKCENRDNFRNKRIELAGELLERELRVHLAHARRTMTKAMQRHLTGDGDLKPIEHYLDASIITNGLSRAFSTGAWCHPFRKMERVSGVVANLGRANPLQSLIDLRRTRQQVLYTGKVGDARYPHPSHWGRVCFLSTPDGENCGLVKNLSLLGLVSTQIMEPVVEKLFDSGMEELVDDTSTPLSGKHKVLLNGDWVGVCSDSDYFVAELKSRRRQSELPRQMEIKLDKDDKEVRIFTDAGRLLRPLMVVENLHKLKQSKPSKYTFEHLLDQGILELIGIEEEEDCTTAWGTKQLLKQQKSYTHCELDLSFLLGVSCAIVPFANHDHGRRVLYQSQKHCQQAIGFSSTNPNIRCDTLSQQLFYPQKPLFKTMASECLQKDVLFNGQNAIVAVNVHLGFNQEDSIVMNKASLERGMFRSEQIRSYKADVDSKDSEKRKKMDEVVQFGKTHSKIGRVDSLDDDGFPFVGANMHSGDIVIGRCTESGTDHSVKLKHTERGIVQKVVLSSNDDGKNYATVSLRQVRSPCLGDKFSSMHGQKGVLGYIEEQENFAFTNQGIVPDIVINPHAFPSRQTPGQLLEAALSKGIACPMQKKKGKSDAYSKVTRHATPFSTPSVDDITDQLHRAGFSRSGNERVYNGRTGEMMRSLIFMGPNFYQRLIHMSEDKVKFRNTGPVHPLTRQPVADRKRFGGIKFGEMERDCLIAHGASANLHERLFTLSDSSQMHICRNCKSAANVIERVASSGRRIRGPYCRLCESPDYVVMVNVPYGAKLLYQELFSMGICLNFETNLC

SEQ ID NO: 390 - protein, 1122 aa, Brassica rapa
MVSEITRSTVKLTNVPQTIVADELLRFLELHLGADSVFALEIPTSRDNWKPRDFALVQFTSLEAKSRAQHLSSQTKLLFKSRNLRVSEAYDDIVPRPVDPRRRLDGVVLTAGFPESEEGRFCALQKWEGVRCWVIEEKRRVEFWVWECGDCYKCEVRFEDVVETVPSCVDGVDEINAFLLRLKYGPKIYKQVSGPHIATKFKSGRYSFCKDDFDFMWIRSTDFSGLKSIGTSTCFCLEVDNASAMSDIFSSLPYYREDTLSLTLVNGNTFASANQIVPLLNAANLGIEIPYEILFQLNSLVHAQKISLFAASNMGLISILCGLSLETALVVLKKLHQQRSICYDPISFVKAQSQYVVKKTAHSPASAYKRLTEQNIMSCQRAYVTPSKIYLLGPELETANYVVKNFAEHASDFMRITFVEEDWSKIPANALSVNSKEGYFVKPFRTNIYHRVLSILGEGITVGPKKFEFLAFSASQLRGNSVWMFASNEKVKAEDIREWMGCFRKIRSISKCAARMGQLFSASRQTLNVRAQDVEQIPDIEVTTDGADYCFSDGIGKISLAFAKQVAQKCGLSHIPSAFQIRYGGYKGVIAVDRSSFRKLSLRDSMLKFDSNNRMLNVTRWTESMPCFLNREIICLLSTLGIEDAVFEAMQAGHLSILGNMLEDRHAALNVLQKLSGESSKNLLVKMLLQGYAPSSEPYLSMMLRVHHESQLSELKSRCRILVPKGRILIGCMDEMGILEYGQVYVRVTLTKAELESREQSYFRKIDEETSVVVGKVVVTKNPCLHPGDIRVLDAIYEVNFEQKGFLDCIVFPQKGERPHPNECSGGDLDGDQFFVSWDEKLIPSQMDPPMDYAGSRPRIMDHDVTLEEIHKFFVDYMISDTLGVISTAHLVHADRDPERARSQRCIELANLHSRAVDFAKTGAPAEMPYALKPREFPDFLERFEKPMYISGSVFGKLYRAVKSTLAQRKPEDAESEDKKKMAAYDSTLEEAGFDNFIETAKAHRDMYAEKLSSLMNYYGAANEEEILTGILRTKEMYLQRDNRRYGDMKDRITLSVKDLQREAMGWFEKSCEDEQQRKKLASAWYYVTYNPSYCDEKPRFLSFPWIVGDVLLGIKAESAER

SEQ ID NO: 391 - protein, 1198 aa, Brassica rapa
MGSEGNMKNSVVTQVSIGGFGESTTAKELTDYLEEEVGLVWRCRLKTSWTPPGSYPDFEITDTSNIPTFDGYKRVEPHAFVHFAVPESAGRAMDAAGQSKLILDGQPLKVSLGPKNPYTLNQRRRTTTPYKLTGVSIEIGTLIARDEFLVSWRAEGVDFLVDPFDNTCRFCFTKSTAFSLKDTMMYAVINCDYKLELLVRDIRTVRQYRTLDGYVLLLQLASSPRVWYRTADDDIYETVPVDLLDDDDPWIRTTDFTQAGAIGRCLSYRVLISPRYEKKMNTALDYLRARRVQEERVRWPPRIRDEPCFGEPITDHFFCIHHREGISFEIMFLVNAVLHRGVFNQFHLTERFFDLLRNQPKDVNIASLKHLCTYKRPVFDAYKRLKLVQEWIQKNPKLLGSHVQLDDISEIRRLAITPTRAYCLPPEVELSNRVLRKYKALSDRFLRVTFMDESMQTMNSNVLSYFVAPIVKDLTSSSFSQKTHVFKRVKTILTDGFKLCGRRYSFLAFSANQLRDRSAWFFAEDGKTRVSDIKTWMGKFKDKNVAKCAARMGLCFSSTYATVDVMPHEVDTELPEIERNGYTFSDGIGTITPDLALEIMEKLKLDSHCSPCAYQIRYAGFKGVVARWPSKDDGIRLALRHSMDKFHSKHTILEICSWTRFQPGFLNRQIITLLSVLGVPDEIFWDMQETMLCKLNRILDDTDVAFEVLTASCAEQGNTAAIMLSAGFKPKTEPHLRGMLSSVRIAQLWGLREKSRIFVTSGRWLMGCLDEAGVLEQGQCFIQVSKPSIENCFSKHGSRFKETKTDLQVVKGYVAIAKNPCLHPGDIRILEAVDVPELHHMYDCLLFPQKGERPHTNEASGSDLDGDLYFVAWDQRLIPPSRTSFPAMQYTAAEESSKGRPVNHQDIIEFFVKNMANENLGTICHAHVVHADRSEYGARDEECLLLAELAATAVDFPKTGKLVTMPFHLKPKLYPDFMGKEEYQTYRSEKILGRLYRRVKEVYDEDAEASSEENSDPSDIPYDTDLEVPGFEDFVPEAWGHKCSYDGQLIGLLGQYKVQKEEEIVTGHIWSMPKYTSSKQGELKERLKHSYNSLKKELRKVFEETKPEHESLSEEEKNVMYEKKASAWYHVTYHPEWVKKSTELQEPGESSGHAVMLSFAWIAADYLARIKVRSGEMGMKMDSAKPVDALAKYLSQRL

SEQ ID NO: 392 - protein, 606 aa, Brassica rapa
MGSRGDKGKNVSSGGSNAEVEQLAKGFSETKLGPSQDGGGEWEVISKRNKNKPGNAAGKSWATAPNQNPPRAWGGQQQQQGRGNNGYGRGRGTQVSTGRGAGRGQAMNRGYGGASAPVARPPLEGGWNWQSRPGAAQQTVTEEVPEVDDDDVSEGEEEDDCDALDDSDEDLASDDYDSDVSQQSHGTRKQNKWFKKFFDSLDSLSIEQINEPQRQWHCPACQNGPGAIDWYNLQPLLAHARTKGARRVKLHRELAEVLDRDLQMRGASVIPCGEIYGQWKGLGEEEKDHEIVWPPMVVIMNTKLDKDENDKWLGMGNPELLEYFNEYPAIRARHSYGPQGHRGMSVLIFESTATGYFEADRLHRDLAQKGLDRDAWERRRSWFSGGVRQLYGFLAIKRDLDLFNQHCQGKARLKYEMKSYQEYVVKELRQIAEDNQQLNWFKNKLTKQNKHAKVLEESLGILSEKLRKTAEDNRIVRQRTKMQHEQNREEMDSQDKFFKESIKQIHEKRDAKEENFEMLQQQERAKVVDLRKRAEEVSSFIECQEKEMKEFVEEREKLIEEQEKKMAELKKKYFEEMLDLERGFDKALEQLMSKHGLHDADDTDDY

SEQ ID NO: 393 - protein, 613 aa, Brassica rapa
MRNHNYNSLNNVNAPGNDAWSDSDRGSSSFRTRSPGAVLPLSASFGRMTTLVPFPDLNLMPDSPPPETSSNTRITAVRSLAPTLGVERNSLAIFPVPGHENHHARVVQTLHQDNQELARYVFKRTRMIYDSLLLQLTVEYGPNPKPAVNVRASKLMEERGLWLNKGQHLVGPVPGVEIGDIFFYRKELCMYGLHRHSQAGIEYTKARLSSFGVPIATSIIASGGYEDNEDRGDVLVYSGQGGRDKSGQQRQHQKLVRGNLAMVQSMQLGVPVRVIRGFHYKNEVSSNVFIYDGLYRIVKSSRVRKSGFDIFKFTLVRIQGQPEMGSARLMRALTLRNTPLAWMPAGYISFNLYGKNEGVPVYLYNDIDYDRSPLNYGYISQSDISSVILAQGGNNGGCDCNLSCTDDCICVRKNGGELPYSPYGSLLRGKHVIFECGVTCKCTSGCTNRVAQRGLMKKMEVFRTREAGWGVRSLDLIHAGEFICEYAGTVVTKELGEIMSMNGDGLVYPGRFAANWKLWGDLSDVYPGNVPPSYPTIPPVDYAIDVSRVRSVAAFIRHSREPNVMAQFVFHDHNNLKFPRVMLFALENISPLTELSLDYVVVDEVDERLAIRG

SEQ ID NO: 394 - protein, 631 aa, Brassica rapa
MTSHIPMVIPKPEPVTDSSPQTPIPPSSFFNFNTTTTQSPLEPNLYTEFTNVAETFRSAFAQRLKRHEDVTVLDSLTGAIVPVPEEQDPDPDPVSYPSQSLKPRKPQERSSELVRITDVGPEGERQFREVVRKTRMIYDSLRIFLILEETREVLGRRRGRPDSKAASMMKERFLWLNRDKRIVGSIPGVQVGDIFFFRLELCVMGLHGQTQAGIDYLIGSRSSNGEPIATSVIVSGGYEDDDDQGDVIIYTGHGGQDKLGRQAEHQKLEGGNLAMERSMYYGIEVRVVRGFKYENAVSSKVYVYDGLFRIVDSWFDVGKSGFGVFKFRLERIGGQVEMGTSVLKFAKTLKTNPLSVRPSGYISFDISNRKENAPVYLFNDVDDDQEPLYYEYLATTSFPRGILGGSNGDNASGCECVSGCSSGCICERKNGGEFAYDYNGNLIRMRPLVHECGPGCKCPPTCRNRVTQKGLRSRLEVFRSVETGWGVRCLDILHAGAFICEYVGVALTREQANILTMNGDTLVYPARFCSDRWKDWGDLSQVFPDYERPSYRQIPPVDYAMDVSKLRNVACYISHSNDSNVIVQMVLHDHNNLMFPRVMLFAAENIPPMTELSLDYGVSDDEWSPKLAICN

SEQ ID NO: 395 - protein, 637 aa, Brassica rapa
MNTLFAFPELNRTPSAAAMMSLPPRLRVKAEPIDDPTPPPTPTPTPTPTLTPSDIYAEYYSLCERVASALANRNNDLLAIVPVPEEKPPLLHSPPPIPTPPGSGDNRALSSRLPPRFQRPHELARVADLGREDHIHRREILKRTRAIYDSLRLHIIAEAMRLPGRRRKPRADYNASTLMRERGLWLNQDKHVVGSIPGVEIGDMFLYRLELCVIGLHGQPQAGIDFLTANRSSNGEPIATSIIVSGGYEDDEDTGEVLVYSGHGGQDKVHRQCQHQRLESGNLAMERSMHYGIEVRVIRGFKYDNVVSSKVYVYDGLYRIVQYWFDVGRSGFGVFKFKLVRIEGQGEMGSRRMKFAQALRTKPLAVRPNGYITFNLSGGKENVPVYLYNDIDFDREPEGYDYIVRSAIPCVISARGGANRGCDCNYSCGSDCFCARRNGGELPYDDDGTLLKGKPVVFECGVLCGCGPSCKNRVTQKGLSKTLEVFRSRETGWGVRTLDFIQAGAFICEYAGVVLTREQAKIVSMSGDPLLYPGRFTEKWSSLGDLSQVYPEYVQPSYPSLPPVDFGMDVSKFRNVASYISHSKESNVMAQFVLHDHSNLMYPRVMLFALENISPLTELSLDYGLDDKLEERLAICN

SEQ ID NO: 396 - protein, 1110 aa, Brassica rapa
MGKTIQVFGFPNGVSAEEVKNFLERLTGPGTVYAIKVRQPKKGGPRVYAIVQFTSERLARHIVTLASQRLDYGRSYLKAFEVEQDIVPKPRASLHNMPNLKMYFGCQVSPMKLSVFWSAQNVAVSYGTGMRKFHFSLSWCEKEYRLELPYENIWHIDLHFPQGRRDSKFLVIQVIGAPKIFEKEDQPVNLLFGLLDFYRDGSDEQWIRTTDFTSSSCISQSSAFCLELPVHLNVSDFRENFANYAEHEDSTFALESGRSFSSNANKLVPVVDPPPGCYLPFEILFKVNTLVQNACIPGPALDPAFYQLLNPQRFDRALIDHCLEKLFHLPECCYAPARWLREEYSTWVTKGKLPQSPMISLDDGLVYMYRVQVTPTRVYFSGPEVNVSNRVLRHYSDYINNFLRISFVDEDLEKVRSMDLSPRSSTVKRTKLYERINSVLRDGIVIGDKRFEFLAFSSSQLRENSAWMFAPVNGITAANIRAWMGDFDNIRNVAKYAARLGQSFSSSRETLTVRRDEIEVIPDVEIRYSDVHYVFSDGIGKISAEFARRVAKKCGLTEFFPSAYQIRYGGYKGVVAVDPNSSKKLSLRKSMSKFESENTKLDVLAWSKYQPCYMNRQLITLLSTLGVEDNVFEKKQREVVNQLDAILTDPLEAFEALGMMAPGENTKILKELILCGYKPDAEPFLSMMLQNFRASKLLELRTKTRVFIPRGRSMMGCLDETRTLEYGQVVVQYTDPTRPGSKYIVTGLVVVAKNPCLHPGDVRVLQAVNVPALSHMVDCVVFPQKGPRPHPNECSGSDLDGDIYFVCWDPELIPQGTSNPMDYTPEPAQILDHDVTIEEIEEYFTNYIVNDSLGIIANAHTAFADKEPLKAFSDPCIELARKFSIAVDFPKTGVAAEIPQHLYVKEYPDFMEKPDKPTYESKNVIGKLFREVKERAPPLISIKSFTLDVASKSYDKDMEVNGFEEYVDQAFFHKGNYDYKLGNLMDYYGIKTEAEILSGGIMRMSKSFTKRRDAESIGRAVRSLRKEALSWFNASEDEEEVVNESAKASAWYHVTYHRSYWGVYNEGLNRDHFLSFAWCVYDKLVRIKKANVGRRQRQETLERLGLMRLS

SEQ ID NO: 397 - protein, 1641 aa, Brassica rapa
MPDREIGDDASDTNLSSSFSSFASSSSSFSSSYSAAGAWTDDHSAKMEKDPRKIARRYQLELCEKAVEENVIVYLGTGCGKTHIAVMVIYELGPLILSPRKSVCIFLAPTVALVEQQALVIAKSINFKVATHCGGNRTVTTHSDWEREVSENEVLVMTPQILLHNLQHCFIRMEWISLLILDECHHAQEQSNHPYAQILKVFYKTEGVKGPRIFGMTASPVVGKGSFQSENLSKSINSLENLLNAKVYSVESNVQLDGFVSSPIVKVYYYQTAGTEASQSTNIYENMLEDIKQRCLTSLKQQIDNHQTQVLLNMKKLLKRTHDNLIYSLVNLGLWGAIQAARIQLNTDRNVHQEPLEENNKSKICITYLSLAAEVLSSKVAKDENASELISLPALKEPFFSRKLLQLIKILSAFRIEPHMKCIIFVNRIVTARTLSCILNSLKLLESWKSDFLVGLSSGVKSMSRKSMKTILERFQSKELNLLVATKVGEEGLDIQTCCLVIRFDLPETVTSFIQSRGRARMPKSEYAFLVDRGSEKEMDLIENFKVNEDRMNLEITSRTSEETCPRLDDEVYRVHETGACISGGSSISLLYKYCSRLPHDEFFQPKPEFQFKPVDEFGGTICRITLPANAPISEIVSSLLPSIEAAKKNACLKAVYKLHSLGVLNNFLLPDSNEETEDELSDEEFDFDKVEGEACSRGELYEMIVPDLFKQKWDPSKSCVNLQSYYIRFVPHPADRIYKKFGLFMKSPLPIEAETMDFDLHLAHQRSVSVKIFPKGDANFDNDEIRLAERFQEVALKIIFERRELITEFVPLGLQDSFRTSKSTFYLLLPINLDASESVLFVDWATIRSCLSSPIFKAPSGLVEDMDPPVGSHLKLANGCWSIDDVKNSVVFATHKKQFYFVSDICHGRNGFSAIRKSITETHLESIYNSYGVKLKHPLQPLLRLKPLCYVRNLLHNRKRENLEPNELEEYFIEIPPELSQLKIKGLSKDIGSSLSLLPSVMHRMENLLVAIELKHMLSASIPEIAEVSGHRVLEALTTEKCQERFSLERHAVLGDAFLKFAVSRHLFLHHDRLDEGELTRRRSNAVNNSNLFRLATRRNLQVYIRDQAFDPTQFFALGHPCRVTCDEVAMKEVHSLDKVPGLLESSTGEIRCSKGHHWLHKKTIADVVEALVGAFLVDSGFKGAIEFLKWIGINVDFESLQVRDACVASKRYMPLTTCFDLAALESLLGYKFLHKGLLLQAFIHPSYNRHGGGCYQRLEFLGDAVLDYLMTSYFFSVFPKLKPGQLTDLRSLSVNNKALANVAVSFSLQRFLFCDSTYLHDAIKDYTNFVTASPLASGPSEGPKCPKVLGDLIESFLGALFLDCGFDLNHVWRIMLSFLDPVKNLSNLQLSPVKELLEYCQSYKWDQEISATKKDGAFSVELKVTKKSSCLTASATGRNKKESTKKAAQLMLTNLKAHGHIKTSNPLEDVLKNSIRNEAKLIGYDEEPIDVVDRDGLDVENLNIQDSFEEDPVTESKTSETSSSYIIRRVLTNAPPSEKEESLPQKTIKDAGGSIIKTAKSLLRETCVANCWKTPEFVCCEEGPAHLKTFSYKVILEVVDAPNMTLECYGEAKPTKKSASEQAAQAALWCLEHTGFLRR

SEQ ID NO: 398 - protein, 966 aa, Brassica rapa
MSSRGGRGGGGGRRSDQSPGPVAWPALQSSGARGGRGRGNAAPVASSSSSPPSDAVSGAIGAVDVASSSSVREKPKASASSDSDSSLGQELAEKVQITTAPPSSSKAVTFPVRPGFGQAGKKVTIRANHFLVQVADRDLYHYDVSISPEVISKKVNRDVMTTLVKTYGESHMAKKIPAYDGRKSLYTAGPLPFESKEFVVDLNDKKPAASSKRDRKFRVAIKLASRPDLHQLQEFLRRKQRDAPYETIQVLDVVLRDLPSQKFVSVGRSFFDPSLGRRGELGDGVEYWSGYFQSLRLTQMGLSLNIDVSARSFYEPILVTEFIGKYLNLRDFSRPLRDSDRVKASYLMFIQPVKKALKSLKVELAQFDFARSVKVSGISSCPISELRFTLEDNTQKTVVQYFAEKYNYRVKYPALPAIQSGSDSRPAYFPMELCRIAEGQRYTKKLNERQVTALLRATCQRPDIRENSIKGMVKNNKYNEIDLVRKEFGMSVTDQLATVEARVLPPPLLKYHESGREKMVNPRLGQWNMIDKKMINGARVASWTSVCFSTRIDRNLPQEFCKQLIDMCVSKGMQFNPQPAIPFISCQPQRIEEALCDIHKRAPGLQMLIVILPDVTGSYGKIKRICETELGIVSQCCQPNQVRKLNKQYMENVALKINVKTGGRNTVLDDAIRRRIPLISDRPTIIFGADVTHPQPGEDSSPSIAAVVASMDWPEITKYRGLVSAQTHREEIIEDLYKLVQDPQRGPVHTGMIREHLIAFRRATGQKPLRIIFYRDGVSEGQFSQVLLHEMTAIRKACASLEERYLPPVTFVVVQKRHHTRLFPAQHGNRETTDKSGNIQPGTVVDTKICHPTEFDFYLNSHAGIQGTSRPAHYHVLVDENGFTADALQMLTNNLCYTFARCTRSVSIVPPAYYAHLAAFRARYYMESENSDGGSSRSRNTTASTSAVVSLLPATKDNVKDVMFYC

SEQ ID NO: 399 - DNA, 3384 bp, Gossypium raimondii
  source 1..3384: mol_type = genomic DNA
ctaaaagtgagagagtggacggtggagatgtggtagagtatggtaatcgtgtaagaccgcgaagcagaggagacggtaaccactaatagagggacagaagaagcgttggtcacttgtgtattttagtctctctcagccttttagtatttagagggagagggagtgagctaaaaaagaagagaaagagggtcgtagaattttgctgtctctttgagttccttagggtttcttgtttcaatttttttttgttttttctctccggatttcagggtatggattcgtttgagcaagagggaaatggggcagcgctggaatccctgcctcctccgccacctgtgcctcctgatgttgttccgatcaaagcagaatcggatgcgaagaagattgtacgacaccctatggcaaggcgtggtgttggaactaaagggcagaaggtaactatactcaccaatcacttcaaagtgagcgtggggagtactgatggacacttctaccattacagcgtttctctttcatatgaagatggtcgccctgtggatggtaagggtgttggaaggaaagtgattgacagagtgcatgagacctacaaaaatgatttggatggaaagaattttgcctatgatggtgaaaaaagtttatttactataggtccgctaccaaacaacaagcttgagtttactgttgtacttgaggatgttgcacctaccagaaacaatggaaatgcaagccctgatggccaggacagcccaaatgggcgtgaaagaaagagattaagaagaccgtatcattcaaagacctttaaagtggagattagctatgctgcgaagatacccatgcaagcaattcaaaatgctctgcgtgggcaggaatctgaaaactctcaagaagcactgagggtgctggatatcattttaaggcagcatgctgcgaaacagggatgcctacttgttcgccaatctttctttcaagataatcagaacaacttcacagacattggaggaggtgtccttggctgtagaggtttccattcaagtttcagagccactcaaggaggcctttcactaaatatcgatgtatcaactaccatgataattcaacctggtccggtagttgattttttacttgcaaatcagaatgctagagatccttactctcttgactggaacaaggcaaaacgggtgctgaagaatctgaggattaaagttagtccgtctaatcaagagtacaagattactggcttgagtgaacaactgtgcaaggatcagttgttctcaatgaagcagaaaaataccaaaaatgaaaatggtgaagctgagacactggagattactatttatgattattttgttaaccatcgcaacatacagttgcgttattctgctgatttgccatgtattaatgttgggaagcctaagaggccaacatatattcctattgagctttgctctttggtgtctttgcaacgctacactaaggcactatccactttccaaagagcttccctggttgaaaaatcgaggcagaagcctcaagaaaggatgaatgttttgtctaatgttttacgtaccagtaattatggtgctgaaccaatgctgaaatcttgtggtgttaatataaactctaatttcacccaagtggatggacgtattctgccagcaccaaggttaagagtcggcaacggtgaagatttctttccaaggaatgggcgttggaattttaacaacaagaaattggtggagccatctaggattgaaagatgggctgttgtgaacttctcggctcctcgttgtgatccaaacaacattgcaagggatttgattcgttgtggagaaatgaaaggaattcgtattgatcccccatttgatatattcaatgagatgaaccagaatagacgcctttcacccgtggttagagttgaaaaaatgtttgaacagatacaatctaaacttcctggagctccgcagttccttctttgtctgcttcctgataggaaaaactctgatctttatgggccatggaagcggaagaatctttctgagtatggcatcgtgactcagtgtatggcaccagctagggtgaatgatcaataccttacaaatcttcttctgaagatcaatgctaagcttggaggtcttaattcaatgctaactattgagcaaacaccttcaatccctatgatttcaaaggttccaactatcatccttggaatggatgtatctcatggctctcctgggcagtctgatgtgccgtcaatagctgcggtggttagctccaggcaatggccattgatttcccgctatagggcatcagtccgtacacagtctccgaagcttgaaatggtagattctcttttcaaaccagtttctgacaaagtggatgagggtatcatgagggaagctctcttagacttctatacaagttcagggaagaggaagcctgatcagatcattattttcagggatggggttagcgagtctcagttcaatcaagttttgaacaaagaacttgatcaagttattgaggcttgcaagttccttgacgagaattggaaccctaagtttgtggttattgttgcacaaaaaaaccatcataccaagtttttccagcagggatctcctgacaatgtgctacctggtactgtcattgacaacaaagtatgccatccgaagaacaatgatttttacctttgtgctcatgctggaatgatagggaccacaaggccgacccactatcatgttctcttagaccaggttgggttttcagctgatgatctgcaggagcttgttcattctctatcctacgtgtatcaaaggagcaccacagccatatctgttgtggcccctatttgctacgctcatttggcagcttcacagttggggcaatttatgaagtttgaggatgcttcagagacatcatcgagccatggtggggtgactgctccgggagcaatttctgttcctcagcttcccaggttgaaggataatgtcagcagctccatgttcttctgctgaaaaccgttgaaccatctttttgtatagggcttttggattttggctaccaaaaactatttatgctgctttttcaaagtagtctcagacttttgggttgcaacactcttaggtgtttcgtatgttatctgaacttatgaacggttgtctagctaaagctcacttctgcagtggcttttgtggcttttacctgtttggttttatactttgataaatatggttatggtttgctcttttgattataagttttctttttctagtttttttcattagttgagttgaagataaaacgagctctgatttcaaagtaccgtacattttaaattaaaacaggatataaaagaagagaaaagcaatgctttcaaagtagtatact

SEQ ID NO: 400 - DNA, 3477 bp, Gossypium raimondii
  source 1..3477: mol_type = genomic DNA
gtctctctcagccttttagtatttagagggagagggagtgagctaaaaaagaagagaaagagggtcgtagaattttgctgtctctttgagttccttagggtttcttgtttcaatttttttttgttttttctctccggatttcaggtatttcctctgaaacctttttattttggattttttttctttgctttttttttcatggttctttgaggttttttttagagtttttttttggagatttttgggctttgttcttcgcaatgctgctacagtgcgtgtgatttttaaagggtatggattcgtttgagcaagagggaaatggggcagcgctggaatccctgcctcctccgccacctgtgcctcctgatgttgttccgatcaaagcagaatcggatgcgaagaagattgtacgacaccctatggcaaggcgtggtgttggaactaaagggcagaaggtaactatactcaccaatcacttcaaagtgagcgtggggagtactgatggacacttctaccattacagcgtttctctttcatatgaagatggtcgccctgtggatggtaagggtgttggaaggaaagtgattgacagagtgcatgagacctacaaaaatgatttggatggaaagaattttgcctatgatggtgaaaaaagtttatttactataggtccgctaccaaacaacaagcttgagtttactgttgtacttgaggatgttgcacctaccagaaacaatggaaatgcaagccctgatggccaggacagcccaaatgggcgtgaaagaaagagattaagaagaccgtatcattcaaagacctttaaagtggagattagctatgctgcgaagatacccatgcaagcaattcaaaatgctctgcgtgggcaggaatctgaaaactctcaagaagcactgagggtgctggatatcattttaaggcagcatgctgcgaaacagggatgcctacttgttcgccaatctttctttcaagataatcagaacaacttcacagacattggaggaggtgtccttggctgtagaggtttccattcaagtttcagagccactcaaggaggcctttcactaaatatcgatgtatcaactaccatgataattcaacctggtccggtagttgattttttacttgcaaatcagaatgctagagatccttactctcttgactggaacaaggcaaaacgggtgctgaagaatctgaggattaaagttagtccgtctaatcaagagtacaagattactggcttgagtgaacaactgtgcaaggatcagttgttctcaatgaagcagaaaaataccaaaaatgaaaatggtgaagctgagacactggagattactatttatgattattttgttaaccatcgcaacatacagttgcgttattctgctgatttgccatgtattaatgttgggaagcctaagaggccaacatatattcctattgagctttgctctttggtgtctttgcaacgctacactaaggcactatccactttccaaagagcttccctggttgaaaaatcgaggcagaagcctcaagaaaggatgaatgttttgtctaatgttttacgtaccagtaattatggtgctgaaccaatgctgaaatcttgtggtgttaatataaactctaatttcacccaagtggatggacgtattctgccagcaccaaggttaagagtcggcaacggtgaagatttctttccaaggaatgggcgttggaattttaacaacaagaaattggtggagccatctaggattgaaagatgggctgttgtgaacttctcggctcctcgttgtgatccaaacaacattgcaagggatttgattcgttgtggagaaatgaaaggaattcgtattgatcccccatttgatatattcaatgagatgaaccagaatagacgcctttcacccgtggttagagttgaaaaaatgtttgaacagatacaatctaaacttcctggagctccgcagttccttctttgtctgcttcctgataggaaaaactctgatctttatgggccatggaagcggaagaatctttctgagtatggcatcgtgactcagtgtatggcaccagctagggtgaatgatcaataccttacaaatcttcttctgaagatcaatgctaagcttggaggtcttaattcaatgctaactattgagcaaacaccttcaatccctatgatttcaaaggttccaactatcatccttggaatggatgtatctcatggctctcctgggcagtctgatgtgccgtcaatagctgcggtggttagctccaggcaatggccattgatttcccgctatagggcatcagtccgtacacagtctccgaagcttgaaatggtagattctcttttcaaaccagtttctgacaaagtggatgagggtatcatgagggaagctctcttagacttctatacaagttcagggaagaggaagcctgatcagatcattattttcagggatggggttagcgagtctcagttcaatcaagttttgaacaaagaacttgatcaagttattgaggcttgcaagttccttgacgagaattggaaccctaagtttgtggttattgttgcacaaaaaaaccatcataccaagtttttccagcagggatctcctgacaatgtgctacctggtactgtcattgacaacaaagtatgccatccgaagaacaatgatttttacctttgtgctcatgctggaatgatagggaccacaaggccgacccactatcatgttctcttagaccaggttgggttttcagctgatgatctgcaggagcttgttcattctctatcctacgtgtatcaaaggagcaccacagccatatctgttgtggcccctatttgctacgctcatttggcagcttcacagttggggcaatttatgaagtttgaggatgcttcagagacatcatcgagccatggtggggtgactgctccgggagcaatttctgttcctcagcttcccaggttgaaggataatgtcagcagctccatgttcttctgctgaaaaccgttgaaccatctttttgtatagggcttttggattttggctaccaaaaactatttatgctgctttttcaaagtagtctcagacttttgggttgcaacactcttaggtgtttcgtatgttatctgaacttatgaacggttgtctagctaaagctcacttctgcagtggcttttgtggcttttacctgtttggttttatactttgataaatatggttatggtttgctcttttgattataagttttctttttctagtttttttcattagttgagttgaagataaaacgagctctgatttcaaagtaccgtacattttaaattaaaacaggatataaaagaagagaaaagcaatgctttcaaagtagtatacttgcaaaattaaaacaaggaggatcaactttgcttgaaaatttgaatctgagctgactttgttgagcagagaa

SEQ ID NO: 401 - DNA, 3148 bp, Gossypium raimondii
  source 1..3148: mol_type = genomic DNA
gcaatgctgctacagtgcgtgtgatttttaaaggtttttcttcctttttaaggtatggattcgtttgagcaagagggaaatggggcagcgctggaatccctgcctcctccgccacctgtgcctcctgatgttgttccgatcaaagcagaatcggatgcgaagaagattgtacgacaccctatggcaaggcgtggtgttggaactaaagggcagaaggtaactatactcaccaatcacttcaaagtgagcgtggggagtactgatggacacttctaccattacagcgtttctctttcatatgaagatggtcgccctgtggatggtaagggtgttggaaggaaagtgattgacagagtgcatgagacctacaaaaatgatttggatggaaagaattttgcctatgatggtgaaaaaagtttatttactataggtccgctaccaaacaacaagcttgagtttactgttgtacttgaggatgttgcacctaccagaaacaatggaaatgcaagccctgatggccaggacagcccaaatgggcgtgaaagaaagagattaagaagaccgtatcattcaaagacctttaaagtggagattagctatgctgcgaagatacccatgcaagcaattcaaaatgctctgcgtgggcaggaatctgaaaactctcaagaagcactgagggtgctggatatcattttaaggcagcatgctgcgaaacagggatgcctacttgttcgccaatctttctttcaagataatcagaacaacttcacagacattggaggaggtgtccttggctgtagaggtttccattcaagtttcagagccactcaaggaggcctttcactaaatatcgatgtatcaactaccatgataattcaacctggtccggtagttgattttttacttgcaaatcagaatgctagagatccttactctcttgactggaacaaggcaaaacgggtgctgaagaatctgaggattaaagttagtccgtctaatcaagagtacaagattactggcttgagtgaacaactgtgcaaggatcagttgttctcaatgaagcagaaaaataccaaaaatgaaaatggtgaagctgagacactggagattactatttatgattattttgttaaccatcgcaacatacagttgcgttattctgctgatttgccatgtattaatgttgggaagcctaagaggccaacatatattcctattgagctttgctctttggtgtctttgcaacgctacactaaggcactatccactttccaaagagcttccctggttgaaaaatcgaggcagaagcctcaagaaaggatgaatgttttgtctaatgttttacgtaccagtaattatggtgctgaaccaatgctgaaatcttgtggtgttaatataaactctaatttcacccaagtggatggacgtattctgccagcaccaaggttaagagtcggcaacggtgaagatttctttccaaggaatgggcgttggaattttaacaacaagaaattggtggagccatctaggattgaaagatgggctgttgtgaacttctcggctcctcgttgtgatccaaacaacattgcaagggatttgattcgttgtggagaaatgaaaggaattcgtattgatcccccatttgatatattcaatgagatgaaccagaatagacgcctttcacccgtggttagagttgaaaaaatgtttgaacagatacaatctaaacttcctggagctccgcagttccttctttgtctgcttcctgataggaaaaactctgatctttatgggccatggaagcggaagaatctttctgagtatggcatcgtgactcagtgtatggcaccagctagggtgaatgatcaataccttacaaatcttcttctgaagatcaatgctaagcttggaggtcttaattcaatgctaactattgagcaaacaccttcaatccctatgatttcaaaggttccaactatcatccttggaatggatgtatctcatggctctcctgggcagtctgatgtgccgtcaatagctgcggtggttagctccaggcaatggccattgatttcccgctatagggcatcagtccgtacacagtctccgaagcttgaaatggtagattctcttttcaaaccagtttctgacaaagtggatgagggtatcatgagggaagctctcttagacttctatacaagttcagggaagaggaagcctgatcagatcattattttcagggatggggttagcgagtctcagttcaatcaagttttgaacaaagaacttgatcaagttattgaggcttgcaagttccttgacgagaattggaaccctaagtttgtggttattgttgcacaaaaaaaccatcataccaagtttttccagcagggatctcctgacaatgtgctacctggtactgtcattgacaacaaagtatgccatccgaagaacaatgatttttacctttgtgctcatgctggaatgatagggaccacaaggccgacccactatcatgttctcttagaccaggttgggttttcagctgatgatctgcaggagcttgttcattctctatcctacgtgtatcaaaggagcaccacagccatatctgttgtggcccctatttgctacgctcatttggcagcttcacagttggggcaatttatgaagtttgaggatgcttcagagacatcatcgagccatggtggggtgactgctccgggagcaatttctgttcctcagcttcccaggttgaaggataatgtcagcagctccatgttcttctgctgaaaaccgttgaaccatctttttgtatagggcttttggattttggctaccaaaaactatttatgctgctttttcaaagtagtctcagacttttgggttgcaacactcttaggtgtttcgtatgttatctgaacttatgaacggttgtctagctaaagctcacttctgcagtggcttttgtggcttttacctgtttggttttatactttgataaatatggttatggtttgctcttttgattataagttttctttttctagtttttttcattagttgagttgaagataaaacgagctctgatttcaaagtaccgtacattttaaattaaaacaggatataaaagaagagaaaagcaatg

SEQ ID NO: 402 - protein, 3219 aa, Gossypium raimondii
GTGTATTTTAGTCTCTCTCAGCCTTTTAGTATTTAGAGGGAGAGGGAGTGAGCTAAAAAAGAAGAGAAAGAGGGTCGTAGAATTTTGCTGTCTCTTTGAGTTCCTTAGGGTTTCTTGTTTCAATTTTTTTTTGTTTTTTCTCTCCGGATTTCAGGGTATGGATTCGTTTGAGCAAGAGGGAAATGGGGCAGCGCTGGAATCCCTGCCTCCTCCGCCACCTGTGCCTCCTGATGTTGTTCCGATCAAAGCAGAATCGGATGCGAAGAAGATTGTACGACACCCTATGGCAAGGCGTGGTGTTGGAACTAAAGGGCAGAAGGTAACTATACTCACCAATCACTTCAAAGTGAGCGTGGGGAGTACTGATGGACACTTCTACCATTACAGCGTTTCTCTTTCATATGAAGATGGTCGCCCTGTGGATGGTAAGGGTGTTGGAAGGAAAGTGATTGACAGAGTGCATGAGACCTACAAAAATGATTTGGATGGAAAGAATTTTGCCTATGATGGTGAAAAAAGTTTATTTACTATAGGTCCGCTACCAAACAACAAGCTTGAGTTTACTGTTGTACTTGAGGATGTTGCACCTACCAGAAACAATGGAAATGCAAGCCCTGATGGCCAGGACAGCCCAAATGGGCGTGAAAGAAAGAGATTAAGAAGACCGTATCATTCAAAGACCTTTAAAGTGGAGATTAGCTATGCTGCGAAGATACCCATGCAAGCAATTCAAAATGCTCTGCGTGGGCAGGAATCTGAAAACTCTCAAGAAGCACTGAGGGTGCTGGATATCATTTTAAGGCAGCATGCTGCGAAACAGGGATGCCTACTTGTTCGCCAATCTTTCTTTCAAGATAATCAGAACAACTTCACAGACATTGGAGGAGGTGTCCTTGGCTGTAGAGGTTTCCATTCAAGTTTCAGAGCCACTCAAGGAGGCCTTTCACTAAATATCGATGTATCAACTACCATGATAATTCAACCTGGTCCGGTAGTTGATTTTTTACTTGCAAATCAGAATGCTAGAGATCCTTACTCTCTTGACTGGAACAAGGCAAAACGGGTGCTGAAGAATCTGAGGATTAAAGTTAGTCCGTCTAATCAAGAGTACAAGATTACTGGCTTGAGTGAACAACTGTGCAAGGATCAGTTGTTCTCAATGAAGCAGAAAAATACCAAAAATGAAAATGGTGAAGCTGAGACACTGGAGATTACTATTTATGATTATTTTGTTAACCATCGCAACATACAGTTGCGTTATTCTGCTGATTTGCCATGTATTAATGTTGGGAAGCCTAAGAGGCCAACATATATTCCTATTGAGCTTTGCTCTTTGGTGTCTTTGCAACGCTACACTAAGGCACTATCCACTTTCCAAAGAGCTTCCCTGGTTGAAAAATCGAGGCAGAAGCCTCAAGAAAGGATGAATGTTTTGTCTAATGTTTTACGTACCAGTAATTATGGTGCTGAACCAATGCTGAAATCTTGTGGTGTTAATATAAACTCTAATTTCACCCAAGTGGATGGACGTATTCTGCCAGCACCAAGGTTAAGAGTCGGCAACGGTGAAGATTTCTTTCCAAGGAATGGGCGTTGGAATTTTAACAACAAGAAATTGGTGGAGCCATCTAGGATTGAAAGATGGGCTGTTGTGAACTTCTCGGCTCCTCGTTGTGATCCAAACAACATTGCAAGGGATTTGATTCGTTGTGGAGAAATGAAAGGAATTCGTATTGATCCCCCATTTGATATATTCAATGAGATGAACCAGAATAGACGCCTTTCACCCGTGGTTAGAGTTGAAAAAATGTTTGAACAGATACAATCTAAACTTCCTGGAGCTCCGCAGTTCCTTCTTTGTCTGCTTCCTGATAGGAAAAACTCTGATCTTTATGGGCCATGGAAGCGGAAGAATCTTTCTGAGTATGGCATCGTGACTCAGTGTATGGCACCAGCTAGGGTGAATGATCAATACCTTACAAATCTTCTTCTGAAGATCAATGCTAAGCTTGGAGGTCTTAATTCAATGCTAACTATTGAGCAAACACCTTCAATCCCTATGATTTCAAAGGTTCCAACTATCATCCTTGGAATGGATGTATCTCATGGCTCTCCTGGGCAGTCTGATGTGCCGTCAATAGCTGCGGTGGTTAGCTCCAGGCAATGGCCATTGATTTCCCGCTATAGGGCATCAGTCCGTACACAGTCTCCGAAGCTTGAAATGGTAGATTCTCTTTTCAAACCAGTTTCTGACAAAGTGGATGAGGGTATCATGAGGGAAGCTCTCTTAGACTTCTATACAAGTTCAGGGAAGAGGAAGCCTGATCAGATCATTATTTTCAGGGATGGGGTTAGCGAGTCTCAGTTCAATCAAGTTTTGAACAAAGAACTTGATCAAGTTATTGAGGCTTGCAAGTTCCTTGACGAGAATTGGAACCCTAAGTTTGTGGTTATTGTTGCACAAAAAAACCATCATACCAAGTTTTTCCAGCAGGGATCTCCTGACAATGTGCTACCTGGTACTGTCATTGACAACAAAGTATGCCATCCGAAGAACAATGATTTTTACCTTTGTGCTCATGCTGGAATGATAGGGACCACAAGGCCGACCCACTATCATGTTCTCTTAGACCAGGTTGGGTTTTCAGCTGATGATCTGCAGGAGCTTGTTCATTCTCTATCCTACGTTGGCCCCTATTTGCTACGCTCATTTGGCAGCTTCACAGTTGGGGCAATTTATGAAGTTTGAGGATGCTTCAGAGACATCATCGAGCCATGGTGGGGTGACTGCTCCGGGAGCAATTTCTGTTCCTCAGCTTCCCAGGTTGAAGGATAATGTCAGCAGCTCCATGTTCTTCTGCTGAAAACCGTTGAACCATCTTTTTGTATAGGGCTTTTGGATTTTGGCTACCAAAAACTATTTATGCTGCTTTTTCAAAGTAGTCTCAGACTTTTGGGTTGCAACACTCTTAGGTGTTTCGTATGTTATCTGAACTTATGAACGGTTGTCTAGCTAAAGCTCACTTCTGCAGTGGCTTTTGTGGCTTTTACCTGTTTGGTTTTATACTTTGATAAATATGGTTATGGTTTGCTCTTTTGATTATAAGTTTTCTTTTTCTAGTTTTTTTCATTAGTTGAGTTGAAGATAAAACGAGCTCTGATTTCAAAGTACCGTACATTTTAAATTAAAACAGGATATAAAAGAAGAGAAAAGCAATG

SEQ ID NO: 403 - DNA, 3347 bp, Gossypium raimondii
  source 1..3347: mol_type = genomic DNA
gtgtattttagtctctctcagccttttagtatttagagggagagggagtgagctaaaaaagaagagaaagagggtcgtagaattttgctgtctctttgagttccttagggtttcttgtttcaatttttttttgttttttctctccggatttcagggtatggattcgtttgagcaagagggaaatggggcagcgctggaatccctgcctcctccgccacctgtgcctcctgatgttgttccgatcaaagcagaatcggatgcgaagaagattgtacgacaccctatggcaaggcgtggtgttggaactaaagggcagaaggtaactatactcaccaatcacttcaaagtgagcgtggggagtactgatggacacttctaccattacagcgtttctctttcatatgaagatggtcgccctgtggatggtaagggtgttggaaggaaagtgattgacagagtgcatgagacctacaaaaatgatttggatggaaagaattttgcctatgatggtgaaaaaagtttatttactataggtccgctaccaaacaacaagcttgagtttactgttgtacttgaggatgttgcacctaccagaaacaatggaaatgcaagccctgatggccaggacagcccaaatgggcgtgaaagaaagagattaagaagaccgtatcattcaaagacctttaaagtggagattagctatgctgcgaagatacccatgcaagcaattcaaaatgctctgcgtgggcaggaatctgaaaactctcaagaagcactgagggtgctggatatcattttaaggcagcatgctgcgaaacagggatgcctacttgttcgccaatctttctttcaagataatcagaacaacttcacagacattggaggaggtgtccttggctgtagaggtttccattcaagtttcagagccactcaaggaggcctttcactaaatatcgatgtatcaactaccatgataattcaacctggtccggtagttgattttttacttgcaaatcagaatgctagagatccttactctcttgactggaacaaggcaaaacgggtgctgaagaatctgaggattaaagttagtccgtctaatcaagagtacaagattactggcttgagtgaacaactgtgcaaggatcagttgttctcaatgaagcagaaaaataccaaaaatgaaaatggtgaagctgagacactggagattactatttatgattattttgttaaccatcgcaacatacagttgcgttattctgctgatttgccatgtattaatgttgggaagcctaagaggccaacatatattcctattgagctttgctctttggtgtctttgcaacgctacactaaggcactatccactttccaaagagcttccctggttgaaaaatcgaggcagaagcctcaagaaaggatgaatgttttgtctaatgttttacgtaccagtaattatggtgctgaaccaatgctgaaatcttgtggtgttaatataaactctaatttcacccaagtggatggacgtattctgccagcaccaaggttaagagtcggcaacggtgaagatttctttccaaggaatgggcgttggaattttaacaacaagaaattggtggagccatctaggattgaaagatgggctgttgtgaacttctcggctcctcgttgtgatccaaacaacattgcaagggatttgattcgttgtggagaaatgaaaggaattcgtattgatcccccatttgatatattcaatgagatgaaccagaatagacgcctttcacccgtggttagagttgaaaaaatgtttgaacagatacaatctaaacttcctggagctccgcagttccttctttgtctgcttcctgataggaaaaactctgatctttatgggccatggaagcggaagaatctttctgagtatggcatcgtgactcagtgtatggcaccagctagggtgaatgatcaataccttacaaatcttcttctgaagatcaatgctaagcttggaggtcttaattcaatgctaactattgagcaaacaccttcaatccctatgatttcaaaggttccaactatcatccttggaatggatgtatctcatggctctcctgggcagtctgatgtgccgtcaatagctgcggtggttagctccaggcaatggccattgatttcccgctatagggcatcagtccgtacacagtctccgaagcttgaaatggtagattctcttttcaaaccagtttctgacaaagtggatgagggtatcatgagggaagctctcttagacttctatacaagttcagggaagaggaagcctgatcagatcattattttcagggatggggttagcgagtctcagttcaatcaagttttgaacaaagaacttgatcaagttattgaggcttgcaagttccttgacgagaattggaaccctaagtttgtggttattgttgcacaaaaaaaccatcataccaagtttttccagcagggatctcctgacaatgtgctacctggtactgtcattgacaacaaagtatgccatccgaagaacaatgatttttacctttgtgctcatgctggaatgatagggaccacaaggccgacccactatcatgttctcttagaccaggttgggttttcagctgatgatctgcaggagcttgttcattctctatcctacgtgtaagtacagaaacaagcgtacagaaacaacttatttttttacaaatagtttaagctgttttcactgtcacaatctttgtattctgtctgttgcaggtatcaaaggagcaccacagccatatctgttgtggcccctatttgctacgctcatttggcagcttcacagttggggcaatttatgaagtttgaggatgcttcagagacatcatcgagccatggtggggtgactgctccgggagcaatttctgttcctcagcttcccaggttgaaggataatgtcagcagctccatgttcttctgctgaaaaccgttgaaccatctttttgtatagggcttttggattttggctaccaaaaactatttatgctgctttttcaaagtagtctcagacttttgggttgcaacactcttaggtgtttcgtatgttatctgaacttatgaacggttgtctagctaaagctcacttctgcagtggcttttgtggcttttacctgtttggttttatactttgataaatatggttatggtttgctcttttgattataagttttctttttctagtttttttcattagttgagttgaagataaaacgagctctgatttcaaagtaccgtacattttaaattaaaacaggatataaaagaagagaaaagcaatg

SEQ ID NO: 404 - DNA, 3577 bp, Gossypium raimondii
  source 1..3577: mol_type = genomic DNA
gtgtattttagtctctctcagccttttagtatttagagggagagggagtgagctaaaaaagaagagaaagagggtcgtagaattttgctgtctctttgagttccttagggtttcttgtttcaatttttttttgttttttctctccggatttcagggtatggattcgtttgagcaagagggaaatggggcagcgctggaatccctgcctcctccgccacctgtgcctcctgatgttgttccgatcaaagcagaatcggatgcgaagaagattgtacgacaccctatggcaaggcgtggtgttggaactaaagggcagaaggtaactatactcaccaatcacttcaaagtgagcgtggggagtactgatggacacttctaccattacagcgtttctctttcatatgaagatggtcgccctgtggatggtaagggtgttggaaggaaagtgattgacagagtgcatgagacctacaaaaatgatttggatggaaagaattttgcctatgatggtgaaaaaagtttatttactataggtccgctaccaaacaacaagcttgagtttactgttgtacttgaggatgttgcacctaccagaaacaatggaaatgcaagccctgatggccaggacagcccaaatgggcgtgaaagaaagagattaagaagaccgtatcattcaaagacctttaaagtggagattagctatgctgcgaagatacccatgcaagcaattcaaaatgctctgcgtgggcaggaatctgaaaactctcaagaagcactgagggtgctggatatcattttaaggcagcatgctgcgaaacagggatgcctacttgttcgccaatctttctttcaagataatcagaacaacttcacagacattggaggaggtgtccttggctgtagaggtttccattcaagtttcagagccactcaaggaggcctttcactaaatatcgatgtatcaactaccatgataattcaacctggtccggtagttgattttttacttgcaaatcagaatgctagagatccttactctcttgactggaacaaggcaaaacgggtgctgaagaatctgaggattaaagttagtccgtctaatcaagagtacaagattactggcttgagtgaacaactgtgcaaggatcagttgttctcaatgaagcagaaaaataccaaaaatgaaaatggtgaagctgagacactggagattactatttatgattattttgttaaccatcgcaacatacagttgcgttattctgctgatttgccatgtattaatgttgggaagcctaagaggccaacatatattcctattgagctttgctctttggtgtctttgcaacgctacactaaggcactatccactttccaaagagcttccctggttgaaaaatcgaggcagaagcctcaagaaaggatgaatgttttgtctaatgttttacgtaccagtaattatggtgctgaaccaatgctgaaatcttgtggtgttaatataaactctaatttcacccaagtggatggacgtattctgccagcaccaaggttaagagtcggcaacggtgaagatttctttccaaggaatgggcgttggaattttaacaacaagaaattggtggagccatctaggattgaaagatgggctgttgtgaacttctcggctcctcgttgtgatccaaacaacattgcaagggatttgattcgttgtggagaaatgaaaggaattcgtattgatcccccatttgatatattcaatgagatgaaccagaatagacgcctttcacccgtggttagagttgaaaaaatgtttgaacagatacaatctaaacttcctggagctccgcagttccttctttgtctgcttcctgataggaaaaactctgatctttatgggccatggaagcggaagaatctttctgagtatggcatcgtgactcagtgtatggcaccagctagggtgaatgatcaataccttacaaatcttcttctgaagatcaatgctaagcttggaggtcttaattcaatgctaactattgagcaaacaccttcaatccctatgatttcaaaggttccaactatcatccttggaatggatgtatctcatggctctcctgggcagtctgatgtgccgtcaatagctgcggtggttagctccaggcaatggccattgatttcccgctatagggcatcagtccgtacacagtctccgaagcttgaaatggtagattctcttttcaaaccagtttctgacaaagtggatgagggtatcatgagggaagctctcttagacttctatacaagttcagggaagaggaagcctgatcagatcattattttcagggatggggttagcgagtctcagttcaatcaagttttgaacaaagaacttgatcaagttattgaggcttgcaagttccttgacgagaattggaaccctaagtttgtggttattgttgcacaaaaaaaccatcataccaagtttttccagcagggatctcctgacaatgtgctacctggtactgtcattgacaacaaagtatgccatccgaagaacaatgatttttacctttgtgctcatgctggaatgatagtaagttcacttatttttgtttctgttaattgatgattgataatacagctgtctcaattttgcagtcattgataacacattatatgatttgtgtttgccgttcaggggaccacaaggccgacccactatcatgttctcttagaccaggttgggttttcagctgatgatctgcaggagcttgttcattctctatcctacgtgtaagtacagaaacaagcgtacagaaacaacttatttttttacaaatagtttaagctgttttcactgtcacaatctttgtattctgtctgttgcaggtatcaaaggagcaccacagccatatctgttggtaagtataagtattgtttctgatctttgctttgggttttccgtttttgatgcataattttgtagtttcatttcttaagtgcattgtttctgatctttgctttgggttttccttttttgatgcagtggcccctatttgctacgctcatttggcagcttcacagttggggcaatttatgaagtttgaggatgcttcagagacatcatcgagccatggtggggtgactgctccgggagcaatttctgttcctcagcttcccaggttgaaggataatgtcagcagctccatgttcttctgctgaaaaccgttgaaccatctttttgtatagggcttttggattttggctaccaaaaactatttatgctgctttttcaaagtagtctcagacttttgggttgcaacactcttaggtgtttcgtatgttatctgaacttatgaacggttgtctagctaaagctcacttctgcagtggcttttgtggcttttacctgtttggttttatactttgataaatatggttatggtttgctcttttgattataagttttctttttctagtttttttcattagttgagttgaagataaaacgagctctgatttcaaagtaccgtacattttaaattaaaacaggatataaaagaagagaaaagcaatg

SEQ ID NO: 405 - DNA, 2805 bp, Gossypium raimondii
  source 1..2805: mol_type = genomic DNA
tctcagccttttagtatttagagggagagggagtgagctaaaaaagaagagaaagagggtcgtagaattttgctgtctctttgagttccttagggtttcttgtttcaatttttttttgttttttctctccggatttcagggtatggattcgtttgagcaagagggaaatggggcagcgctggaatccctgcctcctccgccacctgtgcctcctgatgttgttccgatcaaagcagaatcggatgcgaagaagattgtacgacaccctatggcaaggcgtggtgttggaactaaagggcagaaggtaactatactcaccaatcacttcaaagtgagcgtggggagtactgatggacacttctaccattacagcgggatgcctacttgttcgccaatctttctttcaagataatcagaacaacttcacagacattggaggaggtgtccttggctgtagaggtttccattcaagtttcagagccactcaaggaggcctttcactaaatatcgatgtatcaactaccatgataattcaacctggtccggtagttgattttttacttgcaaatcagaatgctagagatccttactctcttgactggaacaaggcaaaacgggtgctgaagaatctgaggattaaagttagtccgtctaatcaagagtacaagattactggcttgagtgaacaactgtgcaaggatcagttgttctcaatgaagcagaaaaataccaaaaatgaaaatggtgaagctgagacactggagattactatttatgattattttgttaaccatcgcaacatacagttgcgttattctgctgatttgccatgtattaatgttgggaagcctaagaggccaacatatattcctattgagctttgctctttggtgtctttgcaacgctacactaaggcactatccactttccaaagagcttccctggttgaaaaatcgaggcagaagcctcaagaaaggatgaatgttttgtctaatgttttacgtaccagtaattatggtgctgaaccaatgctgaaatcttgtggtgttaatataaactctaatttcacccaagtggatggacgtattctgccagcaccaaggttaagagtcggcaacggtgaagatttctttccaaggaatgggcgttggaattttaacaacaagaaattggtggagccatctaggattgaaagatgggctgttgtgaacttctcggctcctcgttgtgatccaaacaacattgcaagggatttgattcgttgtggagaaatgaaaggaattcgtattgatcccccatttgatatattcaatgagatgaaccagaatagacgcctttcacccgtggttagagttgaaaaaatgtttgaacagatacaatctaaacttcctggagctccgcagttccttctttgtctgcttcctgataggaaaaactctgatctttatgggccatggaagcggaagaatctttctgagtatggcatcgtgactcagtgtatggcaccagctagggtgaatgatcaataccttacaaatcttcttctgaagatcaatgctaagcttggaggtcttaattcaatgctaactattgagcaaacaccttcaatccctatgatttcaaaggttccaactatcatccttggaatggatgtatctcatggctctcctgggcagtctgatgtgccgtcaatagctgcggtggttagctccaggcaatggccattgatttcccgctatagggcatcagtccgtacacagtctccgaagcttgaaatggtagattctcttttcaaaccagtttctgacaaagtggatgagggtatcatgagggaagctctcttagacttctatacaagttcagggaagaggaagcctgatcagatcattattttcagggatggggttagcgagtctcagttcaatcaagttttgaacaaagaacttgatcaagttattgaggcttgcaagttccttgacgagaattggaaccctaagtttgtggttattgttgcacaaaaaaaccatcataccaagtttttccagcagggatctcctgacaatgtgctacctggtactgtcattgacaacaaagtatgccatccgaagaacaatgatttttacctttgtgctcatgctggaatgatagggaccacaaggccgacccactatcatgttctcttagaccaggttgggttttcagctgatgatctgcaggagcttgttcattctctatcctacgtgtatcaaaggagcaccacagccatatctgttgtggcccctatttgctacgctcatttggcagcttcacagttggggcaatttatgaagtttgaggatgcttcagagacatcatcgagccatggtggggtgactgctccgggagcaatttctgttcctcagcttcccaggttgaaggataatgtcagcagctccatgttcttctgctgaaaaccgttgaaccatctttttgtatagggcttttggattttggctaccaaaaactatttatgctgctttttcaaagtagtctcagacttttgggttgcaacactcttaggtgtttcgtatgttatctgaacttatgaacggttgtctagctaaagctcacttctgcagtggcttttgtggcttttacctgtttggttttatactttgataaatatggttatggtttgctcttttgattataagttttctttttctagtttttttcattagttgagttgaagataaaacgagctctgatttcaaagtaccgtacattttaaattaaaacaggatataaaagaagagaaaagcaatg

SEQ ID NO: 406 - DNA, 3372 bp, Gossypium raimondii
  source 1..3372: mol_type = genomic DNA
aaaggtgtaaggcgcgatgtagaggagaaaaacattgtacttaacggagagaccaaaaagagtggcccttaaagtttttatattatttcactgtctttaatttttagtttttcgagtgagaggtaagtaaaaagagggagacacagacgggagccttgaacttcacatttctctttcatgttttagggtttctatccttgttttctctgtaaatttcagctgtcttcaagaatacgcttattttgctgcagatcgtctaatttctaggacatggactcgtttgagcaggatggaaatggggcggcacctgactctctgcctccacccccacctgtgcctcctgatgtggtgcctatcaaagcagaacctgaacctgcaaagaagaaggttgtgcgagtcccaatggccaggcgtggtcttggatctaaagggcagaagataactcttctcaccaatcacttcaaagtgaatgttggaagctctgatggacacttcttccattactgtgtttctctttattatgaagatggccgtccagttgatggcaagggtgttggaagaaaagtgatagagagggtgcaagagacctatggcaatgaattggctggaaaggactttgcttatgatggggagaaaagtttatttactgttggtgctcttccaaataacaagcatgagtttacagttgtacttgaggatgttacatctaacagaaacaacgggaatgcaagccctgatgtccacgatgactcaaatgggcaagacaggaagagaattaaacggccttatcagtcaaagacctttaaagtggagatcagctttgctgcaaagattcccatgcaagcgattcaaaatgctctgcgtggacaggaatcagaaaactcacaagaggccctaagggtgttggatatcattttacggcagcatgctgcaaaacagggatgtctactcgttcgccaatcattctttcaaaataatcctgataattttacagacattggaggtggtgtcctgggctgcaggggtttccattctagcttcagagcctctcaagggggcctttccctgaatattgatgtctcaactaccatgataattcgtcctggtcctgttgtggactttttgcttgccaatcagaatgctagagatccgtactccctggactggaccaaggctaaacgaagccttaagaacctgaggataaaggtcagtccatccaatcaggagtacaagatcactggattgagcgagcagttgtgcaaagatcagttgttttcattgaagcagaaaagcatgaagaatgataatggtgaagctgagaatctagagattactgtttatgattattttgtcaaccatcgcaacatacagttgcgctattctgcagacctgccatgcattaatgtcggaaagccaaaacggccgacatatattcctttggagctctgttccctggtgtctttgcaacgttacaccaaagcgctaaccactttccagagagcttctttggttgaaaaatcaagacagaagcctcaggaaagaatgacagtcttatccagtgctttacagaggagcaactatggtgctgagccaatgctgcgttcttgtggtatttctatcagcactaatttcacccaagtcgaaggtcgtgttctgccagcgccaaggttaaaagtggggaatggtgaagatttctttcctcggaacgggagatggaattttaataacaagaaattagtggagccaactaagattgaaagatgggctgttgtcaacttctctgcacgatgtgatacgaatagccttgtccgggatctgattagatgtggagacatgaaaggaattcggatagaccctccatttgatgtgttccaagagtccaatcagaacagacgttgctctcctttggttagagtcgagaaaatgtttgaggatatccaatctaaacttcctggagctccacagtttcttctttgtcttttacctgataggaaaaattctgatctttatggtccatggaagaagaagaatctttctgagtttggcatagtcactcagtgcatggctccaactagggtcaatgatcagtaccttacaaacctgcttctaaaaatcaatgcaaagcttggaggactgaattccatgctagcaattgagcaaacaccttcaattccagttgtttcaaaggttccaaccatcatccttggaatggatgtgtctcatggctctcctgggcagtccgatattccatcaattgctgcggtggtcagctccaggcagtggcctttgatttcccgctatagagcatctgttcgtacacaatctcctaagcttgaaatgatagattctctattcaaaaaagtgtctgacaaggaggatgaaggtatcatgagggaggttctcttggacttttatacaagttcaggaaagaggaagcctgatcaaattatcatattcagggatggagttagcgagtcacagttcaatcaagtattgaacattgaactggatcaagtaattgaggcttgcaaatttcttgatgagagttggaaccccaagtttgtggtcattgtggcacagaaaaaccatcatactaagtttttccagcagggatctcctgacaatgtcccgcctggaaccgttatagacaacaaaatctgtcatcctaagaacaatgacttctatctttgtgcccatgctggaatgattggaaccacgaggcctactcattatcatgttctcttagatcagattgggttttcggctgatgatctgcaggaactagtccactctctgtcgtatgtgtatcaaaggagcaccactgccatatctgtagttgctcctatttgctatgcacatttggcagccgcacaggtgggtacattcatgaagtttgaagatgcctcagagacaaactcgagtcatggtggagttaccgcacctggagccatttctgtccctcagctgccgaggttgaaggagaacgtctgcaattccatgttcttctgctgatcccccatgttttgtataggcttttggttgttaccaaaatgactgaaacgtttttaagttatatgaaagttaaaaaaagtagggttatcattgatgtggtggtggttgaaacatcaccccttttgggtgtttggccctgctgtttgtaggatctatgaaggtatgtttgactagcacttgttaaatggctttcgcctctgtaatacccgtaatcctgtttggtgataatcaatgcatagcctcagctatcgttaacttaaaacctgctttgtatgctgtggaacgtgggatatccatcatataagatgggatttgccctgagttgtatgaaaacagttataaatcaatgaaagcagagcc

SEQ ID NO: 407 - DNA, 3169 bp, Gossypium raimondii
  source 1..3169: mol_type = genomic DNA
cttggctttcaaaatttttcttcttgaaggaaaaaaaagaaaaagaaaataaaaactgtcttatttggctctcgaatccctcccattttccgccatggaagcaccttgagaaaccctaactggatccctttcacgttcttcgctaagctcaagcaaacggcaaatgggttctcttgtgcctttccaagacctcaatctctgcccggaaccaccgctaccagccaccgtgaacatctccacctccgccacacctagcgccaccatcaacaggacaaccaccttcaatttcttaacaccgaagattgaacctaagcaagagcctttcgacgaaccaacaccaacacagactattcaccaacaagaaaactttctcttctctgtttccaattctacccctgatttcatccctaatcccgaaactacccctccggctaacgcttcctcttcagccgatgaccaaaacgctctctactccgaatatttccgaatctccgagcttttccgctctgcttttgctaaaaggatacaaaaatacggcgatgtcgaagtacttgacccggattctcgggccatcgtacccgtacccgaacagtctcaactaacccccgaaactagcccaaccgacggttccaacctggaacgagctttatccgtcgtcgtttcgcgtaagaaggcgggaagatccaatgagctggttcgggttacgaatttgggaatcgatgaccagaggcattttcgtgaccttgttcgaagaacccgaatgatgtacgattccctccgcgttttagtcatttcggaggaagaaaagagaaccggaccgggaaacggtcgacgggctcgcggagatttgagggcagctgccgtcatgagggatcgagaactgtggttgaatcgcgataaaaggatagtgggtgcaatcccaggtattgaaattggtgatgtattcttctttagaatggagctttgtgtggtggggttacatggacaaattcaagctgggattgatacattgcctgctagccaaagctcgagcggagagccaattgcaactagcattattatttccggtgggtacgaggatgatgaagattccggtgactcgataatatataccggccaaggtgggcaagataaatttggaaagcaatgtatgcatcagaagcttgaaggagggaatttggcactagaaaggagtatgcattatgggattgaggtaagagtgattagagggtttaaatatgagaatcgagtttcgggcaaagtgtatgtttatgacggtttatataagattcttgattgttggtttgatgtgggaaagtcagggtttggggtttacaagtttaggttgtcgagaattgaagggcaacctgagatgggtagttcgataatgaagtttgctgagagtcttaggactaagcctttgtctactaggccaatggggtatttgactcttgatatttccatgaaaaaggagagagttccgatctttctttataatgatattgataatgatcatgatcctatgtattatgattaccttgtgaacactgtgttccctcttaatgtatttggtcaagggagtaatagtactggatgtgattgtgtttcggggtgcacggaagggtgtttctgtgctatgaagaatgggggtgattttgcttatgattatggtggaattctcttgagagggaaaccggtgatatttgaatgtggaaacttctgtcaatgcccaccatcttgtcggaaccgtgttgcacaacatgggcttagaaacagattggaaatatttaggtcaagggaaacgggttggggagtgaggtccttggacttgatacaagcaggtgcttttatatgtgaatatgcaggggttgttctcacaagggaccaagcggaagttttcaagatgaacggtgatactttgatttaccccaatcgtttttctgaacgatgggccgaatggggggatttgtctaggatatttccagagtacgtgtgtccatcatatccctcaatcccacctttggattttgcaatggatgtatcaaggatgaggaatgctgcttgttatattagccatagttccagtccgaatgtgctggtgcagtgtgtgttgtatgatcacaacaacttgatgttccctcaccttatgctttttgcaatggagaatatccctcctatgagagagcttagcatagattatggtgtagccgacgaatggactgggaagctttctatctgtaactaaatatcttaagaggaatattttggattttgatgtggtgcagccgggcagtgagacatgataaactgagtctagttgcctgccatgcctgtttgtaggagctaggaatgttattcctttgtgcaacttcatggtgtatacctcaagtagtcagccatatgcaggaggatggaacatttggcacttatagttctaaatgaatgcagttgcttatctcctaagtgcatgttttgttctccagagcaatgtactttctttttttttttgtaatatatatgttgttgtattagcccacatcttgtttcgccttccctgtccaactctactgtttatgtctgcctcaattctatgaatttattcttttcaattgttcctgctcgtaaattttaagtgccgtgatcaacaaagttgttatttggttagttcattattggattcttccttgactagccaaacaggtcattcggttttacaagagtttgtgacaaattgatttgtcatctgtaagggaggactttagctgaaggtagcctcataaagtttaaacaaaatttgagtgtttaaagcttcagtactgcttaagaaacatagggttttatgcaacagccttttccaccctgaataatgccattggcaatgtgctattgttactttgttttgattccttgtcctagaattttttgaatctctacaaagttattcatagattagaacaaatcttcatcagttgccttatgagtaaaatgccataggcttgtatctcatgtttatcataaactatctgtttaaaagccataggaacgtgcttatattcagatcttttcctgtttactaagttgatgctataattaaccacatatagtattagagattccacatgttctgttaatttggaaagtgagctgtcgtaaaacgtctgataccggg

SEQ ID NO: 408 - DNA, 2217 bp, Gossypium raimondii
  source 1..2217: mol_type = genomic DNA
atggtcattttttgtgaagaactgaatagactgaattcgatcgatcctttactcggaattactaatatggccaacgaattagcatttgatctgatctatggagttggtgacgagaaggatattttcgagctttcatatgctacatttgctgaagagttgcagctccaggagatcctgaaggagtccatgatgggttctgaaaaggagctggaagatgcagctagtgaagccaaccagaaacttgagtgtcttgtcagccatggattatccaacacggaatgtgctatctcccatgtctcagagattcatgagcctcagtcgttcaataaacaggggtcagcaagatggcgtccccagcagaggtttggttacattgagcaacagaggataaactgggatgacaaaggaagagaccgtttcaggtggaggaaacctacagggtggcacaacattaggggaagaagggtgggagatgttcctcaaaccagttccagcaaggaatttcatgcaaaaaccagttcctggggtgaaggcagtcctcttgttggcactggtaatattgaagatcctaagggtaaaggcaaagccatagatgatggctggttgctggtctccaaatggaaatccgaaagcaggggtggaaacagtgttgacaaacagcaggttgatctcgggcatcctaatcatttaaagggttcaaaagatgacgacacaagtgctgttcacgaagatgattgcgagtccttggatgatgaggatgactttgattccgatgatagtcaaaagagctacgagagtcgcaagaagagtaaatggtttaaggaattttttgagagaatggacgccttgaatgcagaggagattgatcaaaccctgtggcactgtccagcatgccaaggtggtccaggtgccatcaaatggtacagaagcattagtgacctgatagcacattccaaaaagattggatcgagaagggtgaagttacatcaagagctcgcgatgcttctagaaggggagttgtgcattaggggaacatcagtttctcctcctgctgacccaattgttggtacttggaaaggtttaaaagaggaggcaagagatcatcaagtagtttggcctcccatggttgtcattatgaacacaatgacaagcaattcaaaggatggaaagtttgttggcatgggaagtcatgagcttcttgagcacttcagctcgtttcctgctttaaaggctcaacattcctatggtcctcaaggtcaccgtggtttgagcgtcttgatctttgagagctcggcggtaggttatttagaagccgaacgactgcatcagaattttttggaccaaggattggataaatttgcttggaattcttgtacaaacgaagtcctgccaggaggagagcgccaactttatggtttcatggcagtgaaagaggacctggattgcttcaaccagcattgccaaggtaaatcaaagctcaaatatgagctcaaatcatatcaagaagcggttctgaatgaaatcaagaaaatgagggaggatagccagcaacttatccggctcaaggataagcttgaagaagaaataaaacgagcaaaaactcttgaaagatcagtcgatgatctaagtaggaacctgcaacagagaatgaaggacatctgcatatttgaacgaagggtcaaatcactgcatgaagataacaaagaagaggtggaatcccaggagatcttttataaggatcaaattaaaattctggaagcaagagtgaaagagcttgatcacaagttgaaggaatctggcgcaagtcctttacatacaggggaacctgaacctgccatgtccggcctattggaggaggagcacactccatatcagtacaacagcaacctcggcattgatgaagattcaagtttggagaatggaaagcttccaagcaaatccaatgaaaatggagattgaaaacattcaaaccaccagcttttaagactttactgcaactcataaagtaatatcagtgtaggattatatatccctgtggatgcgttgtagggttgggtgctatttgtttataagaaccaactattatttcataatttcttcatgataattacatgggtactttatgtttattaaaaaaaagtttttttgatacaatattgagggtaaggatgagaatcacatgatttaaattcgcatgttgtatcaaatggatatcca

SEQ ID NO: 409 - DNA, 2251 bp, Gossypium raimondii
  source 1..2251: mol_type = genomic DNA
aacatattattacaagtttaccctttttaatatatataattaaaaagaaacctcatttctagtttcccttgtctacatgcatctctcatgaatcacgcgagtattgattgtgtcagcgccgtgtccgattcgtgtttgatttctttcgttccgtttcccggcgtttcagacaccggtacgagggtttccagcattagtgctttaaagattggagaatgagttcgagaaaaggaggatcaaaagggaaagaggtatctggagtctctcgtcccaaggttgaccagctaagccatggtgtagcggaaatgaacatggattcttcacaagatgatggtgagtgggaagttattcaaagaaaacccaagaatacaggtggaagcagtggtgcaaagccatggggttctcaaaattccaaccctaaaccttggaatggaggcatgcggggtaatgctggacctggaagaggcaccggcggcaatgcttgggctaatcatggtgctgattctaggatagcaagtggccgagggaattcaaggccccaaatagtcaacaagagcttggacaaccaccaagtgccttccaatcctgtcattcgcccgcctcttgagcatggttggaattggcagtcaagaactggttccaatccatccaagggttttcaagatggatatgagaaagacaatgtcaacgctgaggctgaaaaagacaacgatgttgatgatattgaggatgattcggatgatgttgctgctgatgattctgacaatgagcttctaaccgatgaatttgattcagattcaagtcaaaagagccacgagacaagaaagaaaaatagatggtttaagaagttttttgatagtttagataagttgcgcgtggaagagatcaatgacccagcaaggcaatggcattgcccggcttgccaaggcggtcctggtgccattgactggtatcgaggccttcagccattagggacacatgcgaaaactaaaggatcaaaaagggtgaaactccatcgtgaacttgctgagctcttggatgaggaattgcgtagaaggggtacttcagttatccctgcaggtgaagcttttgggaaatggaggggtttaaaagatgacgaaaaagatcatgaaatagtctggccacctatggtaatcataatgaatacaaggcttcaacaagatgataatgataagtggattggtattgggaaccaagagctgcttgactatttcagctcatatgctgccgtgaaggctcgccattcatatggcccacaggggcatcgtgggatgagccttctgatttttgagagcacagcaagaggttatttagaagctgagcgtctgcataagcattttgctgagcaaggaacggatagagaggcttgggaacaccgtcaggtcttattttatccaggtgggacgcgccaactctatggttacatggcaaacaaggaagatctggacatcttcaaccaacattctcaaggaaaatctaagctcaaatttgagatgagatcttatcaagagatggttgttaatcaaatcaggcaaatgagcgaggccaaccaggagcttattttttacaagaacaagtttgctatacagcaaaggctcaaaactgcccttgaagagtcttttggtgttgtgagcgaaaagctccggaagacaatggaggagaacaggattgtgagacagagaaccaaaatgcagcacgaacagaacaaggaagagatggatttccaagaacaattcttcaaggaacaaatcaaatttattcatgaagcaagggatgaggaggaggagaagtttgagaagctacagcagcaacagcgtgagaagtttgtcaagcaatctactcctaatacttcaaatacagaggaatacaggcgtagggcggatgaaattgcaaaattcataaagctccaggacgaagagatggaagcttttgtgtctgagagggacaagctgattaccgtacacaaagagaagatggctgcaatgagacagaggcattggcaggaagaagttgagctcgaaaaggagtttgatacggaattgagccgtctcatggagaagtatactcctactatgcctggaatggacaaatatatatattaaaattgttttctacatagattaaatttgattaaaatatgggcgagacttctgagttcgattcaatagcatataaaacttaatattataataatataatactaaaatataaacattaaaaatatccgttg

SEQ ID NO: 410 - DNA, 1606 bp, Gossypium raimondii
  source 1..1606: mol_type = genomic DNA
aacatattattacaagtttaccctttttaatatatataattaaaaagaaacctcatttctagtttcccttgtctacatgcatctctcatgaatcacgcgagtattgattgtgtcagcgccgtgtccgattcgtgtttgatttctttcgttccgtttcccggcgtttcagacaccggtacgagggtttccagcattagtgctttaaagattggagaatgagttcgagaaaaggaggatcaaaagggaaagaggtatctggagtctctcgtcccaaggttgaccagctaagccatggtgtagcggaaatgaacatggattcttcacaagatgatggtgagtgggaagttattcaaagaaaacccaagaatacaggtggaagcagtggtgcaaagccatggggttctcaaaattccaaccctaaaccttggaatggaggcatgcggggtaatgctggacctggaagaggcaccggcggcaatgcttgggctaatcatggtgctgattctaggatagcaagtggccgagggaattcaaggccccaaatagtcaacaagagcttggacaaccaccaagtgccttccaatcctgtcattcgcccgcctcttgagcatggttggaattggcagtcaagaactggttccaatccatccaagggttttcaagatggatatgagaaagacaatgtcaacgctgaggctgaaaaagacaacgatgttgatgatattgaggatgattcggatgatgttgctgctgatgattctgacaatgagcttctaaccgatgaatttgattcagattcaagtcaaaagagccacgagacaagaaagaaaaatagatggtttaagaagttttttgatagtttagataagttgcgcgtggaagagatcaatgacccagcaaggcaatggcattgcccggcttgccaaggcggtcctggtgccattgactggtatcgaggccttcagccattagggacacatgcgaaaactaaaggatcaaaaagggtgaaactccatcgtgaacttgctgagctcttggatgaggaattgcgtagaaggggtacttcagttatccctgcaggtgaagcttttgggaaatggaggggtttaaaagatgacgaaaaagatcatgaaatagtctggccacctatggtaatcataatgaatacaaggcttcaacaagatgataatgataagtggattggtattgggaaccaagagctgcttgactatttcagctcatatgctgccgtgaaggctcgccattcatatggcccacaggggcatcgtgggatgagccttctgatttttgagagcacagcaagaggttatttagaagctgagcgtctgcataagcattttgctgagcaaggaacggatagagaggcttgggaacaccgtcaggtcttattttatccaggtgggacgcgccaactctatggttacatggcaaacaaggaagatctggacatcttcaaccaacattctcaaggaaaatctaagctcaaatttgagatgagatcttatcaagagatggttgttaatcaaatcaggcaaatgagcgagttcgattcaatagcatataaaacttaatattataataatat

SEQ ID NO: 411 - DNA, 2149 bp, Gossypium raimondii
  source 1..2149: mol_type = genomic DNA
aacatattattacaagtttaccctttttaatatatataattaaaaagaaacctcatttctagtttcccttgtctacatgcatctctcatgaatcacgcgagtattgattgtgtcagcgccgtgtccgattcgtgtttgatttctttcgttccgtttcccggcgtttcagacaccggtacgagggtttccagcattagtgctttaaagattggagaatgagttcgagaaaaggaggatcaaaagggaaagaggtatctggagtctctcgtcccaaggttgaccagctaagccatggtgtagcggaaatgaacatggattcttcacaagatgatggtgagtgggaagttattcaaagaaaacccaagaatacaggtggaagcagtggtgcaaagccatggggttctcaaaattccaaccctaaaccttggaatggaggcatgcggggtaatgctggacctggaagaggcaccggcggcaatgcttgggctaatcatggtgctgattctaggatagcaagtggccgagggaattcaaggccccaaatagtcaacaagagcttggacaaccaccaagtgccttccaatcctgtcattcgcccgcctcttgagcatggttggaattggcagtcaagaactggttccaatccatccaagggttttcaagatggatatgagaaagacaatgtcaacgctgaggctgaaaaagacaacgatgttgatgatattgaggatgattcggatgatgttgctgctgatgattctgacaatgagcttctaaccgatgaatttgattcagattcaagtcaaaagagccacgagacaagaaagaaaaatagatggtttaagaagttttttgatagtttagataagttgcgcgtggaagagatcaatgacccagcaaggcaatggcattgcccggcttgccaaggcggtcctggtgccattgactggtatcgaggccttcagccattagggacacatgcgaaaactaaaggatcaaaaagggtgaaactccatcgtgaacttgctgagctcttggatgaggaattgcgtagaaggggtacttcagttatccctgcaggtgaagcttttgggaaatggaggggtttaaaagatgacgaaaaagatcatgaaatagtctggccacctatggtaatcataatgaatacaaggcttcaacaagatgataatgataagtggattggtattgggaaccaagagctgcttgactatttcagctcatatgctgccgtgaaggctcgccattcatatggcccacaggggcatcgtgggatgagccttctgatttttgagagcacagcaagaggttatttagaagctgagcgtctgcataagcattttgctgagcaaggaacggatagagaggcttgggaacaccgtcaggtcttattttatccaggtgggacgcgccaactctatggttacatggcaaacaaggaagatctggacatcttcaaccaacattctcaaggttctctcctactgaagacaatggttatttgcatgcagggataaactgcgagataactttattgcacgaaaagtttctttattattttctgccgattcttatgcatttaattcacttgtgtgtaaatgttatgttgattaggaaaatctaagctcaaatttgagatgagatcttatcaagagatggttgttaatcaaatcaggcaaatgagcgaggccaaccaggagcttattttttacaagaacaagtttgctatacagcaaaggctcaaaactgcccttgaagagtcttttggtgttgtgagcgaaaagctccggaagacaatggaggagaacaggattgtgagacagagaaccaaaatgcagcacgaacagaacaaggaagaggtaattgttttagtttctgataatttacatctaaatgcagatgcaagctagtggctttcttcacagatttgttgctagatgtaatggttgtggcgtactaattactaatttataccatagaacataacttcattttagtaagttactggttgatcatatctttgcaaccatatttatcttaactagccagggatgaatatgaaaactttgctagtatctttatatgtttgctatgcttatacatctgtgatcttatttttggatataaaaat

SEQ ID NO: 412 - DNA, 2539 bp, Gossypium raimondii
  source 1..2539: mol_type = genomic DNA
tctcaacaatgcgcgtgcaacacaaatctccttcttgcactcagctatttttatggtcctcactctccattcacttctacaccactgccttttctctgcaggtatctccttctctctcgtggctcttacgattatcagtgatctaggactagaaagcgtttgaaagatcttaatggcagatgctactgattcatttcctgacttgcggagtgtgtataaaagttctggtcaccaagttaatcgcctaagtcagaatgtggcaaacatgaagctagcttctgcgcaagatggtgaaaaggagaactcattgggatccaataacaaaggtgctgaaaatgttgggtttcctcaagattctacccctaatgtatggggacatccgaatgtgattcagaaacttaggatgcaaggtaatcttggttcagaaaaggttactcacaaagcctggccaactcaaaatgctgtttctaggacgcaacaaggtgatagaacatggggaaatagtagtataaaatctccatcctcagagtatggaaggaatgaccctgatcaagctggttttactttctctaataattcttgggatggtcaaattaaaaccgaccatgaagtgggtgataagttggatgatgaaattggagataatgaaaatgttgatgatgaatatggtaatggtgtctctaatattgagtacgatagtgatgatatcgatgattatgtttccggttcagatgaagatgagaagagccatgaagcacgcaaggagagcaagtggttctattttttttttgaaagtttagagaaactgacagttgaggagattctttctccggttcggcggtggcactgtccagcatgtcaaggtgggccaggagccatcaactggtaccgaggtgtgcaacccttattgactcattccatgactaaaacaacacggagagctaagctgcatcgtgtatttgctggacttttggttgaggagatgcgcaggagaggagctttcattaaaccagtcaatgatgcatttggcaggtgggaagggctgactgatagagttgcagatcacgagatagtttggcctccaatggttatcattatgaatacaagatatgaacaggatgaaaacggcaagtggattggaatgggaaatcaagaacttctcaattacttcagctcgtatgctgcagtaaaagcaagacactcatatggtccacaagggcatcgggggatgagtcttctgatctttgagagctcagcagcgggatatttagagactgcacgcctgcataagcattttaaggagcaagggagggatagggatgcttgggattgttcacgggttccattctgtccaggtggcaagcgccaactctatggctacattgccatgaaagaagatctggatttatttaaccagcactctcaaggaaagtccaagctgaaatttgagacgaggtcatatcaagagatggttgagagtcagataaagaagataaatgatgatagtcagcagcttaacctacttaaaaagaaggttgctcaagagcagcagcactcacaagtccttgcagagtctctaggacgattgagtgagaagctgcgccagacgacagaggaatatggtatcatgaggcagcaaactagattgcagcatgagcagaacaaagaagagttgggcgccaaagaacagtattttaaggagaaaattaatgttatttaccaagccataaagttgaaggaagataattttgagaagctgcagagggcagcgagggagagagttgagcggtcaaatgcaactctgataaataatgaagatcagcacagtgctactgagttggaggaaaactcaaggtccataacaatccaggagaagaagatggaggaattcgaggcagagagggagaagctaatgaaaagtcatcaagatggaagattggcaatcacacagcggtactgggaagagctgattgagcttgaggaagggtttgaaaaagaattgaccctgcttatgggaaagtacaaccccgatcgcctcgaggaagagactactgacagccttgaaggacgagacaagagaggagcaagagatattgaaacagaatagacaacaatgatcctatttgtcgagggtaagaagcagcatattatgttttgggtaaaaggtatacaccagttttattaccaaagatacttcagttttggatatagagggctaaaagtgaagcctttctggatcggtacaaacattggaataatgaaacttcaagtgctttattattattattgaacatacatagctgaggattcttttgtgtttaagctgtcttgcaatgacaatttttgcagtggcatatatgtttgatgattcgatgtctgaatttccatgcaaaaagaaaacatttttgtttgctaagaaatcgacaaaaaaattggggtttctgcagatttgctctctctctctctctaatattttttcaacaagttaactaaatatagaaattgggttttgtccatgcagaaaacctgctaatattgt

SEQ ID NO: 413 - DNA, 2542 bp, Gossypium raimondii
  source 1..2542: mol_type = genomic DNA
tctgcaggtatctccttctctctcgtggctcttacgattatcagtgatctaggactagaaagcgtttgaaagatcttaatggcagatgctactgattcatttcctgacttgcggagtgtgtataaaagttctggtcaccaagttaatcgcctaagtcagaatgtggcaaacatgaagctagcttctgcgcaagatggtgaaaaggagaactcattgggatccaataacaaaggtgctgaaaatgttgggtttcctcaagattctacccctaatgtatggggacatccgaatgtgattcagaaacttaggatgcaaggtaatcttggttcagaaaaggttactcacaaagcctggccaactcaaaatgctgtttctaggacgcaacaaggtgatagaacatggggaaatagtagtataaaatctccatcctcagagtatggaaggaatgaccctgatcaagctggttttactttctctaataattcttgggatggtcaaattaaaaccgaccatgaagtgggtgataagttggatgatgaaattggagataatgaaaatgttgatgatgaatatggtaatggtgtctctaatattgagtacgatagtgatgatatcgatgattatgtttccggttcagatgaagatgagaagagccatgaagcacgcaaggagagcaagtggttctattttttttttgaaagtttagagaaactgacagttgaggagattctttctccggttcggcggtggcactgtccagcatgtcaaggtgggccaggagccatcaactggtaccgaggtgtgcaacccttattgactcattccatgactaaaacaacacggagagctaagctgcatcgtgtatttgctggacttttggttgaggagatgcgcaggagaggagctttcattaaaccagtcaatgatgcatttggcaggtgggaagggctgactgatagagttgcagatcacgagatagtttggcctccaatggttatcattatgaatacaagatatgaacaggatgaaaacggcaagtggattggaatgggaaatcaagaacttctcaattacttcagctcgtatgctgcagtaaaagcaagacactcatatggtccacaagggcatcgggggatgagtcttctgatctttgagagctcagcagcgggatatttagagactgcacgcctgcataagcattttaaggagcaagggagggatagggatgcttgggattgttcacgggttccattctgtccaggtggcaagcgccaactctatggctacattgccatgaaagaagatctggatttatttaaccagcactctcaaggaaagtccaagctgaaatttgagacgaggtcatatcaagagatggttgagagtcagataaagaagataaatgatgatagtcagcagcttaacctacttaaaaagaaggttgctcaagagcagcagcactcacaagtccttgcagagtctctaggacgattgagtgagaagctgcgccagacgacagaggaatatggtatcatgaggcagcaaactagattgcagcatgagcagaacaaagaagaggtagcatttttaaaactttgtattcctttacttttattgccaatcatggttgccaagttaggacaagaagggtgccctgggaccaccttctccatgtttcactatttggtaaaatggtgatcatactcagtggatgctattactgttgtcatgttgtttcttaataacttgtagggaggctgaacttaagttgggcgccaaagaacagtattttaaggagaaaattaatgttatttaccaagccataaagttgaaggaagataattttgagaagctgcagagggcagcgagggagagagttgagcggtcaaatgcaactctgataaataatgaagatcagcacagtgctactgagttggaggaaaactcaaggtccataacaatccaggagaagaagatggaggaattcgaggcagagagggagaagctaatgaaaagtcatcaagatggaagattggcaatcacacagcggtactgggaagagctgattgagcttgaggaagggtttgaaaaagaattgaccctgcttatgggaaagtacaaccccgatcgcctcgaggaagagactactgacagccttgaaggacgagacaagagaggagcaagagatattgaaacagaatagacaacaatgatcctatttgtcgagggtaagaagcagcatattatgttttgggtaaaaggtatacaccagttttattaccaaagatacttcagttttggatatagagggctaaaagtgaagcctttctggatcggtacaaacattggaataatgaaacttcaagtgctttattattattattgaacatacatagctgaggattcttttgtgtttaagctgtcttgcaatgacaatttttgcagtggcatatatgtttgatgattcgatgtctgaatttccatgcaaaaagaaaacatttttgtttgctaagaaatcgacaaaaaaattggggtttctgca

SEQ ID NO: 414 - DNA, 2333 bp, Gossypium raimondii
  source 1..2333: mol_type = genomic DNA
gttcttccttggaaaagaagagtaacgtttggtctagtacttttaatgttgggacgttttactgtggaaattaaaaccacatggatagcttttatgcatcattaatccctcaacaactgagcatatatgtgatatttcttgtatatgtactgatataactaagcttcttgttgtaagaaaatcaccaatcttttcattcaatacagtgatctaggagtagatttcatggcagatgctactgacccatttcctgacttgggaagcgtgtataaagtttccggtcgttgtcaagtaaaccgggatgtagctgacatcaagcttgcttcttcagtggatggaagggagtctaaaaaccgagttgctgcaaattccgggttacataaagattctacatctaatgtatggggacatccaaatttgattcagaaacttaagatgcaaactacttccaatgtcaggccaactgtggatggttcttgtttgagttcgagaagacatggtagtgcatcgacccaacaaggtgctggaacttgccctgttcaagctggtttcactttgcctaacagttcagaaaatagagttgatgaatatgataacaatgaccctgatgttgtgtatgataacgatgatttggatgactatgacttcgattttgatgaagacgagaagagtcatgaagcacgcaagaagagcaaatggttcaatgcattctttgaacgtttagagaaattgactgttgaggagatcatttcaccagctcagcaatggcactgccctgcatgtcaaggtggaccgggagccattgattggtatcgaggtgtacagcctctaatgactcattccatgactaaaatgacacggagagctaagatgcatcgtgtattcgcggaacttttggtcgaggagatgcgtaggagaggaactttcattaaaccggccaacgatgctgttggcaaatgggaagggcttaatgttagagttgcagatcatgaaatagtttggccaccaatggttatcattatgaatacaaaatatgaacaggacgaaaccggcaagtggagtgggatgggaaatcaagagcttctcaattacttcagctcatatgctgcgataaaagcgagacattcgtatggtccacaaggtcaccgcgggatgagtgtgttgatctttgagagttcagcagcagggtatttagaggctgttcgtttgcataaacattttaaagaacaaggaagggatagggatgcttgggatcattcacaggtcccattctgtcctggtggaaaacgccaactttacggctacattgccatcaaagaagacttggatgtatttaaccgacactctcaagggaattccaagctgaaattcgagctgagatcataccaagagatggttgagagccaaataaagaagataaacgacaatagtcagcaacttacccgacttaaaaagaaggttgctcaagaacagcaacattcacaagtccttgcagagtctctaggccgattgagtgagaagctccaccagacaatagagccgaaaaatcatatcgtgaggcaacgagctatattgcagcatgaacagaacaaagaagagttgatagctaaagaacaatatttcaaggagaaaatcaatactatttaccaatccatagactgtaaggaagataatttcgagaagctgcaaagggctgcaagtgagagagttaagcaatcaaatatgaatccgatacatgataaagatgaatgcagtgccattgagcttcatgagaaaaacataggagagttcaatgcagagagggagaagctgatgaaaagtcgtcaagatagaaggttaacaatcacactacggtattgggaagatcttgtcaagctcgaggaagggtttgaaaaagaatttaccttgcttatggaaaagtacacccacagaatattgcattgaggaacaatagaccactaaatagacaagacatgaacaagagataaggaaatagaagacacaataccaccatgaccattaccattggcacagtgaacagaagcaagacaaacacttgtttgataggtaaatataaaccagttttgttacttgatacacgtttaagttttggaaagagaaaaatggtttatgagggagggaagtttgggtttcatggtgaacactgaaatagtgaaacttcaagtaatgttttttatgcatttttgtttcagatttttggcatttgcccatggtattgtcaacttcaccataaattttttattgtgattttatttatacaataaaatctatactactatatatgtatacatcaaaaaatagttggaaaaagt

SEQ ID NO: 415 - DNA, 2088 bp, Gossypium raimondii
  source 1..2088: mol_type = genomic DNA
cgctcttcaaactctatcctgtgatctaggagtagatttcatggcagatgctactgacccatttcctgacttgggaagcgtgtataaagtttccggtcgttgtcaagtaaaccgggatgtagctgacatcaagcttgcttcttcagtggatggaagggagtctaaaaaccgagttgctgcaaattccgggttacataaagattctacatctaatgtatggggacatccaaatttgattcagaaacttaagatgcaaactacttccaatgtcaggccaactgtggatggttcttgtttgagttcgagaagacatggtagtgcatcgacccaacaaggtgctggaacttgccctgttcaagctggtttcactttgcctaacagttcagaaaatagagttgatgaatatgataacaatgaccctgatgttgtgtatgataacgatgatttggatgactatgacttcgattttgatgaagacgagaagagtcatgaagcacgcaagaagagcaaatggttcaatgcattctttgaacgtttagagaaattgactgttgaggagatcatttcaccagctcagcaatggcactgccctgcatgtcaaggtggaccgggagccattgattggtatcgaggtgtacagcctctaatgactcattccatgactaaaatgacacggagagctaagatgcatcgtgtattcgcggaacttttggtcgaggagatgcgtaggagaggaactttcattaaaccggccaacgatgctgttggcaaatgggaagggcttaatgttagagttgcagatcatgaaatagtttggccaccaatggttatcattatgaatacaaaatatgaacaggacgaaaccggcaagtggagtgggatgggaaatcaagagcttctcaattacttcagctcatatgctgcgataaaagcgagacattcgtatggtccacaaggtcaccgcgggatgagtgtgttgatctttgagagttcagcagcagggtatttagaggctgttcgtttgcataaacattttaaagaacaaggaagggatagggatgcttgggatcattcacaggtcccattctgtcctggtggaaaacgccaactttacggctacattgccatcaaagaagacttggatgtatttaaccgacactctcaagggaattccaagctgaaattcgagctgagatcataccaagagatggttgagagccaaataaagaagataaacgacaatagtcagcaacttacccgacttaaaaagaaggttgctcaagaacagcaacattcacaagtccttgcagagtctctaggccgattgagtgagaagctccaccagacaatagagccgaaaaatcatatcgtgaggcaacgagctatattgcagcatgaacagaacaaagaagagttgatagctaaagaacaatatttcaaggagaaaatcaatactatttaccaatccatagactgtaaggaagataatttcgagaagctgcaaagggctgcaagtgagagagttaagcaatcaaatatgaatccgatacatgataaagatgaatgcagtgccattgagcttcatgagaaaaacataggagagttcaatgcagagagggagaagctgatgaaaagtcgtcaagatagaaggttaacaatcacactacggtattgggaagatcttgtcaagctcgaggaagggtttgaaaaagaatttaccttgcttatggaaaagtacacccacagaatattgcattgaggaacaatagaccactaaatagacaagacatgaacaagagataaggaaatagaagacacaataccaccatgaccattaccattggcacagtgaacagaagcaagacaaacacttgtttgataggtaaatataaaccagttttgttacttgatacacgtttaagttttggaaagagaaaaatggtttatgagggagggaagtttgggtttcatggtgaacactgaaatagtgaaacttcaagtaatgttttttatgcatttttgtttcagatttttggcatttgcccatggtattgtcaacttcaccataaattttttattgtgatttta

SEQ ID NO: 416 - DNA, 2268 bp, Gossypium raimondii
  source 1..2268: mol_type = genomic DNA
tgtactactaaatgtcgattttatgacatcttactataggattgtgttagaggatgagttcaagaaaagggaatgggaatccttttgtttctggtggtattaacaacccatcgtccaaggggaaagacatatctggatcctctagctccaaggttgagcagctaagccagggtgtagcagacatgaacctgggtttgcctcaagacgatggtgagtgggaggttattcaaaggaagcctaagaatagaactggaagcagtgctgcaagaccttggggtcctcaaaattccaatggtaaaccgcggggagcgatgcggactaatgctgtatcaggaagagcctctggcaatgcttgggatgctcataatactgattctaggatggcaactggcagaggaaatgcaagaccccaaacatgcaacaaggctattgagaacaacaatgtgccaccacatcctgtcattcgcccaccccttcagtatggatggaattggcaatctagaactggttccaatccatcgggggggttacaagatgatcatggaaaaaacaatgtcaacactgaggttgaagaggtcaatgatattgatgatgttgaggatgactcggatgataatgctattgatgattctgatgatgaacttctaaccgatgactttgattcagattcaagtcaaaagagccacgagacaagaaagaataatagatggtttaagaagtttttctcgagtttagatgcattgagaattgaggaaatcaacgacccagcaaggcagtggcactgcccagcatgccagggtggtcctggtgccattgactggtataggggccttcagcctctgatgacacatgccaaaacaaaaggagcaaaaagggtgaaactccatcgtgaacttgctgaactcttggatgaggaattgtgtagaaggggtacttcagttattccttcaggtgaagcttttggcaaatggaagggtttaaaagatgaagaaaaagatcatgaaatagtctggccacctatggttatgataatgaacacaaggctggaacaagatgagaacgataagtggattggtatgggaaaccaagagcttcttgattatttcagctcatatgctgctgtgaaggctcgccactcgtatggtccacaggggcatcgtgggatgagtgttctgatttttgagagcacagctaggggttatttagaagctgaacggctacataagcattttgctgagcaaggaacgcatagggaggcttgggaacgacgtagggtcttattttatccaggcgggaagcgccaactttatggttatatggctatgaaggaagacctagacagcttcaaccagcattctcaaggcaaatctaggctgaaatttgagatgagatcctatcaagagatggttgttaagcagatcaggcaaatgagtgaggacaaccagcagcttattttttacaagaacaaggttgcaaaagaacaaaggcaaaaagttgctcttgaagagtcttttggtattgtgagtgagaggctccggaagacaatggaggagaacaggattgtaagacaaagaaccaaaatgcagcatgaacagaataaagaagagatggatttccaagagcaattcttcaaggaacgaatcaaatttatccatgaagccagggatgagaaggaagagagttttgagaagctgcagcagcaacagcgtgagaaggtcaagcagtctaaccccaatccttcaaatacagaggaatacaggcgcagggcggatgaaattgcaaaattcataaagttccaggatgaagagatgcaggcttttgtggcagagagggacaagctgatcaaagcacacgaagagaagatggttggcatgagagagaggcattggcaggaagaagttgagcttgaaaaggagtttgatgctgaattgagccacctcatggagaagtacactccggatggctcaaaagtcaaccccggcaatacttgattgtggaattgtaggggaatgcgatggtatgtacacatgtggtaaaaaagactttaatctctctgttccctgaggaaacttctgtgatgacactgaatatttctccatcttgagttacaactcctaaaatagtatgttaaaagattggaatatatgggtaaaaaaaagttaaatctaaagttgcatctatggtttattatgcttgtgttgtttgcttagacatggttcaaataagaacttggaatgaatctacgatttctttcctaatatgttgcaa

SEQ ID NO: 417 - DNA, 2778 bp, Gossypium raimondii
  source 1..2778: mol_type = genomic DNA
atgctttccagatactagctaacccaaaaactttcctgctcatttcattttccaagccgacactcactctccactctcatactgtcgctactctgctctactccacaaccctgtctcgccttaccggccccgcacctccacacgctctatgcttacactgcgccccctgcgtctaccctattattagaggtaaatttattggcttttcactgtttttgtgaggtaaccctagttttttttttcttagatgtggggtaaattattttctgagtttcttaattatattgcttggttttttatttaacggtttctctgtctcattatggcattgttgttgttattgttgccgctgcagttcgtgctatcatttttgctgttgctctcatttttttttacaggattgtgttagaggatgagttcaagaaaagggaatgggaatccttttgtttctggtggtattaacaacccatcgtccaaggggaaagacatatctggatcctctagctccaaggttgagcagctaagccagggtgtagcagacatgaacctgggtttgcctcaagacgatggtgagtgggaggttattcaaaggaagcctaagaatagaactggaagcagtgctgcaagaccttggggtcctcaaaattccaatggtaaaccgcggggagcgatgcggactaatgctgtatcaggaagagcctctggcaatgcttgggatgctcataatactgattctaggatggcaactggcagaggaaatgcaagaccccaaacatgcaacaaggctattgagaacaacaatgtgccaccacatcctgtcattcgcccaccccttcagtatggatggaattggcaatctagaactggttccaatccatcgggggggttacaagatgatcatggaaaaaacaatgtcaacactgaggttgaagaggtcaatgatattgatgatgttgaggatgactcggatgataatgctattgatgattctgatgatgaacttctaaccgatgactttgattcagattcaagtcaaaagagccacgagacaagaaagaataatagatggtttaagaagtttttctcgagtttagatgcattgagaattgaggaaatcaacgacccagcaaggcagtggcactgcccagcatgccagggtggtcctggtgccattgactggtataggggccttcagcctctgatgacacatgccaaaacaaaaggagcaaaaagggtgaaactccatcgtgaacttgctgaactcttggatgaggaattgtgtagaaggggtacttcagttattccttcaggtgaagcttttggcaaatggaagggtttaaaagatgaagaaaaagatcatgaaatagtctggccacctatggttatgataatgaacacaaggctggaacaagatgagaacgataagtggattggtatgggaaaccaagagcttcttgattatttcagctcatatgctgctgtgaaggctcgccactcgtatggtccacaggggcatcgtgggatgagtgttctgatttttgagagcacagctaggggttatttagaagctgaacggctacataagcattttgctgagcaaggaacgcatagggaggcttgggaacgacgtagggtcttattttatccaggcgggaagcgccaactttatggttatatggctatgaaggaagacctagacagcttcaaccagcattctcaaggcaaatctaggctgaaatttgagatgagatcctatcaagagatggttgttaagcagatcaggcaaatgagtgaggacaaccagcagcttattttttacaagaacaaggttgcaaaagaacaaaggcaaaaagttgctcttgaagagtcttttggtattgtgagtgagaggctccggaagacaatggaggagaacaggattgtaagacaaagaaccaaaatgcagcatgaacagaataaagaagagatggatttccaagagcaattcttcaaggaacgaatcaaatttatccatgaagccagggatgagaaggaagagagttttgagaagctgcagcagcaacagcgtgagaaggtcaagcagtctaaccccaatccttcaaatacagaggaatacaggcgcagggcggatgaaattgcaaaattcataaagttccaggatgaagagatgcaggcttttgtggcagagagggacaagctgatcaaagcacacgaagagaagatggttggcatgagagagaggcattggcaggaagaagttgagcttgaaaaggagtttgatgctgaattgagccacctcatggagaagtacactccggatggctcaaaagtcaaccccggcaatacttgattgtggaattgtaggggaatgcgatggtatgtacacatgtggtaaaaaagactttaatctctctgttccctgaggaaacttctgtgatgacactgaatatttctccatcttgagttacaactcttaaaatagtatgttaaaagattggaatatatgggtaaaaaaaagttaaatctaaagttgcatctatggttgccttattatgcttgtgttgtttgcttagacatggttcaaataagaacttggaatgaatctacgatttctttcctattatgttgcaatgttttggttaaatgacattgctctttctagattatgggctgcatctttcatgccacttgaaaccaaagctaatcatatgttttgtaaagaaggaaatagaaataatgttatttttggctcggtacgagggctgaaaatttttgggg

SEQ ID NO: 418 - DNA, 2727 bp, Gossypium raimondii
  source 1..2727: mol_type = genomic DNA
caaatttatatttattatcaattcaacacccgtcgatgttattggtgatacaaatgaaatgacgcttaaaatgctttccagatactagctaacccaaaaactttcctgctcatttcattttccaagccgacactcactctccactctcatactgtcgctactctgctctactccacaaccctgtctcgccttaccggccccgcacctccacacgctctatgcttacactgcgccccctgcgtctaccctattattagagttcgtgctatcatttttgctgttgctctcatttttttttacaggattgtgttagaggatgagttcaagaaaagggaatgggaatccttttgtttctggtggtattaacaacccatcgtccaaggggaaagacatatctggatcctctagctccaaggttgagcagctaagccagggtgtagcagacatgaacctgggtttgcctcaagacgatggtgagtgggaggttattcaaaggaagcctaagaatagaactggaagcagtgctgcaagaccttggggtcctcaaaattccaatggtaaaccgcggggagcgatgcggactaatgctgtatcaggaagagcctctggcaatgcttgggatgctcataatactgattctaggatggcaactggcagaggaaatgcaagaccccaaacatgcaacaaggctattgagaacaacaatgtgccaccacatcctgtcattcgcccaccccttcagtatggatggaattggcaatctagaactggttccaatccatcgggggggttacaagatgatcatggaaaaaacaatgtcaacactgaggttgaagaggtcaatgatattgatgatgttgaggatgactcggatgataatgctattgatgattctgatgatgaacttctaaccgatgactttgattcagattcaagtcaaaagagccacgagacaagaaagaataatagatggtttaagaagtttttctcgagtttagatgcattgagaattgaggaaatcaacgacccagcaaggcagtggcactgcccagcatgccagggtggtcctggtgccattgactggtataggggccttcagcctctgatgacacatgccaaaacaaaaggagcaaaaagggtgaaactccatcgtgaacttgctgaactcttggatgaggaattgtgtagaaggggtacttcagttattccttcaggtgaagcttttggcaaatggaagggtttaaaagatgaagaaaaagatcatgaaatagtctggccacctatggttatgataatgaacacaaggctggaacaagatgagaacgataagtggattggtatgggaaaccaagagcttcttgattatttcagctcatatgctgctgtgaaggctcgccactcgtatggtccacaggggcatcgtgggatgagtgttctgatttttgagagcacagctaggggttatttagaagctgaacggctacataagcattttgctgagcaaggaacgcatagggaggcttgggaacgacgtagggtcttattttatccaggcgggaagcgccaactttatggttatatggctatgaaggaagacctagacagcttcaaccagcattctcaaggcaaatctaggctgaaatttgagatgagatcctatcaagagatggttgttaagcagatcaggcaaatgagtgaggacaaccagcagcttattttttacaagaacaaggttgcaaaagaacaaaggcaaaaagttgctcttgaagagtcttttggtattgtgagtgagaggctccggaagacaatggaggagaacaggattgtaagacaaagaaccaaaatgcagcatgaacagaataaagaagagatggatttccaagagcaattcttcaaggaacgaatcaaatttatccatgaagccagggatgagaaggaagagagttttgagaagctgcagcagcaacagcgtgagaaggtcaagcagtctaaccccaatccttcaaatacagaggaatacaggcgcagggcggatgaaattgcaaaattcataaagttccaggatgaagagatgcaggcttttgtggcagagagggacaagctgatcaaagcacacgaagagaagatggttggcatgagagagaggcattggcaggaagaagttgagcttgaaaaggagtttgatgctgaattgagccacctcatggagaagtacactccggatggctcaaaagtcaaccccggcaatacttgattgtggaattgtaggggaatgcgatggtatgtacacatgtggtaaaaaagactttaatctctctgttccctgaggaaacttctgtgatgacactgaatatttctccatcttgagttacaactcttaaaatagtatgttaaaagattggaatatatgggtaaaaaaaagttaaatctaaagttgcatctatggttgccttattatgcttgtgttgtttgcttagacatggttcaaataagaacttggaatgaatctacgatttctttcctattatgttgcaatgttttggttaaatgacattgctctttctagattatgggctgcatctttcatgccacttgaaaccaaagctaatcatatgttttgtaaagaaggaaatagaaataatgttatttttggctcggtacgagggctgaaaatttttgggggtgtagctaactgtcagagtttcgaaaaatattgttttttgcacg

SEQ ID NO: 419 - DNA, 3056 bp, Gossypium raimondii
  source 1..3056: mol_type = genomic DNA
gatgttattggtgatacaaatgaaatgacgcttaaaatgctttccagatactagctaacccaaaaactttcctgctcatttcattttccaagccgacactcactctccactctcatactgtcgctactctgctctactccacaaccctgtctcgccttaccggccccgcacctccacacgctctatgcttacactgcgccccctgcgtctaccctattattagaggttagccatgtttttcgtgttaatcttgtcatgccctgccatacccatacctaagagttctaacttcaaacagactggcgttgtcaatgatgtattgtggcgtgtagtttgtcttgtttctgtctaaaatttgacatgtttaaaatttcgtgccatgttcatgttttagacttttagttatttcaatcatgtttgagttgagatataacacggatacaccgattgctagctctattttgaggccaacccagtgcattgtgtaaatgttttgatctttgcaagtaaaggttgactgaaatatccttcgtaaggcaacagctttgacgattagggtatagtgatcgtacaaccaatttatagcttgagacacttgctgacaacaccatctacaggcattttcatagttagttgttgtcgatcttgtttatttttaagactatgtactactaaatgtcgattttatgacatcttactataggattgtgttagaggatgagttcaagaaaagggaatgggaatccttttgtttctggtggtattaacaacccatcgtccaaggggaaagacatatctggatcctctagctccaaggttgagcagctaagccagggtgtagcagacatgaacctgggtttgcctcaagacgatggtgagtgggaggttattcaaaggaagcctaagaatagaactggaagcagtgctgcaagaccttggggtcctcaaaattccaatggtaaaccgcggggagcgatgcggactaatgctgtatcaggaagagcctctggcaatgcttgggatgctcataatactgattctaggatggcaactggcagaggaaatgcaagaccccaaacatgcaacaaggctattgagaacaacaatgtgccaccacatcctgtcattcgcccaccccttcagtatggatggaattggcaatctagaactggttccaatccatcgggggggttacaagatgatcatggaaaaaacaatgtcaacactgaggttgaagaggtcaatgatattgatgatgttgaggatgactcggatgataatgctattgatgattctgatgatgaacttctaaccgatgactttgattcagattcaagtcaaaagagccacgagacaagaaagaataatagatggtttaagaagtttttctcgagtttagatgcattgagaattgaggaaatcaacgacccagcaaggcagtggcactgcccagcatgccagggtggtcctggtgccattgactggtataggggccttcagcctctgatgacacatgccaaaacaaaaggagcaaaaagggtgaaactccatcgtgaacttgctgaactcttggatgaggaattgtgtagaaggggtacttcagttattccttcaggtgaagcttttggcaaatggaagggtttaaaagatgaagaaaaagatcatgaaatagtctggccacctatggttatgataatgaacacaaggctggaacaagatgagaacgataagtggattggtatgggaaaccaagagcttcttgattatttcagctcatatgctgctgtgaaggctcgccactcgtatggtccacaggggcatcgtgggatgagtgttctgatttttgagagcacagctaggggttatttagaagctgaacggctacataagcattttgctgagcaaggaacgcatagggaggcttgggaacgacgtagggtcttattttatccaggcgggaagcgccaactttatggttatatggctatgaaggaagacctagacagcttcaaccagcattctcaaggcaaatctaggctgaaatttgagatgagatcctatcaagagatggttgttaagcagatcaggcaaatgagtgaggacaaccagcagcttattttttacaagaacaaggttgcaaaagaacaaaggcaaaaagttgctcttgaagagtcttttggtattgtgagtgagaggctccggaagacaatggaggagaacaggattgtaagacaaagaaccaaaatgcagcatgaacagaataaagaagagatggatttccaagagcaattcttcaaggaacgaatcaaatttatccatgaagccagggatgagaaggaagagagttttgagaagctgcagcagcaacagcgtgagaaggtcaagcagtctaaccccaatccttcaaatacagaggaatacaggcgcagggcggatgaaattgcaaaattcataaagttccaggatgaagagatgcaggcttttgtggcagagagggacaagctgatcaaagcacacgaagagaagatggttggcatgagagagaggcattggcaggaagaagttgagcttgaaaaggagtttgatgctgaattgagccacctcatggagaagtacactccggatggctcaaaagtcaaccccggcaatacttgattgtggaattgtaggggaatgcgatggtatgtacacatgtggtaaaaaagactttaatctctctgttccctgaggaaacttctgtgatgacactgaatatttctccatcttgagttacaactcttaaaatagtatgttaaaagattggaatatatgggtaaaaaaaagttaaatctaaagttgcatctatggttgccttattatgcttgtgttgtttgcttagacatggttcaaataagaacttggaatgaatctacgatttctttcctattatgttgcaatgttttggttaaatgacattgctctttctagattatgggctgcatctttcatgccacttgaaaccaaagctaatcatatgttttgtaaagaaggaaatagaaataatgttatttttggct

SEQ ID NO: 420 - DNA, 2650 bp, Gossypium raimondii
  source 1..2650: mol_type = genomic DNA
gatgttattggtgatacaaatgaaatgacgcttaaaatgctttccagatactagctaacccaaaaactttcctgctcatttcattttccaagccgacactcactctccactctcatactgtcgctactctgctctactccacaaccctgtctcgccttaccggccccgcacctccacacgctctatgcttacactgcgccccctgcgtctaccctattattagaggattgtgttagaggatgagttcaagaaaagggaatgggaatccttttgtttctggtggtattaacaacccatcgtccaaggggaaagacatatctggatcctctagctccaaggttgagcagctaagccagggtgtagcagacatgaacctgggtttgcctcaagacgatggtgagtgggaggttattcaaaggaagcctaagaatagaactggaagcagtgctgcaagaccttggggtcctcaaaattccaatggtaaaccgcggggagcgatgcggactaatgctgtatcaggaagagcctctggcaatgcttgggatgctcataatactgattctaggatggcaactggcagaggaaatgcaagaccccaaacatgcaacaaggctattgagaacaacaatgtgccaccacatcctgtcattcgcccaccccttcagtatggatggaattggcaatctagaactggttccaatccatcgggggggttacaagatgatcatggaaaaaacaatgtcaacactgaggttgaagaggtcaatgatattgatgatgttgaggatgactcggatgataatgctattgatgattctgatgatgaacttctaaccgatgactttgattcagattcaagtcaaaagagccacgagacaagaaagaataatagatggtttaagaagtttttctcgagtttagatgcattgagaattgaggaaatcaacgacccagcaaggcagtggcactgcccagcatgccagggtggtcctggtgccattgactggtataggggccttcagcctctgatgacacatgccaaaacaaaaggagcaaaaagggtgaaactccatcgtgaacttgctgaactcttggatgaggaattgtgtagaaggggtacttcagttattccttcaggtgaagcttttggcaaatggaagggtttaaaagatgaagaaaaagatcatgaaatagtctggccacctatggttatgataatgaacacaaggctggaacaagatgagaacgataagtggattggtatgggaaaccaagagcttcttgattatttcagctcatatgctgctgtgaaggctcgccactcgtatggtccacaggggcatcgtgggatgagtgttctgatttttgagagcacagctaggggttatttagaagctgaacggctacataagcattttgctgagcaaggaacgcatagggaggcttgggaacgacgtagggtcttattttatccaggcgggaagcgccaactttatggttatatggctatgaaggaagacctagacagcttcaaccagcattctcaaggcaaatctaggctgaaatttgagatgagatcctatcaagagatggttgttaagcagatcaggcaaatgagtgaggacaaccagcagcttattttttacaagaacaaggttgcaaaagaacaaaggcaaaaagttgctcttgaagagtcttttggtattgtgagtgagaggctccggaagacaatggaggagaacaggattgtaagacaaagaaccaaaatgcagcatgaacagaataaagaagagatggatttccaagagcaattcttcaaggaacgaatcaaatttatccatgaagccagggatgagaaggaagagagttttgagaagctgcagcagcaacagcgtgagaaggtcaagcagtctaaccccaatccttcaaatacagaggaatacaggcgcagggcggatgaaattgcaaaattcataaagttccaggatgaagagatgcaggcttttgtggcagagagggacaagctgatcaaagcacacgaagagaagatggttggcatgagagagaggcattggcaggaagaagttgagcttgaaaaggagtttgatgctgaattgagccacctcatggagaagtacactccggatggctcaaaagtcaaccccggcaatacttgattgtggaattgtaggggaatgcgatggtatgtacacatgtggtaaaaaagactttaatctctctgttccctgaggaaacttctgtgatgacactgaatatttctccatcttgagttacaactcttaaaatagtatgttaaaagattggaatatatgggtaaaaaaaagttaaatctaaagttgcatctatggttgccttattatgcttgtgttgtttgcttagacatggttcaaataagaacttggaatgaatctacgatttctttcctattatgttgcaatgttttggttaaatgacattgctctttctagattatgggctgcatctttcatgccacttgaaaccaaagctaatcatatgttttgtaaagaaggaaatagaaataatgttatttttggctcggtacgagggctgaaaatttttgggggtgtagctaactgtcagagtttcgaaaaatattgttttttgcacg

SEQ ID NO: 421 - DNA, 3023 bp, Gossypium raimondii
  source 1..3023: mol_type = genomic DNA
attatattgcttggttttttatttaacggtttctctgtctcattatggcattgttgttgttattgttgccgctgcagttcgtgctatcatttttgctgttgctctcatttttttttacaggttagccatgtttttcgtgttaatcttgtcatgccctgccatacccatacctaagagttctaacttcaaacagactggcgttgtcaatgatgtattgtggcgtgtagtttgtcttgtttctgtctaaaatttgacatgtttaaaatttcgtgccatgttcatgttttagacttttagttatttcaatcatgtttgagttgagatataacacggatacaccgattgctagctctattttgaggccaacccagtgcattgtgtaaatgttttgatctttgcaagtaaaggttgactgaaatatccttcgtaaggcaacagctttgacgattagggtatagtgatcgtacaaccaatttatagcttgagacacttgctgacaacaccatctacaggcattttcatagttagttgttgtcgatcttgtttatttttaagactatgtactactaaatgtcgattttatgacatcttactataggattgtgttagaggatgagttcaagaaaagggaatgggaatccttttgtttctggtggtattaacaacccatcgtccaaggggaaagacatatctggatcctctagctccaaggttgagcagctaagccagggtgtagcagacatgaacctgggtttgcctcaagacgatggtgagtgggaggttattcaaaggaagcctaagaatagaactggaagcagtgctgcaagaccttggggtcctcaaaattccaatggtaaaccgcggggagcgatgcggactaatgctgtatcaggaagagcctctggcaatgcttgggatgctcataatactgattctaggatggcaactggcagaggaaatgcaagaccccaaacatgcaacaaggctattgagaacaacaatgtgccaccacatcctgtcattcgcccaccccttcagtatggatggaattggcaatctagaactggttccaatccatcgggggggttacaagatgatcatggaaaaaacaatgtcaacactgaggttgaagaggtcaatgatattgatgatgttgaggatgactcggatgataatgctattgatgattctgatgatgaacttctaaccgatgactttgattcagattcaagtcaaaagagccacgagacaagaaagaataatagatggtttaagaagtttttctcgagtttagatgcattgagaattgaggaaatcaacgacccagcaaggcagtggcactgcccagcatgccagggtggtcctggtgccattgactggtataggggccttcagcctctgatgacacatgccaaaacaaaaggagcaaaaagggtgaaactccatcgtgaacttgctgaactcttggatgaggaattgtgtagaaggggtacttcagttattccttcaggtgaagcttttggcaaatggaagggtttaaaagatgaagaaaaagatcatgaaatagtctggccacctatggttatgataatgaacacaaggctggaacaagatgagaacgataagtggattggtatgggaaaccaagagcttcttgattatttcagctcatatgctgctgtgaaggctcgccactcgtatggtccacaggggcatcgtgggatgagtgttctgatttttgagagcacagctaggggttatttagaagctgaacggctacataagcattttgctgagcaaggaacgcatagggaggcttgggaacgacgtagggtcttattttatccaggcgggaagcgccaactttatggttatatggctatgaaggaagacctagacagcttcaaccagcattctcaaggcaaatctaggctgaaatttgagatgagatcctatcaagagatggttgttaagcagatcaggcaaatgagtgaggacaaccagcagcttattttttacaagaacaaggttgcaaaagaacaaaggcaaaaagttgctcttgaagagtcttttggtattgtgagtgagaggctccggaagacaatggaggagaacaggattgtaagacaaagaaccaaaatgcagcatgaacagaataaagaagagatggatttccaagagcaattcttcaaggaacgaatcaaatttatccatgaagccagggatgagaaggaagagagttttgagaagctgcagcagcaacagcgtgagaaggtcaagcagtctaaccccaatccttcaaatacagaggaatacaggcgcagggcggatgaaattgcaaaattcataaagttccaggatgaagagatgcaggcttttgtggcagagagggacaagctgatcaaagcacacgaagagaagatggttggcatgagagagaggcattggcaggaagaagttgagcttgaaaaggagtttgatgctgaattgagccacctcatggagaagtacactccggatggctcaaaagtcaaccccggcaatacttgattgtggaattgtaggggaatgcgatggtatgtacacatgtggtaaaaaagactttaatctctctgttccctgaggaaacttctgtgatgacactgaatatttctccatcttgagttacaactcttaaaatagtatgttaaaagattggaatatatgggtaaaaaaaagttaaatctaaagttgcatctatggttgccttattatgcttgtgttgtttgcttagacatggttcaaataagaacttggaatgaatctacgatttctttcctattatgttgcaatgttttggttaaatgacattgctctttctagattatgggctgcatctttcatgccacttgaaaccaaagctaatcatatgttttgtaaagaaggaaatagaaataatgttatttttggctcggtacgagggctgaaaatttttgggggtgtagctaactgtcagagtttcgaaaaatattgttttttgcacg

SEQ ID NO: 422 - DNA, 4385 bp, Gossypium raimondii
  source 1..4385: mol_type = genomic DNA
aaagcgggaaatggaaacaacttctccagcaagtagtaagaaaaaaaaaaaaaaaagggggggagggggaagacctgaactggagactaaagttctttgtctttctcctaaacaacttcttcgtgaagtgcttaagaatcaagacacgataaaagcacacttgtttatatactgggtccatccctctaactctaagctcactccctaaaactcacaaatactttgctttctctttctctcactcctactctgcaaacgcgttcaaagttgcttctcttcttgtgtcaaaccaatacgctttcagttttgtttcaggaacttattggctttcaacccgaactggttaattttctgaaatatatggagttagaagggagtgtaaaggagactgtggtgacacaagttagtgttggtggatttgaccgacatgtcaaagccagagatctgatgaagtacttggagaatgcagttggcgttgtctggaggtgtagactgaagacctcatggacaccaccagaatcgtatcctaatttcgaaattactgacacttctgttatccaaagaaaagataactataagaaggtggagccccatgcctttgttcattttgcttcaccggaagcagtgacttgggctgtggatgctgcaggtcgtactgagcttgctttcaacaatcagctgttgaaggttagtttggggcctgagaatccttattacttgaatcgacggaggagggacacagcaccctttatgctacctgatgtctccctggagattggagcactggctagttgcgatgaattctttgttggctggagaggacctccttctggtgttgagtttcttgtggatccatttgattgtacctgcaaattttgtttctccagagatacagccttctcgttcaaaggcacaaatgagcgtgctgtcataaagtgtgactttaaggttgaatttctggttagggagatcaatgaagttaagcagtattcagaacagacgggttttgtagtgctcttgcagctggcttcgtcaccttgggtctggtatagaactgctgatgacgactttgaaaaatcagttccatttgatctgttggatgatgatgatcagtggatccggaccactgattttactgcaagtggagctatcggtcgttgtaatacatacagagtcctagtccgtcctcgtcatggtttaaagctgaagaaggccatgtattatctcagagaacgaagagtaccagtgaaagatctcagatcacaacttaggatctgtgatgaaccttattttgggaggtccatgtctgatcacttctattatacttacaaggaagggattccttttgaaataatgtttttggttaatgctgtactgcataaaggcatatttaatcagcatcagctatcaatggacttctttaagctactgagaaatcaatcaatggaggtcaatgtggctgcactaaggcacatctattcctctaggcatccagtgtatgatgcctataagaggctgaaagatgttcatgattggctgttgaagaatcccaaactctttaggagccctccgcagttggatgatattgttgaaatcagaagattggtcattaccccaaccaaagcttattgtcttcttccggaagttgagctttctaatagggttctcaggaaatataaagatgttgctgatcggtttttaagggtcacatttatggatgaaggcatgcagacaatgaatgcaaatgtgctcacttactataatgccgcaattgtaagggatgtgacgtctacctctttttctcagaaaacgggagtattcaaaagggtaaagtctattctaacagatggattttacttgtgtggtcgcaaatactctttccttgctttctcagccaatcaattgagagaccgctctgcatggtttttcgctgaagatgggaagataaatgtgcttcaaattataggttggatggggaagtttgcaaaccggaatattgctaaatgtgctgccaggatgggtcagtgcttctcgtcaacgtacgcaacagtggaagttccttcaggacaggttaacatgcaccttccagatatacagaggaatggatatgatttctctgatgggattggcaagatcactcccgatcttgcaatggaagttgctcagaaattgaagctggacttgaatcctccttgcgcttatcaaattagatatgctggttgtaaaggggtcgtggcttgttggccggaagaaggtgatgggatccgtctttctttacggtccagtatgattaagttcttttctcaccacacaacactggaaatctgttcttggacaagatttcagcctggcttcctgaataggcaaattattacattgctttcaacactaggtgtgcctgacaaagtattttggggaatgcaaaagtccatggtttctaagttggacaaagtccttgtggacactgatgcagcatttgaagtcgttatttcatcatgtggtgagcaagggcatactccagcaataatgttgagtgcaggtttcaagcctcaaacagaacctcatttacgaggaatgttgacttgtgtgagagcatctcaactttggggccttagggaaaaatctaggatttttattcattcaggcagatggttaatgggcgttttggatgaactaggtgtacttgaacaaggtcagtgctttatccaagtgtcaaatccatctctacaaaactgcttccttaaacatggttctaggtttgctgaaacaaagaaaaattttgaagtaattaaggggctggttgtcatagctaagaatccttgtcttcaccctggagatgtaagaattctagaagcagttgatgcccctggtttacaccatttgtatgactgtctggtcttccctcaaaagggtgagagaccccatacgaatgaagcttctggaagtgatcttgatggggacctttattttgtcacatgggaagaggctcttatcccccctagcaagaaaagctcacaacccatgcagtataaccctgatgagcctcgggagttgcatcgcccagtcactcataaggacataattgagtttttttcaaaaaacatggtgaatgagcacctgggaagtatctgcaatgcacatgtggttcattctgaccttagtgaccatggtgcttcagatgagaaatgtatacatctcgcagagttagcggctatagctgttgattttcctaaaaccgggaagattgtgtcgatgcctgctcacttaaaaccacaactttacccagattttatgggtaaagaggagttccagtcatacaagtcaaacaaaattctgggaagactatatcgtgatatcaaagatgcgtatgacgaagatgtctctgaatcttctgggctcaatttttgtgctagtgacatcaattatgatgcagatcttgaaattacaggatccgctgactacatagctgatgcatgggctaaaaagtgctcctatgacgggcagctgattggactacttaaacagtacaaagttaagagggaagaggaggtcgtaactggccaaatctggtccatgcccaaatatgccagtaagaaactaggggatttgaaggagaagcttggtcattcttatggttccctcaggaaagaattcagacaactttttgagaacatggattccgactttgagcagctcaatgaggatgagaagaacaagttgtatgaaagaaaggcttcagcatggtaccaggtcacttaccatcctgaatgggttcagaagacgttagagttccagaagcctgatggtgatgaaggtgttgtgatgttaagctttgcttggattgctgctgattacctagctcgaataaaagttaggcaccagggcactgaaaatcttgactttgctaagcctgtcaactctctagtaaggtacctagccgatcgaatataaccagtatttgactgttttggcagcaaattcatttgctggatccggcttcttggtcgcaaagccactctgccattttgaaagataagttgtaatgttggtttgtaatgcagtacatctctcttgttaccctattgttgctatgacctattgtgattgttcaaagatgattttccatgctttgtatgaaagtaatatttttcaattttcttgctttgcttgaatataatcatggtcttgtctcagtaaatggattagcaagtggttttggtccctccagtataaccgttgctcattgtaagttctgcttattgtgatccttcaaaggctatggatcaagaggctgccctgcctgtctcaatcattattgaccctttcttttggtcttaagtttcatttttacatgctttgttctatttaggttctttattatcgat

SEQ ID NO: 423 - DNA, 3785 bp, Gossypium raimondii
  source 1..3785: mol_type = genomic DNA
gctaaaggcaactctaattccaaaggataaaaaaccttggcccaagttaaataatcataaaacttcagtgaaagcagaaaaggtgaaaggaaaaaaagggtgtaaaccaccgcgccactagccggcagtagtagactgaaaccgaggcaaaagcaaacactggaaggcaaagcaaaaccttgtgagagaagagaggtgatggatggtacggagatagagagacccacattacggctcaccaacataccccaaaccgccgttgccaaagatctcttagacttcttcgagtccaagctcggccctgattcggtcttcgccattgagatctctaccgaccgcaacaactggaagtctcgtggttttggcagagtgcagttcgctgctccccaagctaagtccgatgcccttcgtctctcccgccacgatcacctccttttcaagtcccattctcttaaactctctcgaacttatgatgacatcatccccagacccatcagggccgatcataggcttgatggtggagtccttcatgcgggttttatgtctagtgatgattgcttgcgtgtcttggagcgctgggagggtgtgagaggttggataatgcccgagagaaggagattggaattttgggtatggaccgatggagagtgttacaagcttgattttctgtttgatgatatttttgagactgttggctgctgcttcgatggctctgcatgcaatgctcttctcttgagggttaggtatgctccaaggatatatcagaaagtatctgggccgaatgtggcttcaaaattcagtacggatcggtatcatatatgcaaggagaagtttgacttcctttgggttcgaacaacagatttttcaaggataaaatcgattgggcaatcgacttcgttttattgggaatttaatgcaggattttcaatctcggatatgtctacatatctcccgtgttatagagaagacatccaatctccatctttagaggccagaagagaattctcatctccatcagaaattgttccgcttgtaaagttcccatcagattccaagttagcatatgagatcctttttcagctcaatgcccttgttcatactcaaaaaattagcattgctgcagtggacactgatctgattggtatcctcagtggtttgcctgtcgaaactgctgtaatgattctgcagaagcttcgcctgctgcagtccccttgctataatcccgtttcatttgtgaaagcaaaattacctacaggaaaaaactaccgaattcctttatctgtttctgaaaggttaaaaaatcacaatgtcatgagctgtcgtagagccctaattacgcctacaaagatttattgcttgggtcccgagcttgaaacagctaattatgtggtaaagaactttgcagaatatgcttcatattttatgagagtcacttttgttgaagaagattggagtaagctttctgcaaatgccatttctactggtgtgcatctgggtgttttttctagacctttcaaaacaaaaatatatgacaggatattgtatgttcttcagaatggaattgttatcggagataagcgattcgagtttctggcattttctgctagtcagcttcgatcgaattctgtctggatgtttgcgtctaatgatgaggttaaagcagaagatattagagaatggatgggatgcttcaagaagatacgtagcatatctaagtgtgcttcaagaatgggtcaattgtttagttcctcgatgccgactcttgttgtccctgtgcaggatgtggagattattgatgatattgaagttaaaactgatggcattaattattgcttctctgatggtatagggaaaatttctctgccttttgctagacaagttgctgagaagtgtggattgaatcacattccatcagcatttcaaataagatatggtggttacaaaggtgtcgttgctgttgaccgtaactccttttggaagatgtctctgcgtgatagcatgctaaagtttgaatctaaagtcaggatgcttaatgtcaccaaatggagtgaatccatgccttgctttttgaatcgagaaattgttactctcttctccaccttgggcatcaaggatgaagtttttgagagaatgcaagaggaacaactgtgtctgcttggcaaaatgctaacaaatagagaagcagctttggataccttacaaagtttaggtggagttaattccaagaacattctggttgaaatgcttcagttttatgagccaaatgtccaaccttacctctcaatgatgcttcaagcacattatgagaatctactgtctgatctaaaaagcaggtgccgtatatttgttccaaagggacggatcttaattggttgtttggacgaaactggtacactgaattatgatcaagtttatctctgcataaaaatgaaaaaagcagaactagaatgtgcagaccaaagttacttccgtaaggtggatgaggaaacagctatagttataggaaaggtggttgtcacaaaaaatccttgccttcaccccggggatgtcagagtccttgaggctgtttatgaaccccaactagaagagaagggtttggtggattgccttgttttcccccagaaaggtgaaaggccgcatccaaatgaatgctcgggtggtgatcttgatggggaccagtttttcattagctgggacaaagatctcatcccatgtcaaactgagccgccaatggactacactggacgaagacctcggataatggatcatgaggtgaccttggaggaaattcagaagttttttgttgactacatgatcaacgatactttgggtgccatttctactgcacatctagtgcatgctgatcgtgaaccagacaaagcgtgcagtgaaaactgtctagcattggctactcttcactctatggctgttgattttgccaagacaggcgcaccggctgagatgcctcgtgctctgaaaccaagggagtttccggacttcatgcaaaggggaaacaaacccatgtatacttcctctggtgtactaggaaaactgtaccgtgctacaatcaactccacagtgcaaacaaggtcaaagtttgtttggacaaaagagatggccgagttagtttatgatcatgacctggaagtaaatggctttgagtcgctgatatcagttgcagagacccataaagagatgtatgaagagagaatgagcttattgatgagttattatgatgtagagtatgaggacgagatcctgacaggtaacatatacaacaaagcacagtttttgctgcgagacaaccggagatatggagaaatgaaggaacgaatcgtgttgtctgtcaaggacctacagagagaagctaaagaatggtttaagagtagctgcagcaaggctgatgagcatcaaaaacttgcctcagcatggtattatgtgacttaccacccgaattacttccaggaaaggatgaattccttgagctttccatggattgttggagacattttactgagggttaaatctcggaataagtttttgaatagccgagaaattcagagaaaccgaccgaaattcgataatgtctacattaagtccccaagaaggcatacttcaggtgatgaatcatccatggaatgaccaaatttaataatattctcctgtgaatgtaaactgctgtctcgctaatttgaaatgatttgaaaggatatgggtagggaaaatcaaggtatttaaaatttaagaactacaattttatttttatttttatttaatatataatt

SEQ ID NO: 424 - DNA, 4100 bp, Gossypium raimondii
  source 1..4100: mol_type = genomic DNA
ccaaaacaaacccacatgtcaattttcattgctgtttgttcttcgtctgatcgtctccgcccaattttttttttttttaaaaactcccccctaaaactcaagacttcactcctttgagactgaaacactgggaaaacccactgaaatttgatgcacattgctttacagaggctgtaaaacccttagaaatcactgaattttcacatctaagcaccgagaagattagggtttagggggggttttgttcttaatttctccttcctctccacaaactttcaatattttggtgcaatgggggcttcgccagatggaaagggaaacgggggaatgggcagtactagtggtgaaaagtttgcaaatggaactgatttgaatatggatatagatgaagatgatgatgtgtttgatgagctggtcagtgtgcaagagctgggagaagagtttttgaggaatttctgtaggaaagctgccgtgtctttcttcaatcagtatggtctagtaagtcatcaaataaactcttacaatgatttcataaaatacggtctccagaacaccttcgactcctttggggagtttgttattcattctggttatgatccatcgaagaagggagaaggtgactggcgtcatgccagagtgaagtttgggaaagtcaccgttgagaggccaaccttttgggctgtcacaggtggcaatgagctcaacatgcttcctaggcatgcccgccttcagaacatgacttactcatccaggatgaaggttactgttgagcttcaggtatatacagcaaaaagtgtaaagagtgacaagtttaaaactggaagagaagaaattgttgaagaggagatcgtgcatcaagataacagggagattataattggaaggatccctgtgatggttaagtctgagctgtgctggatgaatgaggttgaaaagtctgattgtgattttgatcacggaggttattttctcatcaagggcgcagagaagatattcattgcacaagagcaaatctctctgaagaggctctggatttcaaacatacagggctggactgttgcctacaggtcggaggtgaagagaaataggctaattatcagactagtggagaattccaaagtagaatatatcaaagggggggagaaaatcctgactgttttcttcttgtcgattgagatccccgtttggattttattttttgcccttggtgtacgatcagacaaggaagttgtaagtctgattgattatggaagcagtgattcaagtatatcaaacatactgttcgcgtcgattcgtgatgctgattggaaatgccgcaattttcgtgaagaaagtgctgctctcaaccatttggataggttacgcaaagaaactagatttccccccgaagaaagtgttgaagagtgccttggaaagtatctgtttccctctctcaaaggattcaagcagaaggctcggttcttggggtacatggtcaagagtcttttgcaagcattcaccggtcatcgaaaatgtgacaatagagatgattttaggaacaagaggttggagttggccggtgagctgcttgagcgtgagatgaaagttcatattgcccatgcaaggagacgtatggcaaagactctgcagagggatctttatgcggatcgtactgttcgtccaattgagcattatcttgatgcttccatagttacaaatgggctctctagagcattttctactggagcttggtctcatccttacaaaaagatggaaaggatatcaggtgtagtggcaaatctcggacgagcaaatccattgcagacaatggttgatttgagaaaaacacgacagcaggttcagtacactggaaaggtcggagatgcgagatacccacatccttctcattggggaaaagtttgctttctctctactcctgatggtgaaaattgtgggcttgttaagaatctggctaccactgctcttgtgagtacgaacatagtgaaatccgtagtggaatccatagtcgacacgttgtttgattctggaatggagaaagtggttaatgatacttcaagctcacttgatgggaaagataaggtctttctgaatggggaatgggttggtgtttgtgaagattctcttttctttgccgctgaacttagaagaaaacgacgcaggaaagaattgccgtatcaggtggaaattaaaagagatgagcataaaggagaggtgcggatctttactgatgctgggaggattctacgcccgcttttagttgttgaaaatctgttcaaactaaaagcattcaagggcaaggaaaattatgctttccagccccttttagacaaggggattgttgaactcattggagctgaagaggaagaagattgtcgcacggcatggggtatcaggtacctcttaaccgaagttgaggggaagcaacctgtcaagtacacgcattgtgagctggacatgtcatttcttttgggtttaagctgtggaatcattccatttgccaatcatgatcatgcgcggagggttctttaccaagcccagaagcattctcagcaggcaattgggttctctacaacgaacccaaacatcagggtggacactttgtcgcaccagatgtattatccccaaaggccactcttccatacgatgactgctgattgtcttggtaaatctggatttcctcttggtcagaatagattggaaccgaagccagaactctacaatggccagaatgctattgtggctgtaaatgttcatctcggttacaaccaagaggattccttggtaatgaaccgggcctcgatagagcgtgggatgttccgcaccgaacatgtaagaagttacaaagctgaagtagataacaaggaaatccaggagaagaggcggaaggctgaagatattgtaaactttggaaaaacagaaagtaagattggacgggtggacagccttgatgatgatggttttccttatatcggtgcttccctgcagtctggtgacattgtcattgggaggtttgcggaatctggagctgatcatggtgtaaaactgaagcacaccgaaagaggcatggttcagaaagttgtgttatcttcaaatgatgatgggaaaaattttgctgtggtgtctctgagacaggttcgttctccctgtcttggagacaagttctcaagcatgcatgggcaaaagggggtccttggttttctggagtctcatgagaactttcctttcacaactcaaggaatagttcctgatatcgtgattaacccacatgcatttccttcacgacaaacgccaggtcaactcttggaggctgccttgggaaaggggatcgcctgtggtgggtcgaagaaacatgccacccctttctccactctctccatagatgccattacagaacagcttcacagggctgggttttcaagatggggaaatgagagagtttacaatggtcggactggtgagatggttcggtcactcatatttatgggtccaacattctatcagcgtcttgtccacatggctgaagacaaagtgaaatttcgtaacactggacctgtgcacccacttacaaggcagccagttgcagaccggaaacgttatggcgggatcaaatttggtgagatggagcgggactgccttattgctcatggtgcatcagccaacttgcatgagcgcctcttcacgcttagcgattgctcacagatgcatgtatgtcagaattgcaaaaatgctgcaaatgttattgaacggaccgtagcagctggtcggaagattaggggaccctattgccgggtttgccagtcaggggatgagattgtgaaggttagtgtgccgtatggtgccaagttactgtgccaggaactattcagcatggggattagtctgaaatttgagacacagctttgttgagttagctgctaaactctttatcaactgttataacttctaatcgcaaatacttgggttcttttggttgaatgatgatgtaaatattagcaatcgaagttattgcagaatttaacttgtcaattgccttgcctttaatacttattatgcctctttaacacaatcccttggtctgattttaaaaatcaatttaattt

SEQ ID NO: 425 - DNA, 3545 bp, Gossypium raimondii
  source 1..3545: mol_type = genomic DNA
actcaagacttcactcctttgagactgaaacactgggaaaacccactgaaatttgatgcacattgctttacagaggctgtaaaacccttagaaatcactgaattttcacatctaagcaccgagaagattagggtttagggggggttttgttcttaatttctccttcctctccacaaactttcaatattttggtgcaatgggggcttcgccagatggaaagggaaacgggggaatgggcagtactagtggtgaaaagtttgcaaatggaactgatttgaatatggatatagatgaagatgatgatgtgtttgatgagctggtcagtgtgcaagagctgggagaagagtttttgaggaatttctgtaggaaagctgccgtgtctttcttcaatcagtatggtctagtaagtcatcaaataaactcttacaatgatttcataaaatacggtctccagaacaccttcgactcctttggggagtttgttattcattctggttatgatccatcgaagaagggagaaggtgactggcgtcatgccagagtgaagtttgggaaagtcaccgttgagaggccaaccttttgggctgtcacaggtggcaatgagctcaacatgcttcctaggcatgcccgccttcagaacatgacttactcatccaggatgaaggttactgttgagcttcaggtatatacagcaaaaagtgtaaagagtgacaagtttaaaactggaagagaagaaattgttgaagaggagatcgtgcatcaagataacagggagattataattggaaggatccctgtgatggttaagtctgagctgtgctggatgaatgaggttgaaaagtctgattgtgattttgatcacggaggttattttctcatcaagggcgcagagaagatattcattgcacaagagcaaatctctctgaagaggctctggatttcaaacatacagggctggactgttgcctacaggtcggaggtgaagagaaataggctaattatcagactagtggagaattccaaagtagaatatatcaaagggggggagaaaatcctgactgttttcttcttgtcgattgagatccccgtttggattttattttttgcccttggtgtacgatcagacaaggaagttgtaagtctgattgattatggaagcagtgattcaagtatatcaaacatactgttcgcgtcgattcgtgatgctgattggaaatgccgcaattttcgtgaagaaagtgctgctctcaaccatttggataggttacgcaaagaaactagatttccccccgaagaaagtgttgaagagtgccttggaaagtatctgtttccctctctcaaaggattcaagcagaaggctcggttcttggggtacatggtcaagagtcttttgcaagcattcaccggtcatcgaaaatgtgacaatagagatgattttaggaacaagaggttggagttggccggtgagctgcttgagcgtgagatgaaagttcatattgcccatgcaaggagacgtatggcaaagactctgcagagggatctttatgcggatcgtactgttcgtccaattgagcattatcttgatgcttccatagttacaaatgggctctctagagcattttctactggagcttggtctcatccttacaaaaagatggaaaggatatcaggtgtagtggcaaatctcggacgagcaaatccattgcagacaatggttgatttgagaaaaacacgacagcaggttcagtacactggaaaggtcggagatgcgagatacccacatccttctcattggggaaaagtttgctttctctctactcctgatggtgaaaattgtgggcttgttaagaatctggctaccactgctcttgtgagtacgaacatagtgaaatccgtagtggaatccatagtcgacacgttgtttgattctggaatggagaaagtggttaatgatacttcaagctcacttgatgggaaagataaggtctttctgaatggggaatgggttggtgtttgtgaagattctcttttctttgccgctgaacttagaagaaaacgacgcaggaaagaattgccgtatcaggtggaaattaaaagagatgagcataaaggagaggtgcggatctttactgatgctgggaggattctacgcccgcttttagttgttgaaaatctgttcaaactaaaagcattcaagggcaaggaaaattatgctttccagccccttttagacaaggggattgttgaactcattggagctgaagaggaagaagattgtcgcacggcatggggtatcaggtacctcttaaccgaagttgaggggaagcaacctgtcaagtacacgcattgtgagctggacatgtcatttcttttgggtttaagctgtggaatcattccatttgccaatcatgatcatgcgcggagggttctttaccaagcccagaagcattctcagcaggcaattgggttctctacaacgaacccaaacatcagggtggacactttgtcgcaccagatgtattatccccaaaggccactcttccatacgatgactgctgattgtcttggtaaatctggatttcctcttggtcagaatagattggaaccgaagccagaactctacaatggccagaatgctattgtggctgtaaatgttcatctcggttacaaccaagaggattccttggtaatgaaccgggcctcgatagagcgtgggatgttccgcaccgaacatgtaagaagttacaaagctgaagtagataacaaggaaatccaggagaagaggcggaaggctgaagatattgtaaactttggaaaaacagaaagtaagattggacgggtggacagccttgatgatgatggttttccttatatcggtgcttccctgcagtctggtgacattgtcattgggaggtttgcggaatctggagctgatcatggtgtaaaactgaagcacaccgaaagaggcatggttcagaaagttgtgttatcttcaaatgatgatgggaaaaattttgctgtggtgtctctgagacaggttcgttctccctgtcttggagacaagttctcaagcatgcatgggcaaaagggggtccttggttttctggagtctcatgagaactttcctttcacaactcaaggaatagttcctgatatcgtgattaacccacatgcatttccttcacgacaaacgccaggtcaactcttggaggctgccttgggaaaggggatcgcctgtggtgggtcgaagaaacatgccacccctttctccactctctccatagatgccattacagaacagcttcacaggtaatgaattgccctggaacaagttgacctgcgtgcttactgtgcattcatcatggattttttcattatagagatcttaggtgggccgtttcagagttgttttggtgtatcaatgcctttaacgaatactattggattttcacgctttgttgctttgttgatctgcatgcttactgtcctggaacgattagcgagcatacatgctggttttcagactttgatcacacataagctat

SEQ ID NO: 426 - DNA, 4969 bp, Gossypium raimondii
  source 1..4969: mol_type = genomic DNA
atccgacagcaagaggaaaaaaaaaagttataactgctataaatggcagcttgaattctaaatcgaggcttatttcgaaaatagcagttcattaactccgcataagtcaaaagtcaatggcctccatggaaagtgactcatctgaagagcaagaaaattcaactgcctttctgactggcataaaatttcatgtctcgaacgacgctgataatgagaacatgtctatcttggaaattactgcacccagtgaggtgtctgatcctaggttggggtttccgaatttttctaatcattgcaccacttgtgatgccagagatatgaaacaatgcgaaggccattttggggttattaaatttccatacacaatactccatccattttttctttcagaagttgtacatatattaaataagatttgcccaggatgtaaatcgatccggaaagatctatggatgaagggtgctaattctatagccagattacttgaaaccaaggggtgtaaatattgtgttgggaattcaatagagtggtatccacccatgagattcaagataacctcgaaagagcttttcagaaaaagtgcaatcatggtagaggtaagtgaaaactctttaatgaaggtccggaagagaggaaggcaagcattacctgcagattactgggactttattccaaaagatcaacaacaagaagaaggttttgtgaaaccaggtagaagagtcctatcacatgcccaggttcgacatttgttgaaggacgttaatccagagttcattaaaaagtttatttcagaagcagactctattttcctcaatttttttcctgtgacacccaatagtcaccgagtgacagaaatcatgcatacatcttctaatgcgcagcgattgatctttgatgaaagaaccagggtttacaagaaactggttgacttcagagggctagcaaatgaattgagctctcatgtattggaatgcctaaaaatttctaagctgcatgtggagaagccatcaactgaagattctgcactcattgctgctctgaaaaagaataaagattctgcttccaacatgtcaggtttaagatatatgaaagatgttattcttgggaagagaaacgaccattgcttccgcatggttcttactggaaacccaaatcttaaactgtctgaaattggtatcccatgtcatgttgccgagaaattgcaaatcgctgagcaactgaacaggtggaatgaggagagattgaaaacttgttgtaatctgcgtattcttgagaagggtgagattcgcattaggagagaaggtaaattagttagaattcgtcataatgaaaaggtccaagtaggggacactatctataggcccctaaatgatggggatacagtacttataaatagacctccttctatacatcagcactctctcattgcgctatctgttaaagttctacctgtcaattcagttgtttcgataaacccactaatatgttccccttttcgtggagattttgatggtgattgccttcatggttatgttcctcagtccattaacacaagagttgagctcagtgagcttgtttctttggataggcagctaattaatggccaaagtggtcgaaatctgctttcactcagtcatgatagtttaacggctgcttatttggtcaaggaggacggggtactattgaacctgttccagatgcaacagctggaaatgttctgtcctaatcattcgccattgccagccattgtcaaagctcctttgctaagtaatcctgtttggactggaaagcagttatttagcatgctctttcctcccgaatttgattatgtttttgcaccaagtggtgttgtaatccacaatggggatctcatatgttcttctgaagggtcttcttggctacgagatgctgacggcaacctttttcaaagtcttattaagcattaccaaggaaaggtccttgactttttgcatgctgctcaggaagttctttgtgagtggttgtcaatgaggggtttgagtgtttcactcttggacctatatctatctcctgacacagattcacaaaagaacatgatggatgaaatcttctatggtctgcaagaagcagagcagacatgtaacttcaagcagttaatggttgattcttgtcaagatttccttgctggaaacgatgaagaaactaataggttcatggttttggatgttgagcagatgtgctatgagaaacaaagatctgctgcacttagccaagcttctgttgattcatttaagcaagttttccgtgatattcagaatttactctacaagtatgcaaataaagacaattcattattcaccatgttcaaagcagggagcaagggtaacttgctgaagttagtacagcatagtatgtgtcttggattgcaacattcacttgtccctttatcattcagatttcctcatcagctctcatgtgctgcatggaataatcaaaagtctcacatcttaacccaaaaggttgatgatactgatgagtctgctaagaaatatatcccctatgctgtggtcgaaagttcgtttgtgaagggtctgaatccattagaatgttttgttcattcagtgactactcgagacacatctttcagtgacaatgctgaccttcctgggacgctgtcacgaaggttgatgttcttcatgcgtgatctatgcgcagcatatgatggaactgtgaggaatgcatatggagatcaggttgttcagttctgttataatatcgataagggtacatttagtccaactagttgccctgacaaattagtaagtcagggcagtagtcttcctgatggaattggtggacaacctgttggttcattatctgcctgtgccatttctgaggctgcatatagtgcattggatcagccaattagtctacttgaatcttctccattgctgaacttgaagagggtccttgagtgtggttctaaaagaagcaatgctgaccagactatgtcactatttttatctggtaaacttgtaaggagaaggcacggtcaggagtatggagccttagaagtcaagaatcatttggagaggctgatctttaaagatattgtgtctactgtctcaataatcttctctccacagatgtctagtgaaaaccgtttcagtccttgggtttgccattttcatgtgtttaaggatattgtgacaaggaggcggctaacagtgcattctattattgatgctcttcacatgcactgcaccaatgccaaaagactatggaaaatcaatttgcccgacatgcaagttacaagcaaggcctgttctgttattgacatggaaaatgaagatgatacgttttgtatcactgtcacaattgttgaatgtaaaacttctcgtatagaactggatgtgattcaagacatggtgataccttcccttctggaagcagtggtaaaaggattcccggagatcaagaaggtggaaattctatggaatgaggatttcagagtcccaaattctcataaacctgctcctggtgaactttacttgagggtttctgtatctggcgattttggtataacgaaactctggagtgtgcttatgaatgattgcctccaactaatggatataatcgattggacacggagccatccagataacattaatcagttttgcttggcattcggaatagatgctggatggagattctttctcaataatatgaagagtgcaatatcagatactggcaagtctatactaaatgaacatctacaccttgctgccaattgtctgtcagctaccggggagtttgttggtttaaattcaaaaggcttgaaacaacaaagagaacatgcatttgtctcttctcctttcatgcaagcatgcttttcaaaccctagtgcttgctttgtcaaagctgcaaagactggagttgcggataatcttcaagggaccattgacctattggcttggggaagggttcctcgtattgggactggtggacagtttgatatagtctattctatgaaggatgaagagcttgcagaaccggttgatgtgtataagctgctaggagattctattaattccaagaagcaggatatagagtttgaagtacctaaagtttttaaccctacatctgagaaacatagttctccgttcaagggagctcttcgtgactctgtctttgatgagtggaagaagattgaaacgaaaacaaggtcactcttgagaggacgtctaaccttgaatgacgttcagaggcttgagcgtaatttaaagaatattttgcgcaaatatcctattgatcaccgtgtaagtgaagctgactgggataccttgatgatggcgttgtactttcaccctcatagagttgagaagatcggatctggagccaaggaaataaaggtagggcatcatcccgatcatgcagacagtcgttgtttctttttggttagaacagatgagacaactgtagatttctcatatcggaaatgtgttgtcggtgcactcgagatcattgctccttgtagggcacaatcctacaagtcaaaatggttacaacatggtagtttgtaaaccaaactccacaagcgctcacttttgcatgtaaatatagcaagatccataccttcctaaaactgtacatttctacagactactgagcacaagaggagtagtttgaacagtatttcatatccttttgttgactttttttttctttttctttttttaaaatttttaagagtgtatttcccagcctaatagaatagggtcgccgctttcctcagcttctttttgctccttctactggaacttgtttgcctttctttttaacatgagacagaaaagatccagtggaagcagcaacgaaaagcttgtaaagttcgaccccatttcgttttgtattttccataactacacgtgatagtgttattaagtagcctgtttcagctaatctcattattttctttagtttagacgct

SEQ ID NO: 427 - DNA, 5029 bp, Gossypium raimondii
  source 1..5029: mol_type = genomic DNA
actaaatatagttttaattgtaattcttgtgatccaatgtttaatcatcttatctctgtctttgtaattttatattaaactttatttgagttcttgccggcatgctatattgattgcttgttggtcatcagaagtcaaaagtcaatggcctccatggaaagtgactcatctgaagagcaagaaaattcaactgcctttctgactggcataaaatttcatgtctcgaacgacgctgataatgagaacatgtctatcttggaaattactgcacccagtgaggtgtctgatcctaggttggggtttccgaatttttctaatcattgcaccacttgtgatgccagagatatgaaacaatgcgaaggccattttggggttattaaatttccatacacaatactccatccattttttctttcagaagttgtacatatattaaataagatttgcccaggatgtaaatcgatccggaaagatctatggatgaagggtgctaattctatagccagattacttgaaaccaaggggtgtaaatattgtgttgggaattcaatagagtggtatccacccatgagattcaagataacctcgaaagagcttttcagaaaaagtgcaatcatggtagaggtaagtgaaaactctttaatgaaggtccggaagagaggaaggcaagcattacctgcagattactgggactttattccaaaagatcaacaacaagaagaaggttttgtgaaaccaggtagaagagtcctatcacatgcccaggttcgacatttgttgaaggacgttaatccagagttcattaaaaagtttatttcagaagcagactctattttcctcaatttttttcctgtgacacccaatagtcaccgagtgacagaaatcatgcatacatcttctaatgcgcagcgattgatctttgatgaaagaaccagggtttacaagaaactggttgacttcagagggctagcaaatgaattgagctctcatgtattggaatgcctaaaaatttctaagctgcatgtggagaagccatcaactgaagattctgcactcattgctgctctgaaaaagaataaagattctgcttccaacatgtcaggtttaagatatatgaaagatgttattcttgggaagagaaacgaccattgcttccgcatggttcttactggaaacccaaatcttaaactgtctgaaattggtatcccatgtcatgttgccgagaaattgcaaatcgctgagcaactgaacaggtggaatgaggagagattgaaaacttgttgtaatctgcgtattcttgagaagggtgagattcgcattaggagagaaggtaaattagttagaattcgtcataatgaaaaggtccaagtaggggacactatctataggcccctaaatgatggggatacagtacttataaatagacctccttctatacatcagcactctctcattgcgctatctgttaaagttctacctgtcaattcagttgtttcgataaacccactaatatgttccccttttcgtggagattttgatggtgattgccttcatggttatgttcctcagtccattaacacaagagttgagctcagtgagcttgtttctttggataggcagctaattaatggccaaagtggtcgaaatctgctttcactcagtcatgatagtttaacggctgcttatttggtcaaggaggacggggtactattgaacctgttccagatgcaacagctggaaatgttctgtcctaatcattcgccattgccagccattgtcaaagctcctttgctaagtaatcctgtttggactggaaagcagttatttagcatgctctttcctcccgaatttgattatgtttttgcaccaagtggtgttgtaatccacaatggggatctcatatgttcttctgaagggtcttcttggctacgagatgctgacggcaacctttttcaaagtcttattaagcattaccaaggaaaggtccttgactttttgcatgctgctcaggaagttctttgtgagtggttgtcaatgaggggtttgagtgtttcactcttggacctatatctatctcctgacacagattcacaaaagaacatgatggatgaaatcttctatggtctgcaagaagcagagcagacatgtaacttcaagcagttaatggttgattcttgtcaagatttccttgctggaaacgatgaagaaactaataggttcatggttttggatgttgagcagatgtgctatgagaaacaaagatctgctgcacttagccaagcttctgttgattcatttaagcaagttttccgtgatattcagaatttactctacaagtatgcaaataaagacaattcattattcaccatgttcaaagcagggagcaagggtaacttgctgaagttagtacagcatagtatgtgtcttggattgcaacattcacttgtccctttatcattcagatttcctcatcagctctcatgtgctgcatggaataatcaaaagtctcacatcttaacccaaaaggttgatgatactgatgagtctgctaagaaatatatcccctatgctgtggtcgaaagttcgtttgtgaagggtctgaatccattagaatgttttgttcattcagtgactactcgagacacatctttcagtgacaatgctgaccttcctgggacgctgtcacgaaggttgatgttcttcatgcgtgatctatgcgcagcatatgatggaactgtgaggaatgcatatggagatcaggttgttcagttctgttataatatcgataagggtacatttagtccaactagttgccctgacaaattagtaagtcagggcagtagtcttcctgatggaattggtggacaacctgttggttcattatctgcctgtgccatttctgaggctgcatatagtgcattggatcagccaattagtctacttgaatcttctccattgctgaacttgaagagggtccttgagtgtggttctaaaagaagcaatgctgaccagactatgtcactatttttatctggtaaacttgtaaggagaaggcacggtcaggagtatggagccttagaagtcaagaatcatttggagaggctgatctttaaagatattgtgtctactgtctcaataatcttctctccacagatgtctagtgaaaaccgtttcagtccttgggtttgccattttcatgtgtttaaggatattgtgacaaggaggcggctaacagtgcattctattattgatgctcttcacatgcactgcaccaatgccaaaagactatggaaaatcaatttgcccgacatgcaagttacaagcaaggcctgttctgttattgacatggaaaatgaagatgatacgttttgtatcactgtcacaattgttgaatgtaaaacttctcgtatagaactggatgtgattcaagacatggtgataccttcccttctggaagcagtggtaaaaggattcccggagatcaagaaggtggaaattctatggaatgaggatttcagagtcccaaattctcataaacctgctcctggtgaactttacttgagggtttctgtatctggcgattttggtataacgaaactctggagtgtgcttatgaatgattgcctccaactaatggatataatcgattggacacggagccatccagataacattaatcagttttgcttggcattcggaatagatgctggatggagattctttctcaataatatgaagagtgcaatatcagatactggcaagtctatactaaatgaacatctacaccttgctgccaattgtctgtcagctaccggggagtttgttggtttaaattcaaaaggcttgaaacaacaaagagaacatgcatttgtctcttctcctttcatgcaagcatgcttttcaaaccctagtgcttgctttgtcaaagctgcaaagactggagttgcggataatcttcaagggaccattgacctattggcttggggaagggttcctcgtattgggactggtggacagtttgatatagtctattctatgaaggatgaagagcttgcagaaccggttgatgtgtataagctgctaggagattctattaattccaagaagcaggatatagagtttgaagtacctaaagtttttaaccctacatctgagaaacatagttctccgttcaagggagctcttcgtgactctgtctttgatgagtggaagaagattgaaacgaaaacaaggtcactcttgagaggacgtctaaccttgaatgacgttcagaggcttgagcgtaatttaaagaatattttgcgcaaatatcctattgatcaccgtgtaagtgaagctgactgggataccttgatgatggcgttgtactttcaccctcatagagttgagaagatcggatctggagccaaggaaataaaggtagggcatcatcccgatcatgcagacagtcgttgtttctttttggttagaacagatgagacaactgtagatttctcatatcggaaatgtgttgtcggtgcactcgagatcattgctccttgtagggcacaatcctacaagtcaaaatggttacaacatggtagtttgtaaaccaaactccacaagcgctcacttttgcatgtaaatatagcaagatccataccttcctaaaactgtacatttctacagactactgagcacaagaggagtagtttgaacagtatttcatatccttttgttgactttttttttctttttctttttttaaaatttttaagagtgtatttcccagcctaatagaatagggtcgccgctttcctcagcttctttttgctccttctactggaacttgtttgcctttctttttaacatgagacagaaaagatccagtggaagcagcaacgaaaagcttgtaaagttcgaccccatttcgttttgtattttccataactacacgtgatagtgttattaagtagcctgtttcagctaatctcattattttctttagtttagacgcttgaatcttacattattttcttaaagatttaca

SEQ ID NO: 428 - DNA, 4844 bp, Gossypium raimondii
  source 1..4844: mol_type = genomic DNA
atggaaagtgactcatctgaagagcaagaaaattcaactgcctttctgactggcataaaatttcatgtctcgaacgacgctgataatgagaacatgtctatcttggaaattactgcacccagtgaggtgtctgatcctaggttggggtttccgaatttttctaatcattgcaccacttgtgatgccagagatatgaaacaatgcgaaggccattttggggttattaaatttccatacacaatactccatccattttttctttcagaagttgtacatatattaaataagatttgcccaggatgtaaatcgatccggaaagatctatggatgaagggtgctaattctatagccagattacttgaaaccaaggggtgtaaatattgtgttgggaattcaatagagtggtatccacccatgagattcaagataacctcgaaagagcttttcagaaaaagtgcaatcatggtagaggtaagtgaaaactctttaatgaaggtccggaagagaggaaggcaagcattacctgcagattactgggactttattccaaaagatcaacaacaagaagaaggttttgtgaaaccaggtagaagagtcctatcacatgcccaggttcgacatttgttgaaggacgttaatccagagttcattaaaaagtttatttcagaagcagactctattttcctcaatttttttcctgtgacacccaatagtcaccgagtgacagaaatcatgcatacatcttctaatgcgcagcgattgatctttgatgaaagaaccagggtttacaagaaactggttgacttcagagggctagcaaatgaattgagctctcatgtattggaatgcctaaaaatttctaagctgcatgtggagaagccatcaactgaagattctgcactcattgctgctctgaaaaagaataaagattctgcttccaacatgtcaggtttaagatatatgaaagatgttattcttgggaagagaaacgaccattgcttccgcatggttcttactggaaacccaaatcttaaactgtctgaaattggtatcccatgtcatgttgccgagaaattgcaaatcgctgagcaactgaacaggtggaatgaggagagattgaaaacttgttgtaatctgcgtattcttgagaagggtgagattcgcattaggagagaaggtaaattagttagaattcgtcataatgaaaaggtccaagtaggggacactatctataggcccctaaatgatggggatacagtacttataaatagacctccttctatacatcagcactctctcattgcgctatctgttaaagttctacctgtcaattcagttgtttcgataaacccactaatatgttccccttttcgtggagattttgatggtgattgccttcatggttatgttcctcagtccattaacacaagagttgagctcagtgagcttgtttctttggataggcagctaattaatggccaaagtggtcgaaatctgctttcactcagtcatgatagtttaacggctgcttatttggtcaaggaggacggggtactattgaacctgttccagatgcaacagctggaaatgttctgtcctaatcattcgccattgccagccattgtcaaagctcctttgctaagtaatcctgtttggactggaaagcagttatttagcatgctctttcctcccgaatttgattatgtttttgcaccaagtggtgttgtaatccacaatggggatctcatatgttcttctgaagggtcttcttggctacgagatgctgacggcaacctttttcaaagtcttattaagcattaccaaggaaaggtccttgactttttgcatgctgctcaggaagttctttgtgagtggttgtcaatgaggggtttgagtgtttcactcttggacctatatctatctcctgacacagattcacaaaagaacatgatggatgaaatcttctatggtctgcaagaagcagagcagacatgtaacttcaagcagttaatggttgattcttgtcaagatttccttgctggaaacgatgaagaaactaataggttcatggttttggatgttgagcagatgtgctatgagaaacaaagatctgctgcacttagccaagcttctgttgattcatttaagcaagttttccgtgatattcagaatttactctacaagtatgcaaataaagacaattcattattcaccatgttcaaagcagggagcaagggtaacttgctgaagttagtacagcatagtatgtgtcttggattgcaacattcacttgtccctttatcattcagatttcctcatcagctctcatgtgctgcatggaataatcaaaagtctcacatcttaacccaaaaggttgatgatactgatgagtctgctaagaaatatatcccctatgctgtggtcgaaagttcgtttgtgaagggtctgaatccattagaatgttttgttcattcagtgactactcgagacacatctttcagtgacaatgctgaccttcctgggacgctgtcacgaaggttgatgttcttcatgcgtgatctatgcgcagcatatgatggaactgtgaggaatgcatatggagatcaggttgttcagttctgttataatatcgataagggtacatttagtccaactagttgccctgacaaattagtaagtcagggcagtagtcttcctgatggaattggtggacaacctgttggttcattatctgcctgtgccatttctgaggctgcatatagtgcattggatcagccaattagtctacttgaatcttctccattgctgaacttgaagagggtccttgagtgtggttctaaaagaagcaatgctgaccagactatgtcactatttttatctggtaaacttgtaaggagaaggcacggtcaggagtatggagccttagaagtcaagaatcatttggagaggctgatctttaaagatattgtgtctactgtctcaataatcttctctccacagatgtctagtgaaaaccgtttcagtccttgggtttgccattttcatgtgtttaaggatattgtgacaaggaggcggctaacagtgcattctattattgatgctcttcacatgcactgcaccaatgccaaaagactatggaaaatcaatttgcccgacatgcaagttacaagcaaggcctgttctgttattgacatggaaaatgaagatgatacgttttgtatcactgtcacaattgttgaatgtaaaacttctcgtatagaactggatgtgattcaagacatggtgataccttcccttctggaagcagtggtaaaaggattcccggagatcaagaaggtggaaattctatggaatgaggatttcagagtcccaaattctcataaacctgctcctggtgaactttacttgagggtttctgtatctggcgattttggtataacgaaactctggagtgtgcttatgaatgattgcctccaactaatggatataatcgattggacacggagccatccagataacattaatcagttttgcttggcattcggaatagatgctggatggagattctttctcaataatatgaagagtgcaatatcagatactggcaagtctatactaaatgaacatctacaccttgctgccaattgtctgtcagctaccggggagtttgttggtttaaattcaaaaggcttgaaacaacaaagagaacatgcatttgtctcttctcctttcatgcaagcatgcttttcaaaccctagtgcttgctttgtcaaagctgcaaagactggagttgcggataatcttcaagggaccattgacctattggcttggggaagggttcctcgtattgggactggtggacagtttgatatagtctattctatgaaggatgaagagcttgcagaaccggttgatgtgtataagctgctaggagattctattaattccaagaagcaggatatagagtttgaagtacctaaagtttttaaccctacatctgagaaacatagttctccgttcaagggagctcttcgtgactctgtctttgatgagtggaagaagattgaaacgaaaacaaggtcactcttgagaggacgtctaaccttgaatgacgttcagaggcttgagcgtaatttaaagaatattttgcgcaaatatcctattgatcaccgtgtaagtgaagctgactgggataccttgatgatggcgttgtactttcaccctcatagagttgagaagatcggatctggagccaaggaaataaaggtacggcatcatcccgatcatgcagacagtcgttgtttctttttggttagaacagatgagacaactgtagatttctcatatcggaaatgtgttgtcggtgcactcgagatcattgctccttgtagggcacaatcctacaagtcaaaatggttacaacatggtagtttgtaaaccaaactccacaagcgctcacttttgcatgtaaatatagcaagatccataccttcctaaaactgtacatttctacagactactgagcacaagaggagtagtttgaacagtatttcatatccttttgttgactttttttttctttttctttttttaaaatttttaagagtgtatttcccagcctaatagaatagggtcgccgctttcctcagcttctttttgctccttctactggaacttgtttgcctttctttttaacatgagacagaaaagatccagtggaagcagcaacgaaaagcttgtaaagttcgaccccatttcgttttgtattttccataactacacgtgatagtgttattaagtagcctgtttcagctaatctcattattttctttagtttagacgct

SEQ ID NO: 429 - DNA, 4194 bp, Gossypium raimondii
  source 1..4194: mol_type = genomic DNA
atgaagtcaaagccgatgacctccattgaaacggacttgtctgaagagcaagaagtgctagctgccactatgactggcataaagtttaatgtatcgggtgatgaagataatgggaactcaattgactggtatccaccaatgacattcaagatatcctctaaagagctttccaaaaaaagcacaattgtggtagaggtaagtgaagactctttaatgatggtccgaaagagaggaaggcaagccttacctgctgattattgggattttattccaaaagatcaacaagaagaagaagatggtttgatgaaaccacgtcgaagggtcctatcacatgcacaggttcattatttactgaaggatgttgatccagagttcattaaaaagttcattcagaatgtggactctattttcctcaattgctttcctgtgacacccaatagtcatcgagtgacggaaatcactcatagatcttctaattcacagcgcttgatctttgatgagagaactaggctttacaagagactggttgatttccgaggagtagctaatgaactgagttcccatgtattggaatgcctaaaaatttcaaaggcaagttacagtgccttgttttcttttttgtatttgctgttccaggagaagccatcaaatgaagataatgaacttatccttgccctgacaaggaataaagatcctgtttctaacatgtctggtttaagatacatgaaaaacgttcttcttggaaagcgaaatgaccattgcttccgcatggttcttaccggaaatccaagtcttaaactatcggaaattggtataccatgtcctgttgcagagaggttgcaaattgctgagcaactgaacaagtggaacgaggaaagattgaaagcttgctgtaatttgcgtattcttgagaagggtgagatttgtattaggagagaaggtacattagttagaattcatcataatgaaaagatccgactgggggacatcatctataggcccctaaataatggggatatcgtgcttataaacagacctccttctatacatcagcactctttcattgccctatctgtcaaagttctacctgtgagttcctctgtttcgataaacccccttatttgttccccttttcgtggagattttgacggtgattgccttcatggttatgttcctcagtccatcaacacaagggttgagctcagcgagcttgtttctttgaataggcagctaattaatggccaaagtggtcgaaatctactttcactgagtcatgatagtttatcagctgcttatttggtcaatggtgatggggttctcttgaacttgtacgaaatgcaacagcttgaaatgttctgtcccaatcgttcaccgtcgccagcaatcatcaaagctcctttattgagtaatcctgtttggactggaaagcagttattcagcatgctctttcctcccgaattggattatggtttttctccaagtgatcttgttatccgtaatggggagcttataacttcatctgagggatcttcttggttccgagatgctgatggcaacctttttgaaagtctcattaaaaattgtcgaggaaaggtccttgattttttgcatggtgctcaggaagttctttgtgagtggttatcaatgaggggtatgagcgtttcactcttggacctatacctaactcctgattcaaattcacgaaagaacatgatggatgaaatcttctatggtctccaagaaacagagctgacttgcaactttaagcagttaatggttgattccttctgtgatttccttgctggaaataatgaagaaattgatggttttgtgggttttgattttgagcggatgtgttatgagaagcaaagatcagctgcagttaatcaagcttctgttgattcttttaagcaagtttttcgagatatccagaatttatcatacaaatatgcaaataaagacaattcattattgaccatgttcaaagcagggagcaagggtaacttgctgaagctagtgcagcatagcatgtgtcttggactgcaacgttcagttgtacctttatcattcaggtttcctcctaaactctcatgttctgaatggaatgatctaaaatctcagggcttaacccagagcggtgatgacagtgttgaatctgcaaagaatttcatcccatatgctgtgatcgaaagttcttttatgacaggcctgaatccactagaatgttttgtgcattccgttactagtcgagacagttctttcagcgaccatgctgaccttcctgggacactgtcacgaaggcttatgttcttcttgcgtgatctatgcgcatcatatgacggaactgtgaggaatgcatatggaggtcaggttgttcagttcagctatggtagtgataagggtacatctactgcaactagttttgctaatgaaatacaaagtcagggcagtatcctacctgatggaacaggtggccaacctgttggttcattgtctgcctgtgccatttctgaggctgcatatagtgctttggatcaaccgattagtctacttgaaacttcaccattgctaaacctgaagagggtccttgaatgtggttctagaagaaggaattcagaccagactatgacgctatttttatcggataaacttggaaaggggagacattgtttcgagtatgcagctttagaaatcaagaattatttggagaagttgatcttttcggatattgtatctactgtcttaataacctactccccgcagaagtcaactgaaaactgtttcaacccttgggtttgccattttcatgtgtgcaaggagatcatgaaaaggaggcgcctttcagtgcattctattattggttctcttcagatgcactacgccaatgccaaaaaattatggaaaatcaatttgcctgacatccaagttacaagcaagtcttgttctcatactgatatgccaaataaagatgatatgttttgtatcaccgtcacgattgttgagccttccaaaaggtctcatatagaattggatgtgattctagccatagtgttaccttcccttctggaagcagttgtaaaaggattcccggagatcaagaaggtgcaaattttatggaatgatcgattcaaagtctcaaaatctcataaaacttctcctggtgaactttacttgagggtagctgtaacaggtggttttggtaaaacaaaactctggggcatgcttatgaatgattgccttccaataatggatttgatcgactggacacgtagtcatccagatgatattaatcagttttgctcggcatatggcatagattctggatggaaattttttctcaataatttgaagagcgctatatcagataccggcaagactatactaaatgagcatttgcatcttgtcgccgattgtctgtctgttaccggggagtttgttggcttaaactcaaaaggcttgagactacgacaagaacatgcatttgtctcatctccttttatgcaagcatgcttttcaaatcccagtgcttcctttgtcaaagctgcaaagaaaggagtttcggataatcttcaggggaccattgatgcattgtcatggggaagagttccttgcatcgggaccggtgcacagtttgatatactgtactctatgaaggatgaaatgatcaccgaaccggttgatgtgtataatcttcttggaaatattgttggttctcagaaccaagatgtagagtttgaagtaccccaagcttgtaacatcaagtccgagaaatatgtctctgaacttatggatgcacttggtgattctgcctttgaacggctgaaaaatattgaaacaaaaatattgagagaatttctgacgttaaatgacattcagaggctttcgcgaactttaaaggatatattgcacaagtctcctattggccaccggttaagcggagctgactggaattccgcaatgatggcattgtactttcatccgcgaagagatgagaaggtcggatctggagctcaagaaataaaggtagggtatcaccctgaacataaaaattctcgctgctttcttttggcaaggaccgatggggcaatcgtagatttctcgtatcataaatgcgttatcggggctcttgaggtcatcgcccccgataaggtccaattctacaagtcaaaatggtcacaatccggtaatctgtaa

SEQ ID NO: 430 - DNA, 6790 bp, Gossypium raimondii
  source 1..6790: mol_type = genomic DNA
cctaacctaaatcttaatcaagctattaatatctagatttttcttactcaaccctaccaaccaacccaaacaataaagtaaaaatcatgtatacaccaacatgctcaaaatttccctcacaaaaagaacaccagtttctataagtccctttctctttctctctcactctcactctcactcatttgactgtccaaatcttctgttatttcacttctcctcctctctttccttcagtcagggagaggaagagagaaaaattgtacaaaatcatggaagagaaatttctagttttatttgaaaaaaaaaacatttttttgggctacattttctcttccctccccactaattttatttttttggtttgatcagtcatttctggctcttacatcgagaacccatttggtttccttctttttaaatttttttagggttttagtgtttcaaaattttagtcagaaaattcagaagaaaccaaagatatttcagggttatttcatttaggtagactaaaaagaagaaattttcgagttttgtcttatagtttaaagcgagaaacatggaggaaaattcttcgtcagttattttagatggtgagatagttggtataaagttctgcctggcaacccctaaagaaattcttacagcatcagtcagtggctttcctattaaccatgttagtcaactctcgaattcctaccttggtttgccccttgaatttggtaaatgtagcgcatgtggtacatcagaacctggacaatgtgaaggtcattttggatatattgaattaccaataccaatataccatcctagccatatcagtgaattaaagcgactgttgagtttgctttgcttgaagtgcctaaaattgaagaacaagtttcagatgaaaagtggcagtgtcgctgaaagattgctatcgtcctgttgtgagaatactccacaagtttcaatcaaagaggttaaaacaacagatggtgcttgttatttggagttgaagcagccatctagacaatcaaaaactaactggaattttttagagagatatggttttcgctatggcgaccatcatactcgaactcttctgccttgtgaggtggtggaaatactgaagagaattccttcacagacaagacggaaactttctgggaaagggttcttcccacaagagggatatattttgcagtatttgcctgttcccccaaattgtttatctgttccggacgtttcggacggcgttagcgtcatgtcctcggatctttctacatcaatgctgagaaaggttctgaagcaagttgaaattatcaaaagttcaaggtctggtaccccaaattttgaatcgcatgaagtagaagctaacgatttgcaatcagcagttgagcaatatcttcaagttaggggtactgttaaagcatcccgcagcatagatgcacgatacggggttaacaaagatgctagtgattcgtcaacgaaagcatggctagagaaaatgagaacactgtttattagaaagggttcagggttttcttcacgcagtgtgattactggtgatccatacaaaaaggtgaatgagattggcattccatctgaaattgctcagagaattactttcgaggagagggttaacatgcacaacatgagatatttgcaaaatctggtggataacaagttgtgtttgacctacagagatggtggttctacatattcattgagggaggggtcaaaggggcatacatttttgagacctggtcaggtggtacatcggcgaattatggatggagatattgttttcataaataggccaccgactacacataagcattcattgcaggcactttctgtatatgtacatgatgatcatacagtgaagataaatcccctaatttgtgggccattaagtgctgattttgatggagattgtattcacttgttctatccgcagtctttatcagcaaaagcagaggtttatgagcttttttcagtggagaagcagttgcttagctcccatagtggcaacctaaatttgcagttggccactgattcattgttgtcactcagagttatgcttaagacatttttgtttaaaaaggcagatgctcaacaattgtctatgtttctctcttcagctttgccagaacctgcttttttaaagtgtaatcatgttgctccatgttggacagccttccaaattctgcagaccgcttttcctgcatgcctagattgctccagtgatagatacttaattggaaaaagtgatatattgaaagttgatttcaataaggaccttatgcagtctgtcatcaatgaagttgtggcatctattttctatgagaagggtccaaaagaggttcttaacttctttgattctttacaacctttattgatggagaatatctttgcagagggcttcactgtttgtctagaagatttttctgtctctagggaagttatagaaaatattcagaaggatattcaggttatttctcccttgctttatcagttaaggtcaacttataatgaattagttgagttgcaaatggagaatcacattcgagtagccaaagagccaatagctgatttcatactaaaaacatcctctttgggtaatttaattgactctaggagtgattctgctgtcaataaggttgttcagcagattggattcttgggaatgcaactttctgataaaggaaaattctactcgaagactttggttgaagatgtggctcaccaatttcaaagcatatatccttcagatgcaatcgattatccttctgctgagtttggactgattaaaagttgctttttccgtgggcttgatccgtatgagggcattgttcattcaatatctacaagagaagtaatggttcgctccactagaggattgtctgaacctgggaccttgtttaagaatttgatggccatccttcgtgatgttgttatttgttatgatggcacagttagaaatgtcagtagcaattcaataatacaatttcaatatgggctaagtgctagaactagacctcaattccccgctggtgaacctgtgggtgtcttagctgctactgcaatgtcaaatccggcatataaagcagtgcttgattcatctcctagtagcaattcttcttgggaactgatgaaggaaatattgctttgcaaagtaagtttcaaaaatgacccaattgaccgccgtgtaattctgtatttgaaagattgtgattgtgggagaaagtattgccaagaaaatgcagcatatcttgttaagaatcatttgagaagagtcaaactcaaagatattgcagtagatttcatcattgaataccagcagcagcaaattgtatcagaaatagaggcaggccttgttgggcatatccttctcaataaggatctattgaaggagttgagtgttagtgtgcaagagattcatatgaagtgccaagaaactattaactcctttcgtaagaagaaaaaaactgctgaaacttttaagaggacagatttgtttgtcagtgaaagttgttccatccagcaatcctgtgtggacaaatggcttgacatgccatgcttgatgttcttttttcgaaatacaaatgatgataatctagatagtgctatacaaatcctggctgacatcatctaccctgttcttctacaaacagtgatcaagggtgaccctcgtatctgttcagcaaaaattatctgggttaaccctgatgcaacaacttggataagaaatccaagtaagactcagaagggtgaattggctttggaagttgttttggagaaatctgctgtgaagcagaacggtgatgcctggaggactgtcatcgattgttgtcttccagtgctaaatataattgacacccataggtctataccttatgccataaagcaagttgagcaactgctcggaatttcttgtgcttttgaacaagcagtgcagcgtctctccacttctgtgtcaatggtgacaagaggtgttctaaaggaacacctcatgctcttagctaacagcatgacatgttgtggaaatttaatcggcttcaactctggtggttataaaacactatctcgctcattgaatattcaagtgccatttaccgaagcaacactgtttacaccaagaaagtgttttgaaagggctgctgagaaatgctatgatgattccttgtcgagcatagttgcatcctgttcttggggtaaacgtgtggctgttggaacaggatcacggtttgacctcctgtggaatcaggagtctggatctgatcaaatgagtggaatggatgtctacaactttctgcacatggttagtggtgctggtggaagcaattctaatactgcttgcctgggagaagaagttgatgatttaatggatgagtggtgcttgtctccagaccatagcactggtttagataagccggtgtttgaggacgcagctgaatttgagaataatttagacggtcagtcagctagtgcaaattgggaaaaagatgtgtctttggacaaggtgtcagatgttggttgggatgcatctggatggaataaaaatgctgaggatgttgacaaatttgctgcagctgcgaccagttcggagaagcaaaatgagtggtctggttggggtgcgagcaaatctaactcacaagatgttggttgggatgctttgtctggatggaataaaaatgcagaggatggtgacaaatttgcagctgctgcaaccagttcgaagaagcaaaatgagtgttctgattggggggcgagcaaatctaaatcacaagatgttgtctctccaaaagtggatgttggttgggatgccttgtctgcatggcataaaaatgcagaggatggtgacaattttgcagcagctgcatccagttcaaagaagcaaagcgagtggtctgattgggggatgagcaaatctaaatcacaagatgtctctccaaaaacggatggaacttgtatgaaagagcaaactgaattgtctggttgggagatgaaaaagtttgatacacgagatgtccttcctgtggaagagagagcctccaagcccaatggttgggattctggtgctagttggggaataatgagcaaagaatctgaagaacttgatgctagtgctgcagctccatggtctggttgggggacaaaagattcctcccctaaaaaatctttggacaaaacttccaaatctagtagctgggatactgtttcttcttggggaaggaagactgctgcagttcatgaatctggcttcattggaaacgataaccagccgggccaagggagaattgaaaatgaatgggataataaagcaagtcaagtaaagccggtgcagtcagcatctggttggaataacaaagtgacagaggaaatggtagttcaatcgacatctagttgggatgaaaaagcttcttgggaaaagccagttcagtcaatgtctggttgggtttcctcatctgctgcaggctcagatgagtcacctacaaaaggctgtagtaagaatagtaattgggaccaacaaaaggcacagacaatgaataatgcttgggaccaacaaaagtcacctgcaacaaatagttcttgggatcggcaaaaatcatctacggcaaataattcttgggatcaacaaaagccaccagcaaatagttcttgggaccaagaaaagtcacctacaattaataattcatgggaccagcaaaagtcacccgaatgttcacagggttggggcacccttaatgacttaaaccaacctgcaagttctagtggctgggatatgccacagggtgaggataacactcaaagtgaaaaacagcatcagtggggacagagtaagggctcacgtcgttgggcttcagatgctaataagaagagtcgtcctttgaagccagctcgaatgatgaatgatgattccagtatggctgcaatgtacactgttacaagacaaagactagacatgtttacttctgaggagaaagatattctcttggatgttgagccactcatgcagtcaatcagaaaaataatgcaccagactgggtacaacgatggggatccactgtctgccgatgatcagacgtttgtacttgataatgttttagctcatcatccagacaaagctgtaaaaatgggtgctggtattgattatgtcatggtaaacaagcacagccttttcctggataccaggtgcctctatgttgtcacaaccgatggtcataagcaagatttctcttatctcaagtgtctggagaacatgatcaaggggaaatatcctgatttggctgaagcttttgttgcaaaatatttccgaaaatctcgagggaaccgtgagcgaggtgttgctccagagaattctcaagggaaccgcgaccaaagtgttactcaagatgataactctcaagggaaccgtgaccgaagtgaccgaagtgttgctcaggacgataatgagggggaggttaagcagtaggcatctgtctctccaagtgttaatatcattcagagaggtctagttaggtattttgttcattcctgatatgaatcttttgatatgtacatgtaaagcagatgttagtgtgtttatccccctcaaaaattatactttcatagatcccaatatgaactgccctcttttagatggcacacattagcagttacatgtattctggttaaagtggtttttacttatgttgcttcatactctcttcttttttaccaaaggaggcaaatgccttaaaaactagtgaaatcaaattacacagtcccgagcatagttaaaatggggcctaacaaacatatgcgg

SEQ ID NO: 431 - DNA, 6188 bp, Gossypium raimondii
  source 1..6188: mol_type = genomic DNA
atggaggaaaattcttcgtcagttattttagatggtgagatagttggtataaagttctgcctggcaacccctaaagaaattcttacagcatcagtcagtggctttcctattaaccatgttagtcaactctcgaattcctaccttggtttgccccttgaatttggtaaatgtagcgcatgtggtacatcagaacctggacaatgtgaaggtcattttggatatattgaattaccaataccaatataccatcctagccatatcagtgaattaaagcgactgttgagtttgctttgcttgaagtgcctaaaattgaagaacaagtttcagatgaaaagtggcagtgtcgctgaaagattgctatcgtcctgttgtgagaatactccacaagtttcaatcaaagaggttaaaacaacagatggtgcttgttatttggagttgaagcagccatctagacaatcaaaaactaactggaattttttagagagatatggttttcgctatggcgaccatcatactcgaactcttctgccttgtgaggtggtggaaatactgaagagaattccttcacagacaagacggaaactttctgggaaagggttcttcccacaagagggatatattttgcagtatttgcctgttcccccaaattgtttatctgttccggacgtttcggacggcgttagcgtcatgtcctcggatctttctacatcaatgctgagaaaggttctgaagcaagttgaaattatcaaaagttcaaggtctggtaccccaaattttgaatcgcatgaagtagaagctaacgatttgcaatcagcagttgagcaatatcttcaagttaggggtactgttaaagcatcccgcagcatagatgcacgatacggggttaacaaagatgctagtgattcgtcaacgaaagcatggctagagaaaatgagaacactgtttattagaaagggttcagggttttcttcacgcagtgtgattactggtgatccatacaaaaaggtgaatgagattggcattccatctgaaattgctcagagaattactttcgaggagagggttaacatgcacaacatgagatatttgcaaaatctggtggataacaagttgtgtttgacctacagagatggtggttctacatattcattgagggaggggtcaaaggggcatacatttttgagacctggtcaggtggtacatcggcgaattatggatggagatattgttttcataaataggccaccgactacacataagcattcattgcaggcactttctgtatatgtacatgatgatcatacagtgaagataaatcccctaatttgtgggccattaagtgctgattttgatggagattgtattcacttgttctatccgcagtctttatcagcaaaagcagaggtttatgagcttttttcagtggagaagcagttgcttagctcccatagtggcaacctaaatttgcagttggccactgattcattgttgtcactcagagttatgcttaagacatttttgtttaaaaaggcagatgctcaacaattgtctatgtttctctcttcagctttgccagaacctgcttttttaaagtgtaatcatgttgctccatgttggacagccttccaaattctgcagaccgcttttcctgcatgcctagattgctccagtgatagatacttaattggaaaaagtgatatattgaaagttgatttcaataaggaccttatgcagtctgtcatcaatgaagttgtggcatctattttctatgagaagggtccaaaagaggttcttaacttctttgattctttacaacctttattgatggagaatatctttgcagagggcttcactgtttgtctagaagatttttctgtctctagggaagttatagaaaatattcagaaggatattcaggttatttctcccttgctttatcagttaaggtcaacttataatgaattagttgagttgcaaatggagaatcacattcgagtagccaaagagccaatagctgatttcatactaaaaacatcctctttgggtaatttaattgactctaggagtgattctgctgtcaataaggttgttcagcagattggattcttgggaatgcaactttctgataaaggaaaattctactcgaagactttggttgaagatgtggctcaccaatttcaaagcatatatccttcagatgcaatcgattatccttctgctgagtttggactgattaaaagttgctttttccgtgggcttgatccgtatgagggcattgttcattcaatatctacaagagaagtaatggttcgctccactagaggattgtctgaacctgggaccttgtttaagaatttgatggccatccttcgtgatgttgttatttgttatgatggcacagttagaaatgtcagtagcaattcaataatacaatttcaatatgggctaagtgctagaactagacctcaattccccgctggtgaacctgtgggtgtcttagctgctactgcaatgtcaaatccggcatataaagcagtgcttgattcatctcctagtagcaattcttcttgggaactgatgaaggaaatattgctttgcaaagtaagtttcaaaaatgacccaattgaccgccgtgtaattctgtatttgaaagattgtgattgtgggagaaagtattgccaagaaaatgcagcatatcttgttaagaatcatttgagaagagtcaaactcaaagatattgcagtagatttcatcattgaataccagcagcagcaaattgtatcagaaatagaggcaggccttgttgggcatatccttctcaataaggatctattgaaggagttgagtgttagtgtgcaagagattcatatgaagtgccaagaaactattaactcctttcgtaagaagaaaaaaactgctgaaacttttaagaggacagatttgtttgtcagtgaaagttgttccatccagcaatcctgtgtggacaaatggcttgacatgccatgcttgatgttcttttttcgaaatacaaatgatgataatctagatagtgctatacaaatcctggctgacatcatctaccctgttcttctacaaacagtgatcaagggtgaccctcgtatctgttcagcaaaaattatctgggttaaccctgatgcaacaacttggataagaaatccaagtaagactcagaagggtgaattggctttggaagttgttttggagaaatctgctgtgaagcagaacggtgatgcctggaggactgtcatcgattgttgtcttccagtgctaaatataattgacacccataggtctataccttatgccataaagcaagttgagcaactgctcggaatttcttgtgcttttgaacaagcagtgcagcgtctctccacttctgtgtcaatggtgacaagaggtgttctaaaggaacacctcatgctcttagctaacagcatgacatgttgtggaaatttaatcggcttcaactctggtggttataaaacactatctcgctcattgaatattcaagtgccatttaccgaagcaacactgtttacaccaagaaagtgttttgaaagggctgctgagaaatgctatgatgattccttgtcgagcatagttgcatcctgttcttggggtaaacgtgtggctgttggaacaggatcacggtttgacctcctgtggaatcaggagtctggatctgatcaaatgagtggaatggatgtctacaactttctgcacatggttagtggtgctggtggaagcaattctaatactgcttgcctgggagaagaagttgatgatttaatggatgagtggtgcttgtctccagaccatagcactggtttagataagccggtgtttgaggacgcagctgaatttgagaataatttagacggtcagtcagctagtgcaaattgggaaaaagatgtgtctttggacaaggtgtcagatgttggttgggatgcatctggatggaataaaaatgctgaggatgttgacaaatttgctgcagctgcgaccagttcggagaagcaaaatgagtggtctggttggggtgcgagcaaatctaactcacaagatgttggttgggatgctttgtctggatggaataaaaatgcagaggatggtgacaaatttgcagctgctgcaaccagttcgaagaagcaaaatgagtgttctgattggggggcgagcaaatctaaatcacaagatgttgtctctccaaaagtggatgttggttgggatgccttgtctgcatggcataaaaatgcagaggatggtgacaattttgcagcagctgcatccagttcaaagaagcaaagcgagtggtctgattgggggatgagcaaatctaaatcacaagatgtctctccaaaaacggatggaacttgtatgaaagagcaaactgaattgtctggttgggagatgaaaaagtttgatacacgagatgtccttcctgtggaagagagagcctccaagcccaatggttgggattctggtgctagttggggaataatgagcaaagaatctgaagaacttgatgctagtgctgcagctccatggtctggttgggggacaaaagattcctcccctaaaaaatctttggacaaaacttccaaatctagtagctgggatactgtttcttcttggggaaggaagactgctgcagttcatgaatctggcttcattggaaacgataaccagccgggccaagggagaattgaaaatgaatgggataataaagcaagtcaagtaaagccggtgcagtcagcatctggttggaataacaaagtgacagaggaaatggtagttcaatcgacatctagttgggatgaaaaagcttcttgggaaaagccagttcagtcaatgtctggttgggtttcctcatctgctgcaggctcagatgagtcacctacaaaaggctgtagtaagaatagtaattgggaccaacaaaaggcacagacaatgaataatgcttgggaccaacaaaagtcacctgcaacaaatagttcttgggatcggcaaaaatcatctacggcaaataattcttgggatcaacaaaagccaccagcaaatagttcttgggaccaagaaaagtcacctacaattaataattcatgggaccagcaaaagtcacccgaatgttcacagggttggggcacccttaatgacttaaaccaacctgcaagttctagtggctgggatatgccacagggtgaggataacactcaaagtgaaaaacagcatcagtggggacagagtaagggctcacgtcgttgggcttcagatgctaataagaagagtcgtcctttgaagccagctcgaatgatgaatgatgattccagtatggctgcaatgtacactgttacaagacaaagactagacatgtttacttctgaggagaaagatattctcttggatgttgagccactcatgcagtcaatcagaaaaataatgcaccagactgggtacaacgatggggatccactgtctgccgatgatcagacgtttgtacttgataatgttttagctcatcatccagacaaagctgtaaaaatgggtgctggtattgattatgtcatgagaagaaaagaaaggattaatcaattatttgttgtgcatcaccatttgatgcaaaacaggtaaacaagcacagccttttcctggataccaggtgcctctatgttgtcacaaccgatggtcataagcaagatttctcttatctcaagtgtctggagaacatgatcaaggggaaatatcctgatttggctgaagcttttgttgcaaaatatttccgaaaatctcgagggaaccgtgagcgaggtgttgctccagagaattctcaagggaaccgcgaccaaagtgttactcaagatgataactctcaagggaaccgtgaccgaagtgaccgaagtgttgctcaggacgataatgagggggaggttaagcagtaggcatctgtctctccaagtgttaatatcattcagagaggtctagttaggtattttgttcattcctgatatgaatcttttgatatgtacatgtaaagcagatgttagtgtgtttatccccctcaaaaattatactttcatagatcccaatatgaactgccctcttttagatggcacacattagcagttacatgtattctggttaaagtggtttttacttatgttgcttca

SEQ ID NO: 432 - DNA, 6675 bp, Gossypium raimondii
  source 1..6675: mol_type = genomic DNA
cctaacctaaatcttaatcaagctattaatatctagatttttcttactcaaccctaccaaccaacccaaacaataaagtaaaaatcatgtatacaccaacatgctcaaaatttccctcacaaaaagaacaccagtttctataagtccctttctctttctctctcactctcactctcactcatttgactgtccaaatcttctgttatttcacttctcctcctctctttccttcagtcagggagaggaagagagaaaaattgtacaaaatcatggaagagaaatttctagttttatttgaaaaaaaaaacatttttttgggctacattttctcttccctccccactaattttatttttttggtttgatcagtcatttctggctcttacatcgagaacccatttggtttccttctttttaaatttttttagggttttagtgtttcaaaattttagtcagaaaattcagaagaaaccaaagatatttcagggttatttcatttaggtagactaaaaagaagaaattttcgagttttgtcttatagtttaaagcgagaaacatggaggaaaattcttcgtcagttattttagatggtgagatagttggtataaagttctgcctggcaacccctaaagaaattcttacagcatcagtcagtggctttcctattaaccatgttagtcaactctcgaattcctaccttggtttgccccttgaatttggtaaatgtagcgcatgtggtacatcagaacctggacaatgtgaaggtcattttggatatattgaattaccaataccaatataccatcctagccatatcagtgaattaaagcgactgttgagtttgctttgcttgaagtgcctaaaattgaagaacaagtttcagatgaaaagtggcagtgtcgctgaaagattgctatcgtcctgttgtgagaatactccacaagtttcaatcaaagaggttaaaacaacagatggtgcttgttatttggagttgaagcagccatctagacaatcaaaaactaactggaattttttagagagatatggttttcgctatggcgaccatcatactcgaactcttctgccttgtgaggtggtggaaatactgaagagaattccttcacagacaagacggaaactttctgggaaagggttcttcccacaagagggatatattttgcagtatttgcctgttcccccaaattgtttatctgttccggacgtttcggacggcgttagcgtcatgtcctcggttctgaagcaagttgaaattatcaaaagttcaaggtctggtaccccaaattttgaatcgcatgaagtagaagctaacgatttgcaatcagcagttgagcaatatcttcaagttaggggtactgttaaagcatcccgcagcatagatgcacgatacggggttaacaaagatgctagtgattcgtcaacgaaagcatggctagagaaaatgagaacactgtttattagaaagggttcagggttttcttcacgcagtgtgattactggtgatccatacaaaaaggtgaatgagattggcattccatctgaaattgctcagagaattactttcgaggagagggttaacatgcacaacatgagatatttgcaaaatctggtggataacaagttgtgtttgacctacagagatggtggttctacatattcattgagggaggggtcaaaggggcatacatttttgagacctggtcaggtggtacatcggcgaattatggatggagatattgttttcataaataggccaccgactacacataagcattcattgcaggcactttctgtatatgtacatgatgatcatacagtgaagataaatcccctaatttgtgggccattaagtgctgattttgatggagattgtattcacttgttctatccgcagtctttatcagcaaaagcagaggtttatgagcttttttcagtggagaagcagttgcttagctcccatagtggcaacctaaatttgcagttggccactgattcattgttgtcactcagagttatgcttaagacatttttgtttaaaaaggcagatgctcaacaattgtctatgtttctctcttcagctttgccagaacctgcttttttaaagtgtaatcatgttgctccatgttggacagccttccaaattctgcagaccgcttttcctgcatgcctagattgctccagtgatagatacttaattggaaaaagtgatatattgaaagttgatttcaataaggaccttatgcagtctgtcatcaatgaagttgtggcatctattttctatgagaagggtccaaaagaggttcttaacttctttgattctttacaacctttattgatggagaatatctttgcagagggcttcactgtttgtctagaagatttttctgtctctagggaagttatagaaaatattcagaaggatattcaggttatttctcccttgctttatcagttaaggtcaacttataatgaattagttgagttgcaaatggagaatcacattcgagtagccaaagagccaatagctgatttcatactaaaaacatcctctttgggtaatttaattgactctaggagtgattctgctgtcaataaggttgttcagcagattggattcttgggaatgcaactttctgataaaggaaaattctactcgaagactttggttgaagatgtggctcaccaatttcaaagcatatatccttcagatgcaatcgattatccttctgctgagtttggactgattaaaagttgctttttccgtgggcttgatccgtatgagggcattgttcattcaatatctacaagagaagtaatggttcgctccactagaggattgtctgaacctgggaccttgtttaagaatttgatggccatccttcgtgatgttgttatttgttatgatggcacagttagaaatgtcagtagcaattcaataatacaatttcaatatgggctaagtgctagaactagacctcaattccccgctggtgaacctgtgggtgtcttagctgctactgcaatgtcaaatccggcatataaagcagtgcttgattcatctcctagtagcaattcttcttgggaactgatgaaggaaatattgctttgcaaagtaagtttcaaaaatgacccaattgaccgccgtgtaattctgtatttgaaagattgtgattgtgggagaaagtattgccaagaaaatgcagcatatcttgttaagaatcatttgagaagagtcaaactcaaagatattgcagtagatttcatcattgaataccagcagcagcaaattgtatcagaaatagaggcaggccttgttgggcatatccttctcaataaggatctattgaaggagttgagtgttagtgtgcaagagattcatatgaagtgccaagaaactattaactcctttcgtaagaagaaaaaaactgctgaaacttttaagaggacagatttgtttgtcagtgaaagttgttccatccagcaatcctgtgtggacaaatggcttgacatgccatgcttgatgttcttttttcgaaatacaaatgatgataatctagatagtgctatacaaatcctggctgacatcatctaccctgttcttctacaaacagtgatcaagggtgaccctcgtatctgttcagcaaaaattatctgggttaaccctgatgcaacaacttggataagaaatccaagtaagactcagaagggtgaattggctttggaagttgttttggagaaatctgctgtgaagcagaacggtgatgcctggaggactgtcatcgattgttgtcttccagtgctaaatataattgacacccataggtctataccttatgccataaagcaagttgagcaactgctcggaatttcttgtgcttttgaacaagcagtgcagcgtctctccacttctgtgtcaatggtgacaagaggtgttctaaaggaacacctcatgctcttagctaacagcatgacatgttgtggaaatttaatcggcttcaactctggtggttataaaacactatctcgctcattgaatattcaagtgccatttaccgaagcaacactgtttacaccaagaaagtgttttgaaagggctgctgagaaatgctatgatgattccttgtcgagcatagttgcatcctgttcttggggtaaacgtgtggctgttggaacaggatcacggtttgacctcctgtggaatcaggagtctggatctgatcaaatgagtggaatggatgtctacaactttctgcacatggttagtggtgctggtggaagcaattctaatactgcttgcctgggagaagaagttgatgatttaatggatgagtggtgcttgtctccagaccatagcactggtttagataagccggtgtttgaggacgcagctgaatttgagaataatttagacggtcagtcagctagtgcaaattgggaaaaagatgtgtctttggacaaggtgtcagatgttggttgggatgcatctggatggaataaaaatgctgaggatgttgacaaatttgctgcagctgcgaccagttcggagaagcaaaatgagtggtctggttggggtgcgagcaaatctaactcacaagatgttggttgggatgctttgtctggatggaataaaaatgcagaggatggtgacaaatttgcagctgctgcaaccagttcgaagaagcaaaatgagtgttctgattggggggcgagcaaatctaaatcacaagatgttgtctctccaaaagtggatgttggttgggatgccttgtctgcatggcataaaaatgcagaggatggtgacaattttgcagcagctgcatccagttcaaagaagcaaagcgagtggtctgattgggggatgagcaaatctaaatcacaagatgtctctccaaaaacggatggaacttgtatgaaagagcaaactgaattgtctggttgggagatgaaaaagtttgatacacgagatgtccttcctgtggaagagagagcctccaagcccaatggttgggattctggtgctagttggggaataatgagcaaagaatctgaagaacttgatgctagtgctgcagctccatggtctggttgggggacaaaagattcctcccctaaaaaatctttggacaaaacttccaaatctagtagctgggatactgtttcttcttggggaaggaagactgctgcagttcatgaatctggcttcattggaaacgataaccagccgggccaagggagaattgaaaatgaatgggataataaagcaagtcaagtaaagccggtgcagtcagcatctggttggaataacaaagtgacagaggaaatggtagttcaatcgacatctagttgggatgaaaaagcttcttgggaaaagccagttcagtcaatgtctggttgggtttcctcatctgctgcaggctcagatgagtcacctacaaaaggctgtagtaagaatagtaattgggaccaacaaaaggcacagacaatgaataatgcttgggaccaacaaaagtcacctgcaacaaatagttcttgggatcggcaaaaatcatctacggcaaataattcttgggatcaacaaaagccaccagcaaatagttcttgggaccaagaaaagtcacctacaattaataattcatgggaccagcaaaagtcacccgaatgttcacagggttggggcacccttaatgacttaaaccaacctgcaagttctagtggctgggatatgccacagggtgaggataacactcaaagtgaaaaacagcatcagtggggacagagtaagggctcacgtcgttgggcttcagatgctaataagaagagtcgtcctttgaagccagctcgaatgatgaatgatgattccagtatggctgcaatgtacactgttacaagacaaagactagacatgtttacttctgaggagaaagatattctcttggatgttgagccactcatgcagtcaatcagaaaaataatgcaccagactggaaaattcatatttgaaggtacaacgatggggatccactgtctgccgatgatcagacgtttgtacttgataatgttttagctcatcatccagacaaagctgtaaaaatgggtgctggtattgattatgtcatggtaaacaagcacagccttttcctggataccaggtgcctctatgttgtcacaaccgatggtcataagcaagatttctcttatctcaagtgtctggagaacatgatcaaggggaaatatcctgatttggctgaagcttttgttgcaaaatatttccgaaaatctcgagggaaccgtgagcgaggtgttgctccagagaattctcaagggaaccgcgaccaaagtgttactcaagatgataactctcaagggaaccgtgaccgaagtgaccgaagtgttgctcaggacgataatgagggggaggttaagcagtaggcatctgtctctccaagtgttaatatcattcagagaggtctagttaggtattttgttcattcctgatatgaatcttttgatatgtacatgtaaagcagatgttagtgtgtttatccccctcaaaaattatactttcatagatcccaatatgaactgccctcttttagatggcacacattagcagttacatgtattctggttaaagtggtttttacttatgttgcttca

SEQ ID NO: 433 - DNA, 5999 bp, Gossypium raimondii
  source 1..5999: mol_type = genomic DNA
atggaggaaaattcttcgtcagttattttagatggtgagatagttggtataaagttctgcctggcaacccctaaagaaattcttacagcatcagtcagtggctttcctattaaccatgttagtcaactctcgaattcctaccttggtttgccccttgaatttggtaaatgtagcgcatgtggtacatcagaacctggacaatgtgaaggtcattttggatatattgaattaccaataccaatataccatcctagccatatcagtgaattaaagcgactgttgagtttgctttgcttgaagtgcctaaaattgaagaacaagtttcagatgaaaagtggcagtgtcgctgaaagattgctatcgtcctgttgtgagaatactccacaagtttcaatcaaagaggttaaaacaacagatggtgcttgttatttggagttgaagcagccatctagacaatcaaaaactaactggaattttttagagagatatggttttcgctatggcgaccatcatactcgaactcttctgccttgtgaggtggtggaaatactgaagagaattccttcacagacaagacggaaactttctgggaaagggttcttcccacaagagggatatattttgcagtatttgcctgttcccccaaattgtttatctgttccggacgtttcggacggcgttagcgtcatgtcctcggatctttctacatcaatgctgagaaaggttctgaagcaagttgaaattatcaaaagttcaaggtctggtaccccaaattttgaatcgcatgaagtagaagctaacgatttgcaatcagcagttgagcaatatcttcaagttaggggtactgttaaagcatcccgcagcatagatgcacgatacggggttaacaaagatgctagtgattcgtcaacgaaagcatggctagagaaaatgagaacactgtttattagaaagggttcagggttttcttcacgcagtgtgattactggtgatccatacaaaaaggtgaatgagattggcattccatctgaaattgctcagagaattactttcgaggagagggttaacatgcacaacatgagatatttgcaaaatctggtggataacaagttgtgtttgacctacagagatggtggttctacatattcattgagggaggggtcaaaggggcatacatttttgagacctggtcaggtggtacatcggcgaattatggatggagatattgttttcataaataggccaccgactacacataagcattcattgcaggcactttctgtatatgtacatgatgatcatacagtgaagataaatcccctaatttgtgggccattaagtgctgattttgatggagattgtattcacttgttctatccgcagtctttatcagcaaaagcagaggtttatgagcttttttcagtggagaagcagttgcttagctcccatagtggcaacctaaatttgcagttggccactgattcattgttgtcactcagagttatgcttaagacatttttgtttaaaaaggcagatgctcaacaattgtctatgtttctctcttcagctttgccagaacctgcttttttaaagtgtaatcatgttgctccatgttggacagccttccaaattctgcagaccgcttttcctgcatgcctagattgctccagtgatagatacttaattggaaaaagtgatatattgaaagttgatttcaataaggaccttatgcagtctgtcatcaatgaagttgtggcatctattttctatgagaagggtccaaaagaggttcttaacttctttgattctttacaacctttattgatggagaatatctttgcagagggcttcactgtttgtctagaagatttttctgtctctagggaagttatagaaaatattcagaaggatattcaggttatttctcccttgctttatcagttaaggtcaacttataatgaattagttgagttgcaaatggagaatcacattcgagtagccaaagagccaatagctgatttcatactaaaaacatcctctttgggtaatttaattgactctaggagtgattctgctgtcaataaggttgttcagcagattggattcttgggaatgcaactttctgataaaggaaaattctactcgaagactttggttgaagatgtggctcaccaatttcaaagcatatatccttcagatgcaatcgattatccttctgctgagtttggactgattaaaagttgctttttccgtgggcttgatccgtatgagggcattgttcattcaatatctacaagagaagtaatggttcgctccactagaggattgtctgaacctgggaccttgtttaagaatttgatggccatccttcgtgatgttgttatttgttatgatggcacagttagaaatgtcagtagcaattcaataatacaatttcaatatgggctaagtgctagaactagacctcaattccccgctggtgaacctgtgggtgtcttagctgctactgcaatgtcaaatccggcatataaagcagtgcttgattcatctcctagtagcaattcttcttgggaactgatgaaggaaatattgctttgcaaagtaagtttcaaaaatgacccaattgaccgccgtgtaattctgtatttgaaagattgtgattgtgggagaaagtattgccaagaaaatgcagcatatcttgttaagaatcatttgagaagagtcaaactcaaagatattgcagtagatttcatcattgaataccagcagcagcaaattgtatcagaaatagaggcaggccttgttgggcatatccttctcaataaggatctattgaaggagttgagtgttagtgtgcaagagattcatatgaagtgccaagaaactattaactcctttcgtaagaagaaaaaaactgctgaaacttttaagaggacagatttgtttgtcagtgaaagttgttccatccagcaatcctgtgtggacaaatggcttgacatgccatgcttgatgttcttttttcgaaatacaaatgatgataatctagatagtgctatacaaatcctggctgacatcatctaccctgttcttctacaaacagtgatcaagggtgaccctcgtatctgttcagcaaaaattatctgggttaaccctgatgcaacaacttggataagaaatccaagtaagactcagaagggtgaattggctttggaagttgttttggagaaatctgctgtgaagcagaacggtgatgcctggaggactgtcatcgattgttgtcttccagtgctaaatataattgacacccataggtctataccttatgccataaagcaagttgagcaactgctcggaatttcttgtgcttttgaacaagcagtgcagcgtctctccacttctgtgtcaatggtgacaagaggtgttctaaaggaacacctcatgctcttagctaacagcatgacatgttgtggaaatttaatcggcttcaactctggtggttataaaacactatctcgctcattgaatattcaagtgccatttaccgaagcaacactgtttacaccaagaaagtgttttgaaagggctgctgagaaatgctatgatgattccttgtcgagcatagttgcatcctgttcttggggtaaacgtgtggctgttggaacaggatcacggtttgacctcctgtggaatcaggagtctggatctgatcaaatgagtggaatggatgtctacaactttctgcacatggttagtggtgctggtggaagcaattctaatactgcttgcctgggagaagaagttgatgatttaatggatgagtggtgcttgtctccagaccatagcactggtttagataagccggtgtttgaggacgcagctgaatttgagaataatttagacggtcagtcagctagtgcaaattgggaaaaagatgtgtctttggacaaggtgtcagatgttggttgggatgcatctggatggaataaaaatgctgaggatgttgacaaatttgctgcagctgcgaccagttcggagaagcaaaatgagtggtctggttggggtgcgagcaaatctaactcacaagatatgttgtctctccaaaagtggatgttggttgggatgccttgtctgcatggcataaaaatgcagaggatggtgacaattttgcagcagctgcatccagttcaaagaagcaaagcgagtggtctgattgggggatgagcaaatctaaatcacaagatgtctctccaaaaacggatggaacttgtatgaaagagcaaactgaattgtctggttgggagatgaaaaagtttgatacacgagatgtccttcctgtggaagagagagcctccaagcccaatggttgggattctggtgctagttggggaataatgagcaaagaatctgaagaacttgatgctagtgctgcagctccatggtctggttgggggacaaaagattcctcccctaaaaaatctttggacaaaacttccaaatctagtagctgggatactgtttcttcttggggaaggaagactgctgcagttcatgaatctggcttcattggaaacgataaccagccgggccaagggagaattgaaaatgaatgggataataaagcaagtcaagtaaagccggtgcagtcagcatctggttggaataacaaagtgacagaggaaatggtagttcaatcgacatctagttgggatgaaaaagcttcttgggaaaagccagttcagtcaatgtctggttgggtttcctcatctgctgcaggctcagatgagtcacctacaaaaggctgtagtaagaatagtaattgggaccaacaaaaggcacagacaatgaataatgcttgggaccaacaaaagtcacctgcaacaaatagttcttgggatcggcaaaaatcatctacggcaaataattcttgggatcaacaaaagccaccagcaaatagttcttgggaccaagaaaagtcacctacaattaataattcatgggaccagcaaaagtcacccgaatgttcacagggttggggcacccttaatgacttaaaccaacctgcaagttctagtggctgggatatgccacagggtgaggataacactcaaagtgaaaaacagcatcagtggggacagagtaagggctcacgtcgttgggcttcagatgctaataagaagagtcgtcctttgaagccagctcgaatgatgaatgatgattccagtatggctgcaatgtacactgttacaagacaaagactagacatgtttacttctgaggagaaagatattctcttggatgttgagccactcatgcagtcaatcagaaaaataatgcaccagactgggtacaacgatggggatccactgtctgccgatgatcagacgtttgtacttgataatgttttagctcatcatccagacaaagctgtaaaaatgggtgctggtattgattatgtcatggtaaacaagcacagccttttcctggataccaggtgcctctatgttgtcacaaccgatggtcataagcaagatttctcttatctcaagtgtctggagaacatgatcaaggggaaatatcctgatttggctgaagcttttgttgcaaaatatttccgaaaatctcgagggaaccgtgagcgaggtgttgctccagagaattctcaagggaaccgcgaccaaagtgttactcaagatgataactctcaagggaaccgtgaccgaagtgaccgaagtgttgctcaggacgataatgagggggaggttaagcagtaggcatctgtctctccaagtgttaatatcattcagagaggtctagttaggtattttgttcattcctgatatgaatcttttgatatgtacatgtaaagcagatgttagtgtgtttatccccctcaaaaattatactttcatagatcccaatatgaactgccctcttttagatggcacacattagcagttacatgtattctggttaaagtggtttttacttatgttgcttca

SEQ ID NO: 434 - DNA, 2952 bp, Gossypium raimondii
  source 1..2952: mol_type = genomic DNA
agccaaagcttcaagtcaaatggaaataaagatgctaaaatcatgaatattgatagaatcaatggaatgggcttaaggagatctccaagattgagttcagccccgcctgaaaccaaagattgctcttcaaaaactatctttaaatcctctgagaatggttcctactctgaaacaagaccttctggaacggataaagaagctgttctttcaaagcgcaatgacccaaacttttctgatgaaaagcagaggagaaagtctcctagatttgttgcagggactgaacattgtggcggtaatgggtctttgagaaaatttcaagatcttaactcaggctttccattgaagcagttaagaagatctctgaaaattagccaggctactaaaaatgtttgccctgatgtctctattacaagattggatatggatgaaaggggctcttctggagagaagcggttgggaatatctcccagttccgtgcacgcaacagaaaatggtgacagtaatgcatcttttagagaacataggagggaaatgtctgttgaaaagcagttgaaaacaccttcctcactttctacattattggctgaaggtgatagtgctgaagtaaactcttcttccaatagattatccaattcatgtgatgaacagccttccaagaaatttaagatctcatcagcagaatcagatattgatgatgatgatgatgaagacaagatagtttggaatgtggaatgccattatgctcaagctgaaattgatggatgtaccataaatcttggggattgtgtttatattaagggtgaagaagcaaaacaccacattggcaggatattagaattttttagaacaacagatggagaaaattattttagagtccagtggttttatagagctgaagatacagttatgaaacaagaggctactcttcatggcgaaagtcgtctattttattcaaccatagtgaatgataatctcatagattgcattatttcaaaagttagtgttactcaaatatcacctaagtttggttcaaagtcaaattctcttccccaatctgatttctattttgacatggagtattgtgtggattattcaacattctgcaccttgccaactgatatattttcagataattctttcaagagccacagttcctcaaagtgctacgaggaggttttccctacgactcctgccttttcagcaaatattcctagttttggaacttacaaggcacaactcacaaaactagatctttactctggttgtggtggaatgtcaactggtttatgccttggtgcaaaagcttcgtgcaatgatctagtggcgaaatgggcagttgacagcgataagtcgccatgtgaaagcttgaaattaaatcatccagagacacatgtcaggaatgaagctgctgatgattttcttcaactactgaaggaatgggaaaagctttgcaaacaatatagagttaaaaatttagaaagaacatatccatcaagatcgagaatctccgaaactgtctggaataatgccagttctgcaaaagattctggtactcctgatgaacatgaagtttccagtctcgttgatatttgttatggagatccctgcgacacaggcaaccgtggtctaaagtttaaggtctgctggaagggttattctgcaagtgatgatacatgggaaccaattgaaagcttaaggaattgccaagaatgtattcaggaatttgtaacaaatggattcaggtccaaaatcttgcccctccgtggggatgttgatgttatttgtggtggccctccatgccaagggataagtggttataatcgccatagaaatgttgattctccactggatgatgaaaaaaatcgtcaaattgtggtcttcgtggacatagtggaatatttaaaacctaagtttgttttaatggaaaatgtggttgatattatgagacttgtcaaggcttcacttggaagatatgctttaagtcggttggtacttatgaaataccaagcaaggcttggaatagttgcagctggttgttatggtcttcctcaatttcggttgcgtgtttttttgtttggagcacattctagtgagaaacttccacagtttccacttcctactcatgatgttattatcagatatgggtatcctgctgagtttgagcgtaatacagttgcatatgatgaaggccaaccacgtcagctggaagatgctcttgttcttcgtgattccttttctgatcttccacctgttgcaaataatgaagcccgcgaaaaaatgacatatgaaaagcctcctgaaactgactttcaaagatatataagatcaagtgaatataagatgactggttctgaattaaatggtgccaaaagaataacgaacctgttgtatgaccatcggccttctccgttatctgaggatgattatattagagtttgtctgaatccaaagagaaagggggcaaattttcgagatctccctggtgtaattgttggaacagacaatgtggcttggaggggtcgaacacaggaacagcagtttttaccatctggaaagccattggtaccagattatgtctttaccttgaaacaaggaaaatctaaaagaccatttgcaagattatggtgggatgagacaatgccgactgttctaactgcacctttttgtcacagccaggcaatattacatccagagcaagactggcttctcacagcccgggaatgggcaagactgcaaggttttcctgactattatagattccgcgggacaattaaagagaggtattgtcaaattgggaatgctgttgctgttccagttggtcgagccttaggatacacaatggggatggcatttcagaaagggagcgggaatgaaccactgatgatcctccctcctaaagttttctctttccaccaatatccagttagcaaaatcattgtcccaaaacactga

SEQ ID NO: 435 - DNA, 5183 bp, Gossypium raimondii
  source 1..5183: mol_type = genomic DNA
aaagaagtttcgattttttttgtgtgtttttggcgtttggggaaaaaaacttgtaaaaaagttaaaaatggtagaaaattttcttttttggaggaatggcgccaacatttttttccaaaatcagtgttcccgcctttctttgcttttccccttcatttatttataatgttcagtgtttcttccctttctattcatcttcactaaacactgttctcactgaacgaagccaaacatcaaagaaacagtgagtttagagctaaggttttcgtctcttctccaagtcatgggatctgtcgcgcttttggattctaattccccttcaggaatgaagaagaataagaaaggcaagaataaatctgctaaatcttccaccaagaaagagatggaaactgataaaaaagtacagaagcgtaatagtgctcaggaaaatggggagccagtcccttcaaaaaggccaaagagagctgctgcctgcactgattttaaggagaaagcagtttgcatatctgaaaaggattcagttgttgagacaaagaaggatatggtagtagaagatgaaatcctagctgtagcgctgacttgtgaaaaagatgatggccggcctaataggaggctaactgattttgtattgcataattcagaaggtcttccacaaccctttgagatgttggaagtcattgacatgttcataactggtttgatattgccgcttgaagaaaatactgacaaggaaaaagtaaaggagaagagtgttagatgtgaaggatttggacatgttgagtcttgggacatctctggttatgaagatggttgtccagtgatatggctttcaactgatgtagctgattacacctgctgtaagccaagtggcagctataaaaaatattatgaacatttctttgaaaaagctcgagcttgtgtagaggtttataaaaaactttcaaagccttctggtggaaatcctgacttaagtcttgatgaattgcttgctggtgttgttcggtccatgagtggaagcaagagcttctctcgtggggcatcaattcgggattttgttatttcccagggagaatttatttataatcaactgattggtttggatgcaacttcgagggtaaatgaccaggtatttgctggattgcctgttcttactgccctcaaagatgagagcaggaagcgtgaaaatatagggctagacatagcactgttttctggtggtgctctgactattggtaaaaaaggagagggggaaagtaaattggatgagacatattcatctacttttacagctgaggaagatgaggatgcaaagttggcaaaactgttgcaagaggaagaatactggaaatctatgaaacagaagaggaaccaaggctcagcttctatgtcaaacaaattctatatcaaaatcaatgaagatgagattgcaaatgattatcctcttccagcatactacaagaattctaatgaagaaactgatgaacttgtagtttttgaaagtgactttgatgtgtgtgatcctgaggaactccctcgaagcgtgctccacaactggtcattttacaattcagactcaaggctgatttccttggagctgcttcctatgaaaccatgtgctgacattgatgttaccatttttggttctggggttatgactgctgatgatggaatcggattctgtcttgacaatgaccttagtcagtctacttcaggttcttcgagtgtgctgaatgctgatggaattccaatttttttgagtgctattaaggaatggatgattgaatttggatcatcaatgatattcatctcaatcaggacagacatggcctggtatagacttggcaaaccatcaaagcaatatcttccatggtatgaaccagtactcaaaacagcaagggttgcaataagcattattacattgttgaaggagcaaacacgagtatcacgcctctctttcaatgatgtaattaagagggtgtctgagttcaagaaggataatcgtgcttttatatcttctgatccagcagctgttgagagatatattgttgtgcatggacagataatactacaactctttgcagagtttcctgatgaaaagattaaaaagtgtgcatttgtggttggccttgcaaataaaatggaagagagacaccatacaaaatggttagtcaagaagaagaaagttgtacacaagaatgaaccaaatttaaatcctcgagcagcaatgatgcctatagcttctataagaaaggctatgcaggcgaccacaacaaggctaatcaataggatttggggggaatactattcaaactactctccagaagattcaaaggaggaaactaattgtgaggtgaaagatgaagatgaaaatgaggaacaagaagaaaatgaagatgatgatggtgatgctaatgctgaagctgaagctgaagctgaagctgaagctgaagctgaagctgatgctaatgctaatgctgaagataaaccgattccaatggagactcagaagtctccttcagtatcaaagcaacctagacagtgttctactgaggaagtaagctgggatggagagcctgtaagccaaacaagctctgataagcctctttataaacgagccattgtacatggagaagtagttgtggtcggaagtgctgtttctgttgaagttgatttgtatgaacttcctgcaatctattttgtggagtacatgtttgaaacttcaaagggaagaaaaatgtttcatggacgaatgatgcagagaggatctgaaactgtacttggcaatgcagctaatgagagagaggtgttcctaacaaataactgtggagattttgaattggaggatgtgaaacagactgtggtggtagatattcgattaagaccttggggatatcagcataggaaagataatgccaacatggacaaacttgatagagcagaagcagaggagaggaagagaaaaggacttccaatggagtattattgtaaaagcttgtattggcctgagaggggtgccttctatacgctccccattgattctttgggtttgggttctggttgctgccattcttgccaagttaaggatgctgggagggccaaagaagtgttcaaagtgaattcatcaaatacaggctttgtatacaagggaactgagtactctctccatgattatgtctatgtcagtccacatcaatttacagtagaaagggctgagactgaaaactttaaagctgggaggaatataggcttgaagccttatgttgtgtgccaagtgctagagattattatcccaaaggggcagaaaaaagtttgtgaagagtccacccaagttaaagtcaggagatttttccgaccagaggacatttcagctgaaaaggcttacagttctgatataagagaggtctattatagtgaagaaacagacattttgtttgttgaggcaatagaaggcaaatgtgaagtcagaaagaagaacgaccttccagcatgcaattctccagtaatatttcatcatgtcttcttttgcgatcgcatatatgacccttccaatggatctctcaagcagttaccagctcaagtaaaactaaggtactcaactggaattgtggataatgaaattgcataccaaaagaaaaagggtaagggtaaacaggaagaaagtgaattagaagttgagaaacagcaagaagcatatcaggagaaccgcttggctacgttagacatatttgcaggttgtggaggtctgtcagaggggttgcaccaatctggtgtatcattaactaaatgggcaattgaatatgaagagcctgctggagatgcattcaaactcaatcatcctgagtcattggtcttcattaaaaactgcaatgtcattcttagggctattatggagaagtgtggggatgtagatgactgcatctccacttctgaggcagctgaattagcggcatcacttgatgagaaagagattaatgatttgccattaccggggcaagtagatttcatcaatggaggccctccatgccagggtttctctggaatgaatagatttaaccatagtacatggagtaaagtacaatgtgagatgattttagctttcttatcatttgctgattacttccggccaaggtatttcctcttagagaatgtgaggaacttcgtgtctttcaataaaggacagacgtttaagttaactctggcttcacttcttgaaatgggttatcaggtgaggtttggtattttggaagctggagcctatggagtttctcagtcaagaaaacgagcattcatatgggcagcctcccctgaagagactcttcctgaatggccagagccaatgcatgtctttgctgttccagagttgaaagttacattatcacataatttgcagtatgcagctgtgaggagtactgcaagtggagcccctttccgtgcaattactgtgcgagatacaattggtgatctaccagctgtaggaaatggggcctcaaagacgaatctggagtatcaaagtgaagccgtctcatggtttcagaagaaaattcgaggaaacatggctgtccttactgatcatatatcaaaggaaatgaatgagcttaacctgattcggtgtcaaaagattccaaagcgaccaggcgcagattggcatgatcttccagacgagaaggttaaactctctactggacaattggtagatttaataccctggtgtctgccaaatacagccaaaaggcacaatcaatggaaagggctatttggaaggctggattgggaagggaacttcccaacttccatcactgaccctcaaccaatgggcaaggttggaatgtgctttcatccagaacaggacaggattctgacggttcgggaatgtgctcggtctcaaggtttcccagacatctacaagtttgctggtaacattcaacacaagcaccggcagataggaaatgcggttccacctccattggcatttgcattgggaaggaaactaaaggaagcattagacagtaaaaagtgaatgtaatttgaatttttagttgatgggattttgttaaagactcctccattttaccttagacaaaaggcccttaattcatttataaaaatttgttgtctggcttttttaaaaaaatctttttttgcgctctctcccttcctatatatatattgattacaattgatca

SEQ ID NO: 436 - DNA, 5062 bp, Gossypium raimondii
  source 1..5062: mol_type = genomic DNA
ggggaaaaaaacttgtaaaaaagttaaaaatggtagaaaattttcttttttggaggaatggcgccaacatttttttccaaaatcagtgttcccgcctttctttgcttttccccttcatttatttataatgttcagtgtttcttccctttctattcatcttcactaaacactgttctcactgaacgaagccaaacatcaaagaaacagtgagtttagagctaaggttttcgtctcttctccaagtcatgggatctgtcgcgcttttggattctaattccccttcaggaatgaagaagaataagaaaggcaagaataaatctgctaaatcttccaccaagaaagagatggaaactgataaaaaagtacagaagcgtaatagtgctcaggaaaatggggagccagtcccttcaaaaaggccaaagagagctgctgcctgcactgattttaaggagaaagcagtttgcatatctgaaaaggattcagttgttgagacaaagaaggatatggtagtagaagatgaaatcctagctgtagcgctgacttgtgaaaaagatgatggccggcctaataggaggctaactgattttgtattgcataattcagaaggtcttccacaaccctttgagatgttggaagtcattgacatgttcataactggtttgatattgccgcttgaagaaaatactgacaaggaaaaagtaaaggagaagagtgttagatgtgaaggatttggacatgttgagtcttgggacatctctggttatgaagatggttgtccagtgatatggctttcaactgatgtagctgattacacctgctgtaagccaagtggcagctataaaaaatattatgaacatttctttgaaaaagctcgagcttgtgtagaggtttataaaaaactttcaaagccttctggtggaaatcctgacttaagtcttgatgaattgcttgctggtgttgttcggtccatgagtggaagcaagagcttctctcgtggggcatcaattcgggattttgttatttcccagggagaatttatttataatcaactgattggtttggatgcaacttcgagggtaaatgaccaggtatttgctggattgcctgttcttactgccctcaaagatgagagcaggaagccactgttttctggtggtgctctgactattggtaaaaaaggagagggggaaagtaaattggatgagacatattcatctacttttacagctgaggaagatgaggatgcaaagttggcaaaactgttgcaagaggaagaatactggaaatctatgaaacagaagaggaaccaaggctcagcttctatgtcaaacaaattctatatcaaaatcaatgaagatgagattgcaaatgattatcctcttccagcatactacaagaattctaatgaagaaactgatgaacttgtagtttttgaaagtgactttgatgtgtgtgatcctgaggaactccctcgaagcgtgctccacaactggtcattttacaattcagactcaaggctgatttccttggagctgcttcctatgaaaccatgtgctgacattgatgttaccatttttggttctggggttatgactgctgatgatggaatcggattctgtcttgacaatgaccttagtcagtctacttcaggttcttcgagtgtgctgaatgctgatggaattccaatttttttgagtgctattaaggaatggatgattgaatttggatcatcaatgatattcatctcaatcaggacagacatggcctggtatagacttggcaaaccatcaaagcaatatcttccatggtatgaaccagtactcaaaacagcaagggttgcaataagcattattacattgttgaaggagcaaacacgagtatcacgcctctctttcaatgatgtaattaagagggtgtctgagttcaagaaggataatcgtgcttttatatcttctgatccagcagctgttgagagatatattgttgtgcatggacagataatactacaactctttgcagagtttcctgatgaaaagattaaaaagtgtgcatttgtggttggccttgcaaataaaatggaagagagacaccatacaaaatggttagtcaagaagaagaaagttgtacacaagaatgaaccaaatttaaatcctcgagcagcaatgatgcctatagcttctataagaaaggctatgcaggcgaccacaacaaggctaatcaataggatttggggggaatactattcaaactactctccagaagattcaaaggaggaaactaattgtgaggtgaaagatgaagatgaaaatgaggaacaagaagaaaatgaagatgatgatggtgatgctaatgctgaagctgaagctgaagctgaagctgaagctgaagctgaagctgatgctaatgctaatgctgaagataaaccgattccaatggagactcagaagtctccttcagtatcaaagcaacctagacagtgttctactgaggaagtaagctgggatggagagcctgtaagccaaacaagctctgataagcctctttataaacgagccattgtacatggagaagtagttgtggtcggaagtgctgtttctgttgaagttgatttgtatgaacttcctgcaatctattttgtggagtacatgtttgaaacttcaaagggaagaaaaatgtttcatggacgaatgatgcagagaggatctgaaactgtacttggcaatgcagctaatgagagagaggtgttcctaacaaataactgtggagattttgaattggaggatgtgaaacagactgtggtggtagatattcgattaagaccttggggatatcagcataggaaagataatgccaacatggacaaacttgatagagcagaagcagaggagaggaagagaaaaggacttccaatggagtattattgtaaaagcttgtattggcctgagaggggtgccttctatacgctccccattgattctttgggtttgggttctggttgctgccattcttgccaagttaaggatgctgggagggccaaagaagtgttcaaagtgaattcatcaaatacaggctttgtatacaagggaactgagtactctctccatgattatgtctatgtcagtccacatcaatttacagtagaaagggctgagactgaaaactttaaagctgggaggaatataggcttgaagccttatgttgtgtgccaagtgctagagattattatcccaaaggggcagaaaaaagtttgtgaagagtccacccaagttaaagtcaggagatttttccgaccagaggacatttcagctgaaaaggcttacagttctgatataagagaggtctattatagtgaagaaacagacattttgtttgttgaggcaatagaaggcaaatgtgaagtcagaaagaagaacgaccttccagcatgcaattctccagtaatatttcatcatgtcttcttttgcgatcgcatatatgacccttccaatggatctctcaagcagttaccagctcaagtaaaactaaggtactcaactggaattgtggataatgaaattgcataccaaaagaaaaagggtaagggtaaacaggaagaaagtgaattagaagttgagaaacagcaagaagcatatcaggagaaccgcttggctacgttagacatatttgcaggttgtggaggtctgtcagaggggttgcaccaatctggtgtatcattaactaaatgggcaattgaatatgaagagcctgctggagatgcattcaaactcaatcatcctgagtcattggtcttcattaaaaactgcaatgtcattcttagggctattatggagaagtgtggggatgtagatgactgcatctccacttctgaggcagctgaattagcggcatcacttgatgagaaagagattaatgatttgccattaccggggcaagtagatttcatcaatggaggccctccatgccagggtttctctggaatgaatagatttaaccatagtacatggagtaaagtacaatgtgagatgattttagctttcttatcatttgctgattacttccggccaaggtatttcctcttagagaatgtgaggaacttcgtgtctttcaataaaggacagacgtttaagttaactctggcttcacttcttgaaatgggttatcaggtgaggtttggtattttggaagctggagcctatggagtttctcagtcaagaaaacgagcattcatatgggcagcctcccctgaagagactcttcctgaatggccagagccaatgcatgtctttgctgttccagagttgaaagttacattatcacataatttgcagtatgcagctgtgaggagtactgcaagtggagcccctttccgtgcaattactgtgcgagatacaattggtgatctaccagctgtaggaaatggggcctcaaagacgaatctggagtatcaaagtgaagccgtctcatggtttcagaagaaaattcgaggaaacatggctgtccttactgatcatatatcaaaggaaatgaatgagcttaacctgattcggtgtcaaaagattccaaagcgaccaggcgcagattggcatgatcttccagacgagaaggttaaactctctactggacaattggtagatttaataccctggtgtctgccaaatacagccaaaaggcacaatcaatggaaagggctatttggaaggctggattgggaagggaacttcccaacttccatcactgaccctcaaccaatgggcaaggttggaatgtgctttcatccagaacaggacaggattctgacggttcgggaatgtgctcggtctcaaggtttcccagacatctacaagtttgctggtaacattcaacacaagcaccggcagataggaaatgcggttccacctccattggcatttgcattgggaaggaaactaaaggaagcattagacagtaaaaagtgaatgtaatttgaatttttagttgatgggattttgttaaagactcctccattttaccttagacaaaaggcccttaattcatttataaaaatttgttgtctggctttttt

SEQ ID NO: 437 - DNA, 4852 bp, Gossypium raimondii
  source 1..4852: mol_type = genomic DNA
caaaaatccctttttgttttggttttgtgattttcattgcaattatcgaaggaatgaagaagaataagaaaggcaagaataaatctgctaaatcttccaccaagaaagagatggaaactgataaaaaagtacagaagcgtaatagtgctcaggaaaatggggagccagtcccttcaaaaaggccaaagagagctgctgcctgcactgattttaaggagaaagcagtttgcatatctgaaaaggattcagttgttgagacaaagaaggatatggtagtagaagatgaaatcctagctgtagcgctgacttgtgaaaaagatgatggccggcctaataggaggctaactgattttgtattgcataattcagaaggtcttccacaaccctttgagatgttggaagtcattgacatgttcataactggtttgatattgccgcttgaagaaaatactgacaaggaaaaagtaaaggagaagagtgttagatgtgaaggatttggacatgttgagtcttgggacatctctggttatgaagatggttgtccagtgatatggctttcaactgatgtagctgattacacctgctgtaagccaagtggcagctataaaaaatattatgaacatttctttgaaaaagctcgagcttgtgtagaggtttataaaaaactttcaaagccttctggtggaaatcctgacttaagtcttgatgaattgcttgctggtgttgttcggtccatgagtggaagcaagagcttctctcgtggggcatcaattcgggattttgttatttcccagggagaatttatttataatcaactgattggtttggatgcaacttcgagggtaaatgaccaggtatttgctggattgcctgttcttactgccctcaaagatgagagcaggaagcgtgaaaatatagggctagacatagcactgttttctggtggtgctctgactattggtaaaaaaggagagggggaaagtaaattggatgagacatattcatctacttttacagctgaggaagatgaggatgcaaagttggcaaaactgttgcaagaggaagaatactggaaatctatgaaacagaagaggaaccaaggctcagcttctatgtcaaacaaattctatatcaaaatcaatgaagatgagattgcaaatgattatcctcttccagcatactacaagaattctaatgaagaaactgatgaacttgtagtttttgaaagtgactttgatgtgtgtgatcctgaggaactccctcgaagcgtgctccacaactggtcattttacaattcagactcaaggctgatttccttggagctgcttcctatgaaaccatgtgctgacattgatgttaccatttttggttctggggttatgactgctgatgatggaatcggattctgtcttgacaatgaccttagtcagtctacttcaggttcttcgagtgtgctgaatgctgatggaattccaatttttttgagtgctattaaggaatggatgattgaatttggatcatcaatgatattcatctcaatcaggacagacatggcctggtatagacttggcaaaccatcaaagcaatatcttccatggtatgaaccagtactcaaaacagcaagggttgcaataagcattattacattgttgaaggagcaaacacgagtatcacgcctctctttcaatgatgtaattaagagggtgtctgagttcaagaaggataatcgtgcttttatatcttctgatccagcagctgttgagagatatattgttgtgcatggacagataatactacaactctttgcagagtttcctgatgaaaagattaaaaagtgtgcatttgtggttggccttgcaaataaaatggaagagagacaccatacaaaatggttagtcaagaagaagaaagttgtacacaagaatgaaccaaatttaaatcctcgagcagcaatgatgcctatagcttctataagaaaggctatgcaggcgaccacaacaaggctaatcaataggatttggggggaatactattcaaactactctccagaagattcaaaggaggaaactaattgtgaggtgaaagatgaagatgaaaatgaggaacaagaagaaaatgaagatgatgatggtgatgctaatgctgaagctgaagctgaagctgaagctgaagctgaagctgaagctgatgctaatgctaatgctgaagataaaccgattccaatggagactcagaagtctccttcagtatcaaagcaacctagacagtgttctactgaggaagtaagctgggatggagagcctgtaagccaaacaagctctgataagcctctttataaacgagccattgtacatggagaagtagttgtggtcggaagtgctgtttctgttgaagttgatttgtatgaacttcctgcaatctattttgtggagtacatgtttgaaacttcaaagggaagaaaaatgtttcatggacgaatgatgcagagaggatctgaaactgtacttggcaatgcagctaatgagagagaggtgttcctaacaaataactgtggagattttgaattggaggatgtgaaacagactgtggtggtagatattcgattaagaccttggggatatcagcataggaaagataatgccaacatggacaaacttgatagagcagaagcagaggagaggaagagaaaaggacttccaatggagtattattgtaaaagcttgtattggcctgagaggggtgccttctatacgctccccattgattctttgggtttgggttctggttgctgccattcttgccaagttaaggatgctgggagggccaaagaagtgttcaaagtgaattcatcaaatacaggctttgtatacaagggaactgagtactctctccatgattatgtctatgtcagtccacatcaatttacagtagaaagggctgagactgaaaactttaaagctgggaggaatataggcttgaagccttatgttgtgtgccaagtgctagagattattatcccaaaggggcagaaaaaagtttgtgaagagtccacccaagttaaagtcaggagatttttccgaccagaggacatttcagctgaaaaggcttacagttctgatataagagaggtctattatagtgaagaaacagacattttgtttgttgaggcaatagaaggcaaatgtgaagtcagaaagaagaacgaccttccagcatgcaattctccagtaatatttcatcatgtcttcttttgcgatcgcatatatgacccttccaatggatctctcaagcagttaccagctcaagtaaaactaaggtactcaactggaattgtggataatgaaattgcataccaaaagaaaaagggtaagggtaaacaggaagaaagtgaattagaagttgagaaacagcaagaagcatatcaggagaaccgcttggctacgttagacatatttgcaggttgtggaggtctgtcagaggggttgcaccaatctggtgtatcattaactaaatgggcaattgaatatgaagagcctgctggagatgcattcaaactcaatcatcctgagtcattggtcttcattaaaaactgcaatgtcattcttagggctattatggagaagtgtggggatgtagatgactgcatctccacttctgaggcagctgaattagcggcatcacttgatgagaaagagattaatgatttgccattaccggggcaagtagatttcatcaatggaggccctccatgccagggtttctctggaatgaatagatttaaccatagtacatggagtaaagtacaatgtgagatgattttagctttcttatcatttgctgattacttccggccaaggtatttcctcttagagaatgtgaggaacttcgtgtctttcaataaaggacagacgtttaagttaactctggcttcacttcttgaaatgggttatcaggtgaggtttggtattttggaagctggagcctatggagtttctcagtcaagaaaacgagcattcatatgggcagcctcccctgaagagactcttcctgaatggccagagccaatgcatgtctttgctgttccagagttgaaagttacattatcacataatttgcagtatgcagctgtgaggagtactgcaagtggagcccctttccgtgcaattactgtgcgagatacaattggtgatctaccagctgtaggaaatggggcctcaaagacgaatctggagtatcaaagtgaagccgtctcatggtttcagaagaaaattcgaggaaacatggctgtccttactgatcatatatcaaaggaaatgaatgagcttaacctgattcggtgtcaaaagattccaaagcgaccaggcgcagattggcatgatcttccagacgagaaggttaaactctctactggacaattggtagatttaataccctggtgtctgccaaatacagccaaaaggcacaatcaatggaaagggctatttggaaggctggattgggaagggaacttcccaacttccatcactgaccctcaaccaatgggcaaggttggaatgtgctttcatccagaacaggacaggattctgacggttcgggaatgtgctcggtctcaaggtttcccagacatctacaagtttgctggtaacattcaacacaagcaccggcagataggaaatgcggttccacctccattggcatttgcattgggaaggaaactaaaggaagcattagacagtaaaaagtgaatgtaatttgaatttttagttgatgggattttgttaaagactcctccattttaccttagacaaaaggcccttaattcatttataaaaatttgttgtctggctttttt

SEQ ID NO: 438 - DNA, 4924 bp, Gossypium raimondii
  source 1..4924: mol_type = genomic DNA
atcatgcagtgatatagaagaggcatgttgtgtttatgctataccatttatttatatttttgtttctgatggttttttaaagtgcctaaactcaagttcacaagatctttttttggcatttaggaatgaagaagaataagaaaggcaagaataaatctgctaaatcttccaccaagaaagagatggaaactgataaaaaagtacagaagcgtaatagtgctcaggaaaatggggagccagtcccttcaaaaaggccaaagagagctgctgcctgcactgattttaaggagaaagcagtttgcatatctgaaaaggattcagttgttgagacaaagaaggatatggtagtagaagatgaaatcctagctgtagcgctgacttgtgaaaaagatgatggccggcctaataggaggctaactgattttgtattgcataattcagaaggtcttccacaaccctttgagatgttggaagtcattgacatgttcataactggtttgatattgccgcttgaagaaaatactgacaaggaaaaagtaaaggagaagagtgttagatgtgaaggatttggacatgttgagtcttgggacatctctggttatgaagatggttgtccagtgatatggctttcaactgatgtagctgattacacctgctgtaagccaagtggcagctataaaaaatattatgaacatttctttgaaaaagctcgagcttgtgtagaggtttataaaaaactttcaaagccttctggtggaaatcctgacttaagtcttgatgaattgcttgctggtgttgttcggtccatgagtggaagcaagagcttctctcgtggggcatcaattcgggattttgttatttcccagggagaatttatttataatcaactgattggtttggatgcaacttcgagggtaaatgaccaggtatttgctggattgcctgttcttactgccctcaaagatgagagcaggaagcgtgaaaatatagggctagacatagcactgttttctggtggtgctctgactattggtaaaaaaggagagggggaaagtaaattggatgagacatattcatctacttttacagctgaggaagatgaggatgcaaagttggcaaaactgttgcaagaggaagaatactggaaatctatgaaacagaagaggaaccaaggctcagcttctatgtcaaacaaattctatatcaaaatcaatgaagatgagattgcaaatgattatcctcttccagcatactacaagaattctaatgaagaaactgatgaacttgtagtttttgaaagtgactttgatgtgtgtgatcctgaggaactccctcgaagcgtgctccacaactggtcattttacaattcagactcaaggctgatttccttggagctgcttcctatgaaaccatgtgctgacattgatgttaccatttttggttctggggttatgactgctgatgatggaatcggattctgtcttgacaatgaccttagtcagtctacttcaggttcttcgagtgtgctgaatgctgatggaattccaatttttttgagtgctattaaggaatggatgattgaatttggatcatcaatgatattcatctcaatcaggacagacatggcctggtatagacttggcaaaccatcaaagcaatatcttccatggtatgaaccagtactcaaaacagcaagggttgcaataagcattattacattgttgaaggagcaaacacgagtatcacgcctctctttcaatgatgtaattaagagggtgtctgagttcaagaaggataatcgtgcttttatatcttctgatccagcagctgttgagagatatattgttgtgcatggacagataatactacaactctttgcagagtttcctgatgaaaagattaaaaagtgtgcatttgtggttggccttgcaaataaaatggaagagagacaccatacaaaatggttagtcaagaagaagaaagttgtacacaagaatgaaccaaatttaaatcctcgagcagcaatgatgcctatagcttctataagaaaggctatgcaggcgaccacaacaaggctaatcaataggatttggggggaatactattcaaactactctccagaagattcaaaggaggaaactaattgtgaggtgaaagatgaagatgaaaatgaggaacaagaagaaaatgaagatgatgatggtgatgctaatgctgaagctgaagctgaagctgaagctgaagctgaagctgaagctgatgctaatgctaatgctgaagataaaccgattccaatggagactcagaagtctccttcagtatcaaagcaacctagacagtgttctactgaggaagtaagctgggatggagagcctgtaagccaaacaagctctgataagcctctttataaacgagccattgtacatggagaagtagttgtggtcggaagtgctgtttctgttgaagttgatttgtatgaacttcctgcaatctattttgtggagtacatgtttgaaacttcaaagggaagaaaaatgtttcatggacgaatgatgcagagaggatctgaaactgtacttggcaatgcagctaatgagagagaggtgttcctaacaaataactgtggagattttgaattggaggatgtgaaacagactgtggtggtagatattcgattaagaccttggggatatcagcataggaaagataatgccaacatggacaaacttgatagagcagaagcagaggagaggaagagaaaaggacttccaatggagtattattgtaaaagcttgtattggcctgagaggggtgccttctatacgctccccattgattctttgggtttgggttctggttgctgccattcttgccaagttaaggatgctgggagggccaaagaagtgttcaaagtgaattcatcaaatacaggctttgtatacaagggaactgagtactctctccatgattatgtctatgtcagtccacatcaatttacagtagaaagggctgagactgaaaactttaaagctgggaggaatataggcttgaagccttatgttgtgtgccaagtgctagagattattatcccaaaggggcagaaaaaagtttgtgaagagtccacccaagttaaagtcaggagatttttccgaccagaggacatttcagctgaaaaggcttacagttctgatataagagaggtctattatagtgaagaaacagacattttgtttgttgaggcaatagaaggcaaatgtgaagtcagaaagaagaacgaccttccagcatgcaattctccagtaatatttcatcatgtcttcttttgcgatcgcatatatgacccttccaatggatctctcaagcagttaccagctcaagtaaaactaaggtactcaactggaattgtggataatgaaattgcataccaaaagaaaaagggtaagggtaaacaggaagaaagtgaattagaagttgagaaacagcaagaagcatatcaggagaaccgcttggctacgttagacatatttgcaggttgtggaggtctgtcagaggggttgcaccaatctggtgtatcattaactaaatgggcaattgaatatgaagagcctgctggagatgcattcaaactcaatcatcctgagtcattggtcttcattaaaaactgcaatgtcattcttagggctattatggagaagtgtggggatgtagatgactgcatctccacttctgaggcagctgaattagcggcatcacttgatgagaaagagattaatgatttgccattaccggggcaagtagatttcatcaatggaggccctccatgccagggtttctctggaatgaatagatttaaccatagtacatggagtaaagtacaatgtgagatgattttagctttcttatcatttgctgattacttccggccaaggtatttcctcttagagaatgtgaggaacttcgtgtctttcaataaaggacagacgtttaagttaactctggcttcacttcttgaaatgggttatcaggtgaggtttggtattttggaagctggagcctatggagtttctcagtcaagaaaacgagcattcatatgggcagcctcccctgaagagactcttcctgaatggccagagccaatgcatgtctttgctgttccagagttgaaagttacattatcacataatttgcagtatgcagctgtgaggagtactgcaagtggagcccctttccgtgcaattactgtgcgagatacaattggtgatctaccagctgtaggaaatggggcctcaaagacgaatctggagtatcaaagtgaagccgtctcatggtttcagaagaaaattcgaggaaacatggctgtccttactgatcatatatcaaaggaaatgaatgagcttaacctgattcggtgtcaaaagattccaaagcgaccaggcgcagattggcatgatcttccagacgagaaggttaaactctctactggacaattggtagatttaataccctggtgtctgccaaatacagccaaaaggcacaatcaatggaaagggctatttggaaggctggattgggaagggaacttcccaacttccatcactgaccctcaaccaatgggcaaggttggaatgtgctttcatccagaacaggacaggattctgacggttcgggaatgtgctcggtctcaaggtttcccagacatctacaagtttgctggtaacattcaacacaagcaccggcagataggaaatgcggttccacctccattggcatttgcattgggaaggaaactaaaggaagcattagacagtaaaaagtgaatgtaatttgaatttttagttgatgggattttgttaaagactcctccattttaccttagacaaaaggcccttaattcatttataaaaatttgttgtctggctttttt

SEQ ID NO: 439 - DNA, 2095 bp, Gossypium raimondii
  source 1..2095: mol_type = genomic DNA
gaatagtgcctttttgcttaacgtattgtatatctgtgtgtgtgtgtgtttactctgtttggctttaacgagatagtgaaggaaaaggagaaggaaaatgtcgatacatgatatatatgtgcttgctctgtttggctttgacgaaagtgaaggaaaatgttaatatgtttgttcatccatggaagggcatcattgccaatattccaacaacattgcaagatggaaaacatgtaggggaaagtggaaggaaactgagggaggatttggcaaaaaagggattcaatccattgaaggttcaacctctttggaaccgacacggtcactcaggatacgccatagtagagttcaataaagaatgggatggttttaacaatgccatcatgtttgaaaagagttttgaattggaccattatggaaagaaggattactactcatctcggaggaaaaaagacaaattgtatgcatgggttgctcgtgaagacgactactactctggtggactgattggtgaatatcttcgtaggaacggagacttgaagaccgtttcgagcaaagaagccgaagatcgaaggaagacctcaaagctattgacaacactaaacaataccttggagaccaagaatcaacgccttcaggaaatgcagaacaaattcaatgaagtgagtagctcaatgagtacattgatgtggcaaaaagatgacatgatcagagcttataatgaagagtgtaaaaagatgcaggagaatgctcataatcatttcaagcagatttctttagaacatgagaggaatgcaaaatgtattctagaccagaaaagagaattagagcagcgtgagaaggaattgttgcaacgggaggcccaaaatgaaaatgagaccaaaaaacttcagcacgagaagatgataaacgagagagcagccttggaacaaaagaaggctgatgaaactatgttcaaactggctgaagagcacaagagagataaagagaaacttcacagagaaatcattaagctagaaaagcaacttgatactagacaaggattagaacttgagatacagcgtttgagaggggctttacaagtgatggagcacatgaatggtgatggggatgcagacacaaagaaaaggatggaggtaattcaagatgaactgaaagaaaaggaagaagaactggaagacttggaagatcttaatcaagctcttatcatcaaggaacgcaaaagcaatgatgagttgcaagatgcccgaaaagagctaatcactgcatttaaagatgtttccaccagagctcatattggtgtcaagaaaatgggagaagtggacattaaacccttcttagttgctgccaaaagaaaatactcagctaaagaagctgatgtgaaatcagcagagctatgtacactgtggcaagactatcttagagatcctagctggcatccttttaaaatcctcaaagacaaggaaggaaattgcaaggaaatacttgatgaggaagatgaaaaattggtcgaactcaagacagagctcggcgacgaagcatacaatgctgtgacgatggcattgaaacagatgaacgagtacaatccgagcggcagatacgtagtaccggaactttggaatttcaatgaaggaaggaaggcaacattaactgatggagtgcaacatttactgaacaaatggaaactgcataagcgtaggagatactaaaatttcttcatcaattttctttcactgaaggatcattttgcaaatcttcgaaaaaaaggtaaacttatactgcaagacagagaaaatgtgttaattcttcccccaagtaaaccaagttgaacgtacttttttgttttaagaagtttgattaggtttttactagttcgagctccaacttaatatacttgaattagtcaatgattgagcttggattaaatttcaaactcttttttcgagtggaactgtatttagcttatttgaattttttttggagttgaatggtattagaggtaaaagttaggagtgtaaaagaattgttctcaagcaaacaaagctttgtttgcatttgtttgtttatttttaaagttgtttatgttcggttcgtattc

SEQ ID NO: 440 - DNA, 2029 bp, Gossypium raimondii
  source 1..2029: mol_type = genomic DNA
gtaactctaggtttttcaaggttttcagtgttccacggcggtgattttgcgacgacggtgatctgttttcaagcttcttgccaaagtttcgtcaacgaatcatcgtctttgtaaggtaaggcatcattgccaatattccaacaacattgcaagatggaaaacatgtaggggaaagtggaaggaaactgagggaggatttggcaaaaaagggattcaatccattgaaggttcaacctctttggaaccgacacggtcactcaggatacgccatagtagagttcaataaagaatgggatggttttaacaatgccatcatgtttgaaaagagttttgaattggaccattatggaaagaaggattactactcatctcggaggaaaaaagacaaattgtatgcatgggttgctcgtgaagacgactactactctggtggactgattggtgaatatcttcgtaggaacggagacttgaagaccgtttcgagcaaagaagccgaagatcgaaggaagacctcaaagctattgacaacactaaacaataccttggagaccaagaatcaacgccttcaggaaatgcagaacaaattcaatgaagtgagtagctcaatgagtacattgatgtggcaaaaagatgacatgatcagagcttataatgaagagtgtaaaaagatgcaggagaatgctcataatcatttcaagcagatttctttagaacatgagaggaatgcaaaatgtattctagaccagaaaagagaattagagcagcgtgagaaggaattgttgcaacgggaggcccaaaatgaaaatgagaccaaaaaacttcagcacgagaagatgataaacgagagagcagccttggaacaaaagaaggctgatgaaactatgttcaaactggctgaagagcacaagagagataaagagaaacttcacagagaaatcattaagctagaaaagcaacttgatactagacaaggattagaacttgagatacagcgtttgagaggggctttacaagtgatggagcacatgaatggtgatggggatgcagacacaaagaaaaggatggaggtaattcaagatgaactgaaagaaaaggaagaagaactggaagacttggaagatcttaatcaagctcttatcatcaaggaacgcaaaagcaatgatgagttgcaagatgcccgaaaagagctaatcactgcatttaaagatgtttccaccagagctcatattggtgtcaagaaaatgggagaagtggacattaaacccttcttagttgctgccaaaagaaaatactcagctaaagaagctgatgtgaaatcagcagagctatgtacactgtggcaagactatcttagagatcctagctggcatccttttaaaatcctcaaagacaaggaaggaaattgcaaggaaatacttgatgaggaagatgaaaaattggtcgaactcaagacagagctcggcgacgaagcatacaatgctgtgacgatggcattgaaacagatgaacgagtacaatccgagcggcagatacgtagtaccggaactttggaatttcaatgaaggaaggaaggcaacattaactgatggagtgcaacatttactgaacaaatggaaactgcataagcgtaggagatactaaaatttcttcatcaattttctttcactgaaggatcattttgcaaatcttcgaaaaaaaggtaaacttatactgcaagacagagaaaatgtgttaattcttcccccaagtaaaccaagttgaacgtacttttttgttttaagaagtttgattaggtttttactagttcgagctccaacttaatatacttgaattagtcaatgattgagcttggattaaatttcaaactcttttttcgagtggaactgtatttagcttatttgaattttttttggagttgaatggtattagaggtaaaagttaggagtgtaaaagaattgttctcaagcaaacaaagctttgtttgcatttgtttgtttatttttaaagttgtttatgttcggttcgtattc

SEQ ID NO: 441 - DNA, 2279 bp, Gossypium raimondii
  source 1..2279: mol_type = genomic DNA
aaaaaaaaaaaatccacggccatagccaaaaccttctactttgattcctccattttcgttccttgcatgcatcagcttttctcttcttcttctttttctgcaccgactattgtgaactgcactatcgacttaacggatttctttgagataatttcaggatcagattaacaattttgtctttgattcgttgatgttgagaagcttttcttggcccatactacaagtcaaaagaatggttgacaataattcgggtggagaagctgataattttgactgggatactgaagatgatctggaaatcgataattatgccatctcggccccttcgggtttgtctactccctgtggagaagctgttttgggttcggcagaggcgggctcatctggaaattctcccaattccaagataattgatcattttgtcggaatggggttctcaagagaaatggttgccaaagtgattgaagaaaaaggagaggaaaactcagacttgatacttgaaaccctccttgagtactcggcaagcacattacctagttcttccaattccaagttgatcgatcattttgtagggatgggattttctgaagaaatggttgtcaaagtggttcaggaaaatggagagggaaatacagattccatattggagactctattgacatattcagcacttgaaacaactgctcccgttcagcaaaatcctgactctggtaactgctcatcagattatgaagggagtttgctgaatgatttctctgattttgatagtttttctgagaccgaggaaattattagtcctagttctgaggaggggagaaaattgttacacttgacaaaaatggggtactcagaagcggaggcttcagtagccatggagagatgtggtccagactccacaattgaggagttaacggactttatatgtgctgcacaaattgcaaaggctgctgatgcactttttccacttgaagacaagaagccattcagcaatggctctagtcacaagaagaggcgaaactggggttatgatttgttgttaaggaagaagaagcttaagcttgaaaagaggtttgatgaagatgatgatgtagttcatcttcctaatcctatgattggttttggggtccccaatgaaccagatcagatcactcatagagtacttccagaagcagctttagggcctccatacttctactacgagaatgtagcacttgctccaaaaggtgtttggaccaccatttcgcgcttcttatatgatgtggagcctgagtttgttgattcaaagttcttttgtgctgctgcaaggaagaggggctatgttcataatctgccaattgacaatagatttccccttcttccatttcctccacgaactattcatgaagcttttccactaacaaggaaatggtggccatcctgggacacgcgaacgaaattgaactgcttgcaaacctgtatagcaagtgcaagattgacggataagattcgcaaggcattagaagattctgatggtgaaccgctgttgggcatccaaaagtttgttctcgaacaatgcagaaagtggaatctggtttgggttggaaggaacaaggttgctccacttgaacctgatgaagtggaaatgcttttgggattccctagaaaccacacaagaggagggggaatcagtcggacagatagatacaaatcacttggtaactcatttcagattgacacagtggcgtatcacttttcggttttaaaagataagttccccggtggtatcaatctgttgtctcttttctctgggattggaggtgcggaggttgctctccaccgactcggtatccctttgaaaaatgtggtagcggtggaaatagctgaagtgaaccgaaatattcttaggagttggtgggaacaaacaaaccagagaggtactttgactgacatccaagatgttcaagaactaaacggggaccgtttggagcaactgattaaaaattttggaggatttgaccttgtggtgggagggagtccttgcaacaacctcactggcagcaatagatatcatcgagacggactcgaaggtaaagattctgccctcttctttgatttctgtcgaatactggatttggtgaaatgtattatgaatggcacgaaatcaatgattgtctgaagaagattgcatttgaaataatttccgaaactcctcttaatatcaaattaaaagggaaatgaagtgctgtttaagcaaatatatatttatcattccggcttactcgtcgtattagacactgttt

SEQ ID NO: 442 - DNA, 2276 bp, Gossypium raimondii
  source 1..2276: mol_type = genomic DNA
aaaaaaaaaaaatccacggccatagccaaaaccttctactttgattcctccattttcgttccttgcatgcatcagcttttctcttcttcttctttttctgcaccgactattgtgaactgcactatcgacttaacggatttctttgagataatttcaggatcagattaacaattttgtctttgattcgttgatgttgagaagcttttcttggcccatactacaagtcaaaagaatggttgacaataattcgggtggagaagctgataattttgactgggatactgaagatgatctggaaatcgataattatgccatctcggccccttcgggtttgtctactccctgtggagaagctgttttgggttcggcagaggcgggctcatctggaaattctcccaattccaagataattgatcattttgtcggaatggggttctcaagagaaatggttgccaaagtgattgaagaaaaaggagaggaaaactcagacttgatacttgaaaccctccttgagtactcggcaagcacattacctagttcttccaattccaagttgatcgatcattttgtagggatgggattttctgaagaaatggttgtcaaagtggttcaggaaaatggagagggaaatacagattccatattggagactctattgacatattcagcacttgaaacaactgctcccgttcagcaaaatcctgactctggtaactgctcatcagattatgaagggagtttgctgaatgatttctctgattttgatagtttttctgagaccgaggaaattattagtcctagttctgaggaggggagaaaattgttacacttgacaaaaatggggtactcagaagcggaggcttcagtagccatggagagatgtggtccagactccacaattgaggagttaacggactttatatgtgctgcacaaattgcaaaggctgctgatgcactttttccacttgaagacaagccattcagcaatggctctagtcacaagaagaggcgaaactggggttatgatttgttgttaaggaagaagaagcttaagcttgaaaagaggtttgatgaagatgatgatgtagttcatcttcctaatcctatgattggttttggggtccccaatgaaccagatcagatcactcatagagtacttccagaagcagctttagggcctccatacttctactacgagaatgtagcacttgctccaaaaggtgtttggaccaccatttcgcgcttcttatatgatgtggagcctgagtttgttgattcaaagttcttttgtgctgctgcaaggaagaggggctatgttcataatctgccaattgacaatagatttccccttcttccatttcctccacgaactattcatgaagcttttccactaacaaggaaatggtggccatcctgggacacgcgaacgaaattgaactgcttgcaaacctgtatagcaagtgcaagattgacggataagattcgcaaggcattagaagattctgatggtgaaccgctgttgggcatccaaaagtttgttctcgaacaatgcagaaagtggaatctggtttgggttggaaggaacaaggttgctccacttgaacctgatgaagtggaaatgcttttgggattccctagaaaccacacaagaggagggggaatcagtcggacagatagatacaaatcacttggtaactcatttcagattgacacagtggcgtatcacttttcggttttaaaagataagttccccggtggtatcaatctgttgtctcttttctctgggattggaggtgcggaggttgctctccaccgactcggtatccctttgaaaaatgtggtagcggtggaaatagctgaagtgaaccgaaatattcttaggagttggtgggaacaaacaaaccagagaggtactttgactgacatccaagatgttcaagaactaaacggggaccgtttggagcaactgattaaaaattttggaggatttgaccttgtggtgggagggagtccttgcaacaacctcactggcagcaatagatatcatcgagacggactcgaaggtaaagattctgccctcttctttgatttctgtcgaatactggatttggtgaaatgtattatgaatggcacgaaatcaatgattgtctgaagaagattgcatttgaaataatttccgaaactcctcttaatatcaaattaaaagggaaatgaagtgctgtttaagcaaatatatatttatcattccggcttactcgtcgtattagacactgttt

SEQ ID NO: 443 - DNA, 2018 bp, Gossypium raimondii
  source 1..2018: mol_type = genomic DNA
aggttgagaagcttttcttggcccatactacaagtcaaaagaatggttgacaataattcgggtggagaagctgataattttgactgggatactgaagatgatctggaaatcgataattatgccatctcggccccttcgggtttgtctactccctgtggagaagctgttttgggttcggcagaggcgggctcatctggaaattctcccaattccaagataattgatcattttgtcggaatggggttctcaagagaaatggttgccaaagtgattgaagaaaaaggagaggaaaactcagacttgatacttgaaaccctccttgagtactcggcaagcacattacctagttcttccaattccaagttgatcgatcattttgtagggatgggattttctgaagaaatggttgtcaaagtggttcaggaaaatgattccatattggagactctattgacatattcagcacttgaaacaactgctcccgttcagcaaaatcctgactctggtaactgctcatcagattatgaagggagtttgctgaatgatttctctgattttgatagtttttctgagaccgaggaaattattagtcctagttctgaggaggggagaaaattgttacacttgacaaaaatggggtactcagaagcggaggcttcagtagccatggagagatgtggtccagactccacaattgaggagttaacggactttatatgtgctgcacaaattgcaaaggctgctgatgcactttttccacttgaagacaagaagccattcagcaatggctctagtcacaagaagaggcgaaactggggttatgatttgttgttaaggaagaagaagcttaagcttgaaaagaggtttgatgaagatgatgatgtagttcatcttcctaatcctatgattggttttggggtccccaatgaaccagatcagatcactcatagagtacttccagaagcagctttagggcctccatacttctactacgagaatgtagcacttgctccaaaaggtgtttggaccaccatttcgcgcttcttatatgatgtggagcctgagtttgttgattcaaagttcttttgtgctgctgcaaggaagaggggctatgttcataatctgccaattgacaatagatttccccttcttccatttcctccacgaactattcatgaagcttttccactaacaaggaaatggtggccatcctgggacacgcgaacgaaattgaactgcttgcaaacctgtatagcaagtgcaagattgacggataagattcgcaaggcattagaagattctgatggtgaaccgctgttgggcatccaaaagtttgttctcgaacaatgcagaaagtggaatctggtttgggttggaaggaacaaggttgctccacttgaacctgatgaagtggaaatgcttttgggattccctagaaaccacacaagaggagggggaatcagtcggacagatagatacaaatcacttggtaactcatttcagattgacacagtggcgtatcacttttcggttttaaaagataagttccccggtggtatcaatctgttgtctcttttctctgggattggaggtgcggaggttgctctccaccgactcggtatccctttgaaaaatgtggtagcggtggaaatagctgaagtgaaccgaaatattcttaggagttggtgggaacaaacaaaccagagaggtactttgactgacatccaagatgttcaagaactaaacggggaccgtttggagcaactgattaaaaattttggaggatttgaccttgtggtgggagggagtccttgcaacaacctcactggcagcaatagatatcatcgagacggactcgaaggtaaagattctgccctcttctttgatttctgtcgaatactggatttggtgaaatgtattatgaatggcacgaaatcaatgattgtctgaagaagattgcatttgaaataatttccgaaactcctcttaatatcaaattaaaagggaaatgaagtgct

SEQ ID NO: 444 - DNA, 2509 bp, Gossypium raimondii
  source 1..2509: mol_type = genomic DNA
aatatttataaataattacataggtgactttccaaacacaatcatagttatagaaaaaaattgaaaaaccctgtgaaaactgaacccacagctcctcgtttcctcttcttctccgttaccgccgttggggcttcccctatgtatattttatttctttttctccaccggtaacttctgtgtcagaactcgtcgacgatcgccgctgctgccgtgttaagaaactgttcttgggctgtactatagctcaaggaaaatggatcaaaatggttctggtggtgatgctgataattttgactgggataccgaagatgagctggaaattgataattatgcaatcgcctctcgctcaggagtgtcacttaccaatggggaagctgttttaggcacagcagaggtgagctcgtctgcagattctccgaattccaagttaattgatcattttgttgggatggggttctcccaggaacttgttacgaaagcaattgaggaaaatggagaggagaattcaaatttgatacttgaagctctccttcggtactctgcaagctcgttggctagttcttccaattccaagttgattgatcattttgttgggatgggattctctgaagaaatggttctcaaagcggttcaagaaaatggagaggggaatacagataccatattggagactctattgacatattcggctcttgaaaagtctgctcctgtgcaacaacatgctgattctgatgacttctcgtcagattgtgaagggaattttttggatgatttcacagatattgatagttcttctgataccgaggaaataattaatactggttctgatgaggagagtaaactgttgtacttgacaaaaatggggtactcagaggctgaggcttcagtagccatggagagatgcggtccagactcatcaattgcagagctgacagactttatatgtgctgctcaaatggctaaggctgctgatgcacttttccctgttgaagacaggaagccattctgcaatggctctaattacaataaaaggcgaaacttgggctatgatttgtggaaaaggaagaagcagatgaagcttgaaaagaagcttcttaatgaagatgatgatgcccttcatcttcctaatcctatgattggttttggggtcccaactgaaccagatctgataactcaaagaacacttccagaagctgctgttgggcctccttatttctactatgagaatgtggcacttgctccaaaaggcgtttggagcaccatttcacggttcttatatgatgtggaaccagagtttgttgattccaagtttttttgtgctgctgctcggaaaaggggctatattcataatctgccaattgagaacagatttccccttcttccatttcctccacgcaccatacatgaagcttttccgttgacaaggaaatggtggccttcctgggacccaagaacaaaattgaactgcatacaaacatgtacagcgagtgcgagattgacagaaaggatccgcaaggctcttgaagcttatgatggtgagccacctttgaatgtccagaaatacgttcttgatgagtgcagaaagtggaatctagtatgggttggaaggaataaggttgcgccacttgaagctgatgaggtggaaatgcttctgggtttccctaaaaaccatacacgaggaggaggaatgagtcggacagataggtataagtcacttggcaattcattccaggtcgacacagtggcttatcatctttcagttttaaaagacatgttccctggtgggatcaatcttctgtctcttttctctgggattggtggtgccgaggttgccctccaccggcttgggatacccctgaagaatgttgtatcggtggaaatatcggaggtgaatagaaacatagtaaggggttggtgggagcaaacgaatcagcgggggactttgattgatatagcagatgtgcaagaactgaatggtgatcgattggagcaattgatgagtagatttggtggatttgaccttgttgtgggtggcagcccatgtaacaaccttgcgggtagcaacagacatcatcgagatggactcgagggtaaagaatcttctctcttcttcgattattgtcgtatattagacttggttagatgcatgcaaaggaaccaatgatttgatgtaaagggggctgatttgtggatacttgctccaaactgtatttatcttgcatcttcattattgcctgagcataacattgaaataatgactgacattctttgcaacttatgacaacttcaaattcttagggaaatgaaaattgatggaaaagttgttggttactgttttccccaagtttgtttgtcactgggaatctttccattttgcttgagtattaaacttatattatccgggtttaggagtgagtggtgtacattggatattttaaaataacaatgtacagattggatgatgaaattgataaggatatggatgaagttgatctgttacttcaatttt

SEQ ID NO: 445 - DNA, 2467 bp, Gossypium raimondii
  source 1..2467: mol_type = genomic DNA
tttttttcttctcttctcagttctcccgctgccgtgtccgtcggtttccgccggatctgatctcgtattcagtgtcggaaatccgtgtcggatcgtgtcgacactggtacggcacccctaattgccgagtccgggtaacggagttctgataagttttcattgtttcttttacaggttaagaaactgttcttgggctgtactatagctcaaggaaaatggatcaaaatggttctggtggtgatgctgataattttgactgggataccgaagatgagctggaaattgataattatgcaatcgcctctcgctcaggagtgtcacttaccaatggggaagctgttttaggcacagcagaggtgagctcgtctgcagattctccgaattccaagttaattgatcattttgttgggatggggttctcccaggaacttgttacgaaagcaattgaggaaaatggagaggagaattcaaatttgatacttgaagctctccttcggtactctgcaagctcgttggctagttcttccaattccaagttgattgatcattttgttgggatgggattctctgaagaaatggttctcaaagcggttcaagaaaatggagaggggaatacagataccatattggagactctattgacatattcggctcttgaaaagtctgctcctgtgcaacaacatgctgattctgatgacttctcgtcagattgtgaagggaattttttggatgatttcacagatattgatagttcttctgataccgaggaaataattaatactggttctgatgaggagagtaaactgttgtacttgacaaaaatggggtactcagaggctgaggcttcagtagccatggagagatgcggtccagactcatcaattgcagagctgacagactttatatgtgctgctcaaatggctaaggctgctgatgcacttttccctgttgaagacaggaagccattctgcaatggctctaattacaataaaaggcgaaacttgggctatgatttgtggaaaaggaagaagcagatgaagcttgaaaagaagcttcttaatgaagatgatgatgcccttcatcttcctaatcctatgattggttttggggtcccaactgaaccagatctgataactcaaagaacacttccagaagctgctgttgggcctccttatttctactatgagaatgtggcacttgctccaaaaggcgtttggagcaccatttcacggttcttatatgatgtggaaccagagtttgttgattccaagtttttttgtgctgctgctcggaaaaggggctatattcataatctgccaattgagaacagatttccccttcttccatttcctccacgcaccatacatgaagcttttccgttgacaaggaaatggtggccttcctgggacccaagaacaaaattgaactgcatacaaacatgtacagcgagtgcgagattgacagaaaggatccgcaaggctcttgaagcttatgatggtgagccacctttgaatgtccagaaatacgttcttgatgagtgcagaaagtggaatctagtatgggttggaaggaataaggttgcgccacttgaagctgatgaggtggaaatgcttctgggtttccctaaaaaccatacacgaggaggaggaatgagtcggacagataggtataagtcacttggcaattcattccaggtcgacacagtggcttatcatctttcagttttaaaagacatgttccctggtgggatcaatcttctgtctcttttctctgggattggtggtgccgaggttgccctccaccggcttgggatacccctgaagaatgttgtatcggtggaaatatcggaggtgaatagaaacatagtaaggggttggtgggagcaaacgaatcagcgggggactttgattgatatagcagatgtgcaagaactgaatggtgatcgattggagcaattgatgagtagatttggtggatttgaccttgttgtgggtggcagcccatgtaacaaccttgcgggtagcaacagacatcatcgagatggactcgagggtaaagaatcttctctcttcttcgattattgtcgtatattagacttggttagatgcatgcaaaggaaccaatgatttgatgtaaagggggctgatttgtggatacttgctccaaactgtatttatcttgcatcttcattattgcctgagcataacattgaaataatgactgacattctttgcaacttatgacaacttcaaattcttagggaaatgaaaattgatggaaaagttgttggttactgttttccccaagtttgtttgtcactgggaatctttccattttgcttgagtattaaacttatattatccgggtttaggagtgagtggtgtacattggatattttaaaataacaatgtacagattggatgatgaaattgataaggatatggatgaagttgatctgttacttcaa

SEQ ID NO: 446 - DNA, 5848 bp, Gossypium raimondii
  source 1..5848: mol_type = genomic DNA
cagcactgctactgttttcgagtttcaatgagtttaaataaaatctaacaaaaccccatcaccaaatttcattttatactggtatcatacattaagtgcctttagcgagttagtgttcttatagcttctggtagttggctagttaattgcgacccgaggtttcattgtaaaccgttcggtgttggggcagggttcttcctttttctccataaaaatagcaaaatgagttaattggaaaattcccagaacagtacattttatataatccatgtctttgctgaagtcccattcaacaccccaattttctccggttatcttaaccaaactaatcgtacgttagggtttcacatattttgtgttttcactcttttttttttaatacttatcagtcccattcggtaaaggtttagtctttttactcttattacaatctcacaaactacatgcattctccaaaggaggaacagggtgagcctctaaaacgaagtttcagtgaggcgaactcagacccacctgattggatggttctagacgacaatgaaactgctaaggaagaagacccttcttcatcttcaaaacctaaggactttaaccccagagggtatcaattgcaggtatatgaggtggcaaagggaagaaacataatagcagtgttggatacaggtgtagggaagacaatgatagctgtgatgctcataaaagattttgttcaagctatcgagtctactgaaagtaaaaaattgattattttcttggctcccactgttcatctagtcaatcagcaatttgaatatgtaaaagatcatactagtttggaagttgaacagtattatggagctaagggggttgatgaatggaccttggattgttgggagaaagaaacaaaggagcatgatgttctggttatgacaccccaaattctattggatgccttaaggaaggcattcttgagtctggagatggtgtccttaatgataatagacgagtgccaccgtgctactggcaaccatccatatgccaaaataatgaaggaattttatcacaaatctaataacaagccaaagatttttggaatgacagcatcacctgtggttagcaaaggtgtgttgtccagcaataattgcgatggtcaaatgtcagaacttgaatgtgttttggattccttgatatacactattgaagacaggacagagatggaagcgtgtgttccttctgctaaagaaagttgtagattttttgatccagcacaattttctagcttggatttgaaagcaaaggtagaagcctcttggttaaagacagatgcgtcattgtcaaatttgcaaagctcactgcaaacttcttataaaggcatggatgataaacttaagaatctacggaagcgattatcaaatgaccatgctaaggttctgcattgccttgataatcttggtctcatatgtgcttatgaggctgttaacatttgtctagagaacatccttgacaccacagaggaatctaaagcatatagagaaagtgtgttgcagtataaaaatttccttgaggaagtccaatgtagaattggggagtctcttcccctcggtgataaaaattttctgaatactggatttgactatttgaaggcagtagatcttggctatatttctccaaaactgcatgaactacttcaactgttccaatcatttggagaaactagacaagtattgtgcctgatttttgttgaaagaattattactgctaaagtaattgaaagatttgcgaagaaagtaagctgtttatcacatttcatggtttcatatatgactggaagtaatacatctgttgattccctggcaccaaaaatgcaaaaggaaaccttggagtcatttcgatctgggaaggtgaatctattgtttactactgatgtggttgaggagggaattcatgtaccaaattgctgttatgtgatacgtttcgacctgccaaagacagtccggagttatgtacaatctcgaggaagagctaggcagaacaattctgaattcattatgatgcttgagaggggaaatgtgaaacaaagaaatcaactatatgatataatcaggagtgagtattcaatgacaaattcggcaattaaaagagatcccgattctgatccatgccttcttaaagatcatacatttgaagaaacaaatgtttttattgtggatgctactggagcttcagttactgcagattctgctgttagcctcatccataaatattgtgggaagctccccggtgataagtattacacaccaaaaccaaatttccagttcacgtcttctgaaggattatataagtgtaaattaacattacctgttaatgcagccgttcaaacaatagttggtccactgtctaggaattctcatttagcaaagcagcttgtatgcttagaagcatgtaagcagcttcatcaaatgggtgccttggatgatcatctcactccatccattgaagagccttcagaaaatgcttgtatttctaaaggaaaagattcaggtgcaggtgcaggtgcaggaactacaaaacggaaggagcttcatggaacaacttgcatacaggcattatgtggaagctggggagaaaaatctgatgatgctgttttctttgcctataaatttgacttcaaatgcaatatcattactgtggtttattctggatttgttcttctaattgaatcaaagcttgcggatgatgtggggaatactgaaatggatcttttcttgattggtaagatggttaaggctagcgtttcttcctgtgggcaagtgtatttgaatgcagaacagatggtgaaagcgaagcgctttcaggaatttttctttaatggcttgtttgggaagttatttgttggatctaaatcatctggagcaccaagagaatttctacttcgggataaaacaagctccttgtggagtccatcccacatgtatttgcttttgcccctcgaggataattcaactgatgaattgagaatacactggccagggataacagcttgcacattagctgcggaatttttaaataaaaattctttgttgggcactgagcaatctgatgatgatggaagcaatccatcattgaacagtactggttcacctgtgacatactgcaaagaaaccaatataatccgctttgctaacagttcagttgatgctaatagtcttagaaatacggtagtattggctattcacactggaagaatctactgcatcattgaagctgtgagtgataaaactgctgaaagttctttcgctgaaactgttgatacggtctcatcagagtttgctaccttctatgaatacttctacaaaaagtacaatattgtgctgaaacatccaggacagcctttgatgctgttaaagcagagccataacccgcacaacttgcttgtgaattttaatgatgaaggtgtatcagctaaggcatcacaagctggcgtggttaatgaaaagcctcggtttcatgtccacatgccccctgagcttttacttgtccttgatgtcccagtgagtgttctaaaatcattgtacttactgccatcattgatgcatcggctggagtccttaatgttggccaaccaactcagagaagagataaacttttgttctagcaacattgatattccaagctcaatgatcctggaagcattaacaacacttagatgctgtgaaagtttttcaatggaaaggctggaattgcttggggattcagttctgaagtatgctgttagctgccacctctttcttagatatcccaacaaacatgagggacaattatctgccaggcgttcgttggcagtttgtaattcaaccctgcataagttgggaactgaccacaaaatacagggatacattagggacagtgcttttgatccccgtcgttgggtagctccaggacaacgagtgcttcgccctgttccttgcaagtgtggtgtggactctctagaagttcctttagataaaaaatttcagacagaagaccctaaagttaaggttggtaaatcctgtgatagaggccaccgatggttgtgttcaaaaaccatatcagattgtgttgaagctctcataggagcatactacttaagtggtggacttgttgctgcccttcatgtgatgaagtggctcgggattgatgccgaacttgatcccttggtggtagctgaggtcattaatcaggcatccttaagaacttatgtccccaattacgaaatccacatgatagagtcaaaagttggctacaatttttctgtcaagtttttcttgcaggaggcattgacacatgaatctttgcacgagtcctactgttaccagagacttgaatttcttggtgattctgtgttggacttgctgatcacccagtatctctacaaccatcacactgatatagatccgggtgagttgactgacctgcgctccgcttcggttaataatgaaaattttgctcaagttgccgtgcgccatgaccttcataagcatcttcaacattgttcaactttactatcaaaccaaataagtgaatatgtgcggtccttcactgaatctgataacaccaccagattagatcccagcataaaaggtcccaaggctcttggagacctggttgaaagtattgttggggcaattctgattgatacaaacctgaatcttgacaaagtctggagaattgttgaaccgttgttgtctccaattgtaaccccagataagcttgagctgcctccattccgggaactgaatgaattatgcgactctcttggatattttattaaggaaaaatgtaaaaataagggggaagtagtgcacgccgagcttctattgcagctagatcatgatttgttggtaggagaggggtttgatagaagtagaaaagtagcaaaaggaaaagccgcttcttgtctgttgaaggaccttgagaacagaggaatctccaggaagaaaaggaaacatgactgtgtggattcaagtcaaaccatggaagatgactcgttagaaccaacaatccctaagaggcaaaggagcgccgaaattcagttgcttgatgaatcaaagaaagcatgcagtgctacgcctgccaccccagttattgtaacagtaaaaacgaagaaaggagggccgaggaccactctttttgagctttgcaagaaactgctgtggcctatgcctagtatcaaagcaacagaacacaaatcaagtgctcccatggaaattggtgaaggtcccgagaggaaaaaagggtttatcagctttgtgtcgaaaatcatcttgaatgtcccaggatacgacattattgaatgcactggagatgcaaaagctgacaaaaaaagttcttcagactcagcagcactgtttatgctttatgagcttgaacagcgtgggaagctcatcatcgaggaaaccttataagtctactagcagttgaccatcaatggtgttcattaaaggtgatctgcaatatcctcactgtccagttattaacttttgactcttggtttaaaattgtaagcgatgactgtgagggctcgtaacaaaatatcaacgatatatcatgtatgtatatattgtccataatctaccaacaagccatgttaataaatctgcagttatttctgaattttatctatttgtcaatgttagggtgagtttggattggcgatgcgtttatttgcggttagtataaaaacagcagtagcggtgagattagatactttagcgtgagacaaaaagtaagctaaacataccgcactgcacccaatcgtccatccaaatctacccttattgttgtatatcaattgtagatttccaaagggaatgtcttttctgcaaattac

SEQ ID NO: 447 - DNA, 5426 bp, Gossypium raimondii
  source 1..5426: mol_type = genomic DNA
taatacttatcagtcccattcggtaaaggtttagtctttttactcttattacaatctcacaaactacatgcattctccaaaggaggaacagggtgagcctctaaaacgaagtttcagtgaggcgaactcagacccacctgattggatggttctagacgacaatgaaactgctaaggaagaagacccttcttcatcttcaaaacctaaggactttaaccccagagggtatcaattgcaggtatatgaggtggcaaagggaagaaacataatagcagtgttggatacaggtgtagggaagacaatgatagctgtgatgctcataaaagattttgttcaagctatcgagtctactgaaagtaaaaaattgattattttcttggctcccactgttcatctagtcaatcagcaatttgaatatgtaaaagatcatactagtttggaagttgaacagtattatggagctaagggggttgatgaatggaccttggattgttgggagaaagaaacaaaggagcatgatgttctggttatgacaccccaaattctattggatgccttaaggaaggcattcttgagtctggagatggtgtccttaatgataatagacgagtgccaccgtgctactggcaaccatccatatgccaaaataatgaaggaattttatcacaaatctaataacaagccaaagatttttggaatgacagcatcacctgtggttagcaaaggtgtgttgtccagcaataattgcgatggtcaaatgtcagaacttgaatgtgttttggattccttgatatacactattgaagacaggacagagatggaagcgtgtgttccttctgctaaagaaagttgtagattttttgatccagcacaattttctagcttggatttgaaagcaaaggtagaagcctcttggttaaagacagatgcgtcattgtcaaatttgcaaagctcactgcaaacttcttataaaggcatggatgataaacttaagaatctacggaagcgattatcaaatgaccatgctaaggttctgcattgccttgataatcttggtctcatatgtgcttatgaggctgttaacatttgtctagagaacatccttgacaccacagaggaatctaaagcatatagagaaagtgtgttgcagtataaaaatttccttgaggaagtccaatgtagaattggggagtctcttcccctcggtgataaaaattttctgaatactggatttgactatttgaaggcagtagatcttggctatatttctccaaaactgcatgaactacttcaactgttccaatcatttggagaaactagacaagtattgtgcctgatttttgttgaaagaattattactgctaaagtaattgaaagatttgcgaagaaagtaagctgtttatcacatttcatggtttcatatatgactggaagtaatacatctgttgattccctggcaccaaaaatgcaaaaggaaaccttggagtcatttcgatctgggaaggtgaatctattgtttactactgatgtggttgaggagggaattcatgtaccaaattgctgttatgtgatacgtttcgacctgccaaagacagtccggagttatgtacaatctcgaggaagagctaggcagaacaattctgaattcattatgatgcttgagaggggaaatgtgaaacaaagaaatcaactatatgatataatcaggagtgagtattcaatgacaaattcggcaattaaaagagatcccgattctgatccatgccttcttaaagatcatacatttgaagaaacaaatgtttttattgtggatgctactggagcttcagttactgcagattctgctgttagcctcatccataaatattgtgggaagctccccggtgataagtattacacaccaaaaccaaatttccagttcacgtcttctgaaggattatataagtgtaaattaacattacctgttaatgcagccgttcaaacaatagttggtccactgtctaggaattctcatttagcaaagcagcttgtatgcttagaagcatgtaagcagcttcatcaaatgggtgccttggatgatcatctcactccatccattgaagagccttcagaaaatgcttgtatttctaaaggaaaagattcaggtgcaggtgcaggaactacaaaacggaaggagcttcatggaacaacttgcatacaggcattatgtggaagctggggagaaaaatctgatgatgctgttttctttgcctataaatttgacttcaaatgcaatatcattactgtggtttattctggatttgttcttctaattgaatcaaagcttgcggatgatgtggggaatactgaaatggatcttttcttgattggtaagatggttaaggctagcgtttcttcctgtgggcaagtgtatttgaatgcagaacagatggtgaaagcgaagcgctttcaggaatttttctttaatggcttgtttgggaagttatttgttggatctaaatcatctggagcaccaagagaatttctacttcgggataaaacaagctccttgtggagtccatcccacatgtatttgcttttgcccctcgaggataattcaactgatgaattgagaatacactggccagggataacagcttgcacattagctgcggaatttttaaataaaaattctttgttgggcactgagcaatctgatgatgatggaagcaatccatcattgaacagtactggttcacctgtgacatactgcaaagaaaccaatataatccgctttgctaacagttcagttgatgctaatagtcttagaaatacggtagtattggctattcacactggaagaatctactgcatcattgaagctgtgagtgataaaactgctgaaagttctttcgctgaaactgttgatacggtctcatcagagtttgctaccttctatgaatacttctacaaaaagtacaatattgtgctgaaacatccaggacagcctttgatgctgttaaagcagagccataacccgcacaacttgcttgtgaattttaatgatgaaggtgtatcagctaaggcatcacaagctggcgtggttaatgaaaagcctcggtttcatgtccacatgccccctgagcttttacttgtccttgatgtcccagtgagtgttctaaaatcattgtacttactgccatcattgatgcatcggctggagtccttaatgttggccaaccaactcagagaagagataaacttttgttctagcaacattgatattccaagctcaatgatcctggaagcattaacaacacttagatgctgtgaaagtttttcaatggaaaggctggaattgcttggggattcagttctgaagtatgctgttagctgccacctctttcttagatatcccaacaaacatgagggacaattatctgccaggcgttcgttggcagtttgtaattcaaccctgcataagttgggaactgaccacaaaatacagggatacattagggacagtgcttttgatccccgtcgttgggtagctccaggacaacgagtgcttcgccctgttccttgcaagtgtggtgtggactctctagaagttcctttagataaaaaatttcagacagaagaccctaaagttaaggttggtaaatcctgtgatagaggccaccgatggttgtgttcaaaaaccatatcagattgtgttgaagctctcataggagcatactacttaagtggtggacttgttgctgcccttcatgtgatgaagtggctcgggattgatgccgaacttgatcccttggtggtagctgaggtcattaatcaggcatccttaagaacttatgtccccaattacgaaatccacatgatagagtcaaaagttggctacaatttttctgtcaagtttttcttgcaggaggcattgacacatgaatctttgcacgagtcctactgttaccagagacttgaatttcttggtgattctgtgttggacttgctgatcacccagtatctctacaaccatcacactgatatagatccgggtgagttgactgacctgcgctccgcttcggttaataatgaaaattttgctcaagttgccgtgcgccatgaccttcataagcatcttcaacattgttcaactttactatcaaaccaaataagtgaatatgtgcggtccttcactgaatctgataacaccaccagattagatcccagcataaaaggtcccaaggctcttggagacctggttgaaagtattgttggggcaattctgattgatacaaacctgaatcttgacaaagtctggagaattgttgaaccgttgttgtctccaattgtaaccccagataagcttgagctgcctccattccgggaactgaatgaattatgcgactctcttggatattttattaaggaaaaatgtaaaaataagggggaagtagtgcacgccgagcttctattgcagctagatcatgatttgttggtaggagaggggtttgatagaagtagaaaagtagcaaaaggaaaagccgcttcttgtctgttgaaggaccttgagaacagaggaatctccaggaagaaaaggaaacatgactgtgtggattcaagtcaaaccatggaagatgactcgttagaaccaacaatccctaagaggcaaaggagcgccgaaattcagttgcttgatgaatcaaagaaagcatgcagtgctacgcctgccaccccagttattgtaacagtaaaaacgaagaaaggagggccgaggaccactctttttgagctttgcaagaaactgctgtggcctatgcctagtatcaaagcaacagaacacaaatcaagtgctcccatggaaattggtgaaggtcccgagaggaaaaaagggtttatcagctttgtgtcgaaaatcatcttgaatgtcccaggatacgacattattgaatgcactggagatgcaaaagctgacaaaaaaagttcttcagactcagcagcactgtttatgctttatgagcttgaacagcgtgggaagctcatcatcgaggaaaccttataagtctactagcagttgaccatcaatggtgttcattaaaggtgatctgcaatatcctcactgtccagttattaacttttgactcttggtttaaaattgtaagcgatgactgtgagggctcgtaacaaaatatcaacgatatatcatgtatgtatatattgtccataatctaccaacaagccatgttaataaatctgcagttatttctgaattttatctatttgtcaatgttagggtgagtttggattggcgatgcgtttatttgcggttagtataaaaacagcagtagcggtgagattagatactttagcgtgagacaaaaagtaagctaaacataccgcactgcacccaatcgtccatccaaatctacccttattgttgtatatca

SEQ ID NO: 448 - DNA, 5800 bp, Gossypium raimondii
  source 1..5800: mol_type = genomic DNA
taatacttatcagtcccattcggtaaaggtttagtctttttactcttattacaatctcacaaactacatgcattctccaaaggaggaacagggtgagcctctaaaacgaagtttcagtgaggcgaactcagacccacctgattggatggttctagacgacaatgaaactgctaaggaagaagacccttcttcatcttcaaaacctaaggactttaaccccagagggtatcaattgcaggtatatgaggtggcaaagggaagaaacataatagcagtgttggatacaggtgtagggaagacaatgatagctgtgatgctcataaaagattttgttcaagctatcgagtctactgaaagtaaaaaattgattattttcttggctcccactgttcatctagtcaatcagcaatttgaatatgtaaaagatcatactagtttggaagttgaacagtattatggagctaagggggttgatgaatggaccttggattgttgggagaaagaaacaaaggagcatgatgttctggttatgacaccccaaattctattggatgccttaaggaaggcattcttgagtctggagatggtgtccttaatgataatagacgagtgccaccgtgctactggcaaccatccatatgccaaaataatgaaggaattttatcacaaatctaataacaagccaaagatttttggaatgacagcatcacctgtggttagcaaaggtgtgttgtccagcaataattgcgatggtcaaatgtcagaacttgaatgtgttttggattccttgatatacactattgaagacaggacagagatggaagcgtgtgttccttctgctaaagaaagttgtagattttttgatccagcacaattttctagcttggatttgaaagcaaaggtagaagcctcttggttaaagacagatgcgtcattgtcaaatttgcaaagctcactgcaaacttcttataaaggcatggatgataaacttaagaatctacggaagcgattatcaaatgaccatgctaaggttctgcattgccttgataatcttggtctcatatgtgcttatgaggctgttaacatttgtctagagaacatccttgacaccacagaggaatctaaagcatatagagaaagtgtgttgcagtataaaaatttccttgaggaagtccaatgtagaattggggagtctcttcccctcggtgataaaaattttctgaatactggatttgactatttgaaggcagtagatcttggctatatttctccaaaactgcatgaactacttcaactgttccaatcatttggagaaactagacaagtattgtgcctgatttttgttgaaagaattattactgctaaagtaattgaaagatttgcgaagaaagtaagctgtttatcacatttcatggtttcatatatgactggaagtaatacatctgttgattccctggcaccaaaaatgcaaaaggaaaccttggagtcatttcgatctgggaaggtgaatctattgtttactactgatgtggttgaggagggaattcatgtaccaaattgctgttatgtgatacgtttcgacctgccaaagacagtccggagttatgtacaatctcgaggaagagctaggcagaacaattctgaattcattatgatgcttgagaggggaaatgtgaaacaaagaaatcaactatatgatataatcaggagtgagtattcaatgacaaattcggcaattaaaagagatcccgattctgatccatgccttcttaaagatcatacatttgaagaaacaaatgtttttattgtggatgctactggagcttcagttactgcagattctgctgttagcctcatccataaatattgtgggaagctccccggtgataagtattacacaccaaaaccaaatttccagttcacgtcttctgaaggattatataagtgtaaattaacattacctgttaatgcagccgttcaaacaatagttggtccactgtctaggaattctcatttagcaaagcagcttgtatgcttagaagcatgtaagcagcttcatcaaatgggtgccttggatgatcatctcactccatccattgaagagccttcagaaaatgcttgtatttctaaaggaaaagattcaggtgcaggtgcaggaactacaaaacggaaggagcttcatggaacaacttgcatacaggcattatgtggaagctggggagaaaaatctgatgatgctgttttctttgcctataaatttgacttcaaatgcaatatcattactgtggtttattctggatttgttcttctaattgaatcaaagcttgcggatgatgtggggaatactgaaatggatcttttcttgattggtaagatggttaaggctagcgtttcttcctgtgggcaagtgtatttgaatgcagaacagatggtgaaagcgaagcgctttcaggaatttttctttaatggcttgtttgggaagttatttgttggatctaaatcatctggagcaccaagagaatttctacttcgggataaaacaagctccttgtggagtccatcccacatgtatttgcttttgcccctcgaggataattcaactgatgaattgagaatacactggccagggataacagcttgcacattagctgcggaatttttaaataaaaattctttgttgggcactgagcaatctgatgatgatggaagcaatccatcattgaacagtactggttcacctgtgacatactgcaaagaaaccaatataatccgctttgctaacagttcagttgatgctaatagtcttagaaatacggtagtattggctattcacactggaagaatctactgcatcattgaagctgtgagtgataaaactgctgaaagttctttcgctgaaactgttgatacggtctcatcagagtttgctaccttctatgaatacttctacaaaaagtacaatattgtgctgaaacatccaggacagcctttgatgctgttaaagcagagccataacccgcacaacttgcttgtgaattttaatgatgaaggtgtatcagctaaggcatcacaagctggcgtggttaatgaaaagcctcggtttcatgtccacatgccccctgagcttttacttgtccttgatgtcccagtgagtgttctaaaatcattgtacttactgccatcattgatgcatcggctggagtccttaatgttggccaaccaactcagagaagagataaacttttgttctagcaacattgatattccaagctcaatgatcctggaagcattaacaacacttagatgctgtgaaagtttttcaatggaaaggctggaattgcttggggattcagttctgaagtatgctgttagctgccacctctttcttagatatcccaacaaacatgagggacaattatctgccaggcgttcgttggcagtttgtaattcaaccctgcataagttgggaactgaccacaaaatacagggatacattagggacagtgcttttgatccccgtcgttgggtagctccaggacaacgagtgcttcgccctgttccttgcaagtgtggtgtggactctctagaagttcctttagataaaaaatttcagacagaagaccctaaagttaaggttggtaaatcctgtgatagaggccaccgatggttgtgttcaaaaaccatatcagattgtgttgaagctctcataggagcatactacttaagtggtggacttgttgctgcccttcatgtgatgaagtggctcgggattgatgccgaacttgatcccttggtggtagctgaggtcattaatcaggcatccttaagaacttatgtccccaattacgaaatccacatgatagagtcaaaagttggctacaatttttctgtcaagtttttcttgcaggaggcattgacacatgaatctttgcacgagtcctactgttaccagagacttgaatttcttggtgattctgtgttggacttgctgatcacccagtatctctacaaccatcacactgatatagatccgggtgagttgactgacctgcgctccgcttcggttaataatgaaaattttgctcaagttgccgtgcgccatgaccttcataagcatcttcaacattgttcaactttactatcaaaccaaataagtgaatatgtgcggtccttcactgaatctgataacaccaccagattagatcccagcataaaaggtcccaaggctcttggagacctggttgaaagtattgttggggcaattctgattgatacaaacctgaatcttgacaaagtctggagaattgttgaaccgttgttgtctccaattgtaaccccagataagcttgagctgcctccattccgggaactgaatgaattatgcgactctcttggatattttattaaggaaaaatgtaaaaataagggggaagtagtgcacgccgagcttctattgcagctagatcatgatttgttggtaggagaggggtttgatagaagtagaaaagtagcaaaaggaaaagccgcttcttgtctgttgaaggaccttgaggtacgcattcataaaagtttgtcaggacatgagaaaggagtgagtctggtcacatcagccatttaacttcacaattattcttcactccctgccttcctttgaccaatcagaagtttctttcatttcatataatataatattaaggttctacatttatgcttacaattggttatcatatgtgtgtctagtctttgtttctttaggtggatttgttgatttgtttgattcccttaggcttcggtcttttagatatgtagtcatgttcggtttaggctttagtcatttaggcatatagtcataaatccatcactgcatgttgagaactgattgtttgcgctaacattggcaatggtcctgatactccatgtcaacagaacagaggaatctccaggaagaaaaggaaacatgactgtgtggattcaagtcaaaccatggaagatgactcgttagaaccaacaatccctaagaggcaaaggagcgccgaaattcagttgcttgatgaatcaaagaaagcatgcagtgctacgcctgccaccccagttattgtaacagtaaaaacgaagaaaggagggccgaggaccactctttttgagctttgcaagaaactgctgtggcctatgcctagtatcaaagcaacagaacacaaatcaagtgctcccatggaaattggtgaaggtcccgagaggaaaaaagggtttatcagctttgtgtcgaaaatcatcttgaatgtcccaggatacgacattattgaatgcactggagatgcaaaagctgacaaaaaaagttcttcagactcagcagcactgtttatgctttatgagcttgaacagcgtgggaagctcatcatcgaggaaaccttataagtctactagcagttgaccatcaatggtgttcattaaaggtgatctgcaatatcctcactgtccagttattaacttttgactcttggtttaaaattgtaagcgatgactgtgagggctcgtaacaaaatatcaacgatatatcatgtatgtatatattgtccataatctaccaacaagccatgttaataaatctgcagttatttctgaattttatctatttgtcaatgttagggtgagtttggattggcgatgcgtttatttgcggttagtataaaaacagcagtagcggtgagattagatactttagcgtgagacaaaaagtaagctaaacataccgcactgcacccaatcgtccatccaaatctacccttattgttgtatatca

SEQ ID NO: 449 - DNA, 4389 bp, Gossypium raimondii
  source 1..4389: mol_type = genomic DNA
atgcattctcccatggaagaagagcagtgttaccctctaaaaacaaccttcagtgaaacacacttacacccatctcagattatggtttcaatcaatgacgatcatgctaagaaccaccacccttcttcatcttcaaatcctgatcactctagccctagagggcatcagctgcaggttgttagatacaaaatgatagctgtaatgcttatcaaagattttgttcaacctatcaactccattgataaaaaaaagttgattattttcttggcccccactgttcatcttgttaatcagcaatttgaatatataaagttccatacaagtttggatgttgaacaatattatggagataaaggggttaatgaatggaactcagggtattgggagaaagacataaaggagcatgatgttcttgttatgacaccccaaattctgttggatgccttgtggaaagcattcttgagtttagagatggtgtccttaatgataatcgacgagtgccaccatgctaccggtaaccatccgtatgcgaaaataatgaaggaattctatcacaaatcgaacaacaaaccgaagattttcgggatgacggcatcgcccttagttagcaaaggtgcattatccaacaatgattgtgaggatcaactttcagaacttgaaaatgttatggattgcatgatatatgcaattgaagacatgacagagatggaaacatatgttcctacagcaaaagaaagttgtaggtttttcgatccaacacgattttgtagttcgggtttgaaagcaatgatcgaagcctcgtggttaaagatagatgcttcattatcaacgttgcaaggctcgattcaaacttcttatacagacatggatgataagtttaaggccctccataaacggtcatccaatgaccatgctaagattctgcattgtctcgacgatcttggtctcatatgtgcttatgaggctgttaaagtctgtcttgagaacatccctgatacaaaagaggagtgtgaagcatataaagaaggtgtattgcagtgcaaaaggttcctcaacgaagtgctacagataatcagggaatcccttcccctgggtgatgaaaattttctgaattccgggtttgactacttaaaggcggtagattcgggctatatatctccgaaactgcatgaactaattgaatttttcttatcactcggagaacctagtcaagtattgtgcctcgtttttgttgaaagaattgttaccgctaaagtaattgaaagatttgtgaagaaagtaagttgtttatcgtgttttgtggtttcgtgtttgactggaagtaatacgtcagttgattccatggcaccaaagattcaaaaggaaactttggaatattttatggtcaatgattgtggagagggaattcatataccaaactgctcatatgtgatacgttttgacttgccgaaaacagtgttgagttatgtacaatctcgaggaagagctaggcagagtggttcccaattcatcatgattctagagaggggaaatgagaaacaaagagatcaactatacgatctaattcggagtgaacattcaatgacgaatacagctatgaatagagatcctgatctatctcttccggaaaaccgtacattggaagaaacaaatgtttctatcgtggctgctactggagcttccattgaagaaacttccaaaaatcgttgcgcttctaaaggaaaagatcccattttcgattcaggaactacaagatggaaggagctgcacggaacaactcagattcgtgcattttccgggagctggggagaaaaagccgatgcttcagttttctttgcctataaaattgacttttcatgcaatgttgttagcgttgtttactctggatttcttactgatgatgtggggaacatcgaagtagatctttacttgatcggaaagatagctaaggctcgtgtttctttttatgggaaagtacatttggatgctgtacagattaccgcagcaaagcgttttcaggaaattttctttaatggcttgttcgggaggctgtttgttggatcatccagaacatcgagggaacttttatttcatagtaaaacgagcttgttgtggcatccatttaacatgtatttgcttctgcccctagaggatagtttgagtaatgaactgagaataaactggcctgggataacagcttgtacattagctgtagagtttttaactgctgacggtaacagaggtaatccgtcattgaaccaaactgattcatccgtgacagaacacaaggagaccaatgtaatccactttgctaacagatctatagatgttaacaatatcagtaacatcgtagtattggcaattcataccggaagaatctattccaccattgaattagttcatgatacatccgccaaaagttctttcaatgacattgttgatatgaactcattgaagttcgcgaccttctccgaatactacaacagaaagtactgcatcgtgctgaaacatccaggacaacctttattgctgttaaagcagagtcataacccgcacaacttgctggttgattttaacgatgaaggttgcagattttcagcacaagcattacaagcaagctcggttaatgaaaagtcatggaatactatccacatgccacccaagcttttgctcatccttgatgtcccggtctatgttctaaaagccttttacttactaccatcactgatgcaccggctcgagtccttaatgttggctagccaacttagggaagagatcgattttcgttcaagcaacttcgatataccgagctcaatgatcctggaagcgttaacaacgcttagatgttgtgaaagcttttcgatggagaggctggaatttctcggtgattcagttctgaagtatgctggttacattagagacagtgctttcgacccccgacgttgggtagctccaggacaactacgtcttcggtcttttccttgtaactgcagggtggactctcgagaagttcctttagataaaaagtttcagactgaagatctggaaattaaggtcagtatatcttgtgatagaggccaccgatggatgtgttcgaaaaccatatcggattgtgttgaagctctcataggagcatactatgtaagtggtggactcattgctgctcttcatatgatgaaatggcttgggatcgatgccgaacttgatccctctttggtagctgaagccattaatcgtgcatccctacaatcttataaattttctatgaagtttttcttacaggaggccttgacacatgcatcggcaaacgagttttactgttaccagaggcttgaatttcttggtgattccgtgttggacttgctgataacccgatatctctactgcaatcacaccgatatagattcaggagaactgactgacctccgatcggcttcagttagtaatgaaacttttgctcaagttgctgtccgtaatgaccttcataagcatcttcgacattgttcaactttactattggaccaaataagtgaatatgcacagtccctccctgaatcttgggacactacacgatcagtacccggcataaaaggtccaaagatatgttcaaaccttattgaaagtatcgtcgcggcaatcttgatcgatacaaacctgaaccttgacgaagtttggagaattgttgagccattgttatctctgatcgtgactcccgataagctcgaggaaaagtgcgttaatacgggagaaatggtgcatgccaagctttggttacagctggatgatattttgttggtcggagaggcattcaatcgaagcaaaaaggtagcaaaaggaaaagcagctttatatctattgaaggaactcgaggatagagggatctcccgaaagagaacgaaacaggatcatgccggttcgagtggaaccactgatgatgatttgttagagccaaaaatgtgcaagaagcagaggatagctgagattccttctccgactaacgactcttcaaggacagcatatggagctgagattccttctccggctaacgcttcttcaaggacagcatatgttattgcaaggataaacacaaataaaggacgaccgagggccactctttacgagatttgtcggaaacagttatggcctaggcctacattcgaaacaacagaaggaagatcacgttctcctatggaaatcggcaaaggtgcagaccgaaaaatcgggtttaacagctttgtaacgaagatcaccttgaatggaccgagttcaggcattattgaatgcagcggagatgtaagagccgacaaaaagagctcttgtgactctgcagcaatccttatgctttacaggcttaaagagctagggaagctcatcatccgcgaatcctag

SEQ ID NO: 450 - DNA, 3584 bp, Gossypium raimondii
  source 1..3584: mol_type = genomic DNA
aatttcattccccctttgattttggagccactccatttattattaaacccttcattttcccccattcctttttatttccctcccacttcccaaaaccctttcctacatttcccgccgtccaaatcagctcaattcctcacttcggattcggcgccagttcggccatcgttgtttatccggctctctgaacaatcatcgccgactggtcagaatccataaaattacctttgtttcggttcaagggtttcttttctcttgtctaaatcgataatgccgagcacgcgaagagcttctaatcctatgaaggacactgattcgaccaagaatccgactcgctcgagccagcgtaatcggaagacagtgttggagcctgaaaatgatgaagtcatcgttgtcagtgaaggagagaacagtgaagtctctcgtggtggtaagcggaaggaaagctctgcctctggagcgggcaacaacgctaagaagtcaaaaccaagtgtagctaaaatgacgcctttggataccgagaatggtgaagctatggtcgttgacggtactgagaacggcagcaaaacgacaccaaaaaattcgaaaaagacgaaaacggatgtagctgttaatgaagacaaggaggaaacaaagtttttaggggaacctgttgatgacgaggaagccagacggcgatggccaaaacgctatcaaggaaagggagcaaaaaaggtcatttcaaagagttcgaatggtgactctgaagagatcattcaagctcgacggcactatacccaggcaaaagttgatggttgtatgatatttaatctttatgatgatgctcatgttaaagctgaagatggagaagattgctatatatgtaaaattgttgagatgtttgaagcagttgatggagatttgtactttacagctcaatggttttacagggctcaagacacagtacttaaaacgttaggccaccttattgacaagaagcgtgtattcttttcacaaattcaagacgacaatcccttggattgtcttgttgcaaagcttaatattgcaaaagtatctttgaacgttgatttggaggcaaagaataaagagattccaagttgtgattattattgtgacatgttatacacattggaatattcgtctttcactaacttgcccccagaagggaaaacaaatgctagcgaagaagcttcatctacaatttctgatgacagcccagatacagtaaatggagctaacagtggttccgaggatgcttcattgctggacctgtattctggttgtggagcaatgtcaaccggcttgtgccttggggcaaatatggccggactaaggctagtgactaaatgggctgtggatataaataaatatgcttgtgaaagtctccaatggaatcatccggaaacaacggtcaggaatgaatctgctgaagattttttagcattattaaaagaatgggaacggctgtgtgcttcattttcatcgtcaaaatctgagaatttggagaggcagtcattcaattcaagtgtaaatgaagataatgtaaatgatgaagaggaagaggaagatgaaaatgaagatggtgatggtgaagtgtttgaagtagagaaatttcttgctatatgttacggtgatccgaaagagaaaggggaacgtgggttgtacttaaaggttcgttggaagaattatgggccagaagaagatacatgggaacctttagatggattgggtgattgtcgagaatgcttgaaggattttgttacaagtggcttcaaagcaaaaattctgcccttacctggtgatgttgatgtggtttgtggagggcctccatgccaaggcatcagtggctttaataggtttagaaacaaggataaccccttgcaagatgaaaagaacaaacaacttcaggttttcatggagatagtggagtacttgaagccaaagtttgttttgatggagaatgttgttgacatagtaaagtttgcagagggatatcttggacgatatgctttgagtaagctaattcatttaaattaccaagtccgaatgggaatgatggcagctggtgcttatggtcttccccaatttcgtatgcgtgctttcttttggggtgctcgtcctaatcaaaaattgccacaatatccacttcctacgcatgatcttgtcctgagaggtgtcatacctgttgagtttgagatgaacactgtaggctgggaagaaggtaaaaagatagagttggaaaagaaacttctactagaagatgccatttctgaccttccatcagttggaaattatgaggataaagatgaaatggactatgacaaagatcctaaaacagagtttcagagattcatcaggttaagaagagaggagatgccaggtttttcttcactaaatgcaaaaccaacaaaacatttgctctatgatcatcgtccacttcaactcaacaccgatgattaccaacgtgtttgccgggttcccaaaaggaagggggcaaattttagagactttccaggtgttatagttaatagtggtaataaagtcgagtgggatcctaacgttgagagggtttatttggaatccggaaaaccattggtccctgattatgccatgtcttttgtcggcggctcatcaagcaaaccatttgctcgtctatggtgggatgaaactgtacccacagtggtcactagggcagaacctcataatcaggcgatattgcatcctgtacaagaccgagttctctcaattcgcgagaacgcaaggttgcaaggcttccctgattactacaagctttttggccccgtcaaggaaaggtacattcaagttggaaatgctgtagcagtgccagtttcaagggcattagggtatgccctggggttagcttaccaaggtgtagtttcaaatgatgaaccattaacgaaacttcctccaagattccctaacatatctgagaaagcatcttcggattcatctcaagataattcttaaacccccccttttttcttcaatctaattaatattagtcaatggaattgtgtattactttttagattttgaaactctaagagtaattaaaacctagtttaatgttcttcattcgatcccttgttgtacgactacgtgttgtcggtgctaatatttttttaattgagttttaatggttaaaacccattaggtaaactagttactaaattgttagtatgtttttattttgttctctaaatgtattgctaataaggtaactgttagtttacattttttgtattgaacttatttgagtagaattgctattactttgagttgaaatgatatatgcatgtattaagtttgtcaaaaaggaatggataaatttgttagtgattataagacttgatattaaagtgtcttatgaaatatttgattaggcacattataatatagtgtcttataatcaccactaaatttatccatttccttttcacaaacttaatacgttcatgtaacatattgtcttgtaatatcgtgtttatatacaatgtgcaatggtatggggattatggaattgatgtttatatacatttattattgcacgatgttcaatatgg

SEQ ID NO: 451 - DNA, 3384 bp, Gossypium raimondii; identical to SEQ ID NO: 399
  source 1..3384: mol_type = genomic DNA

SEQ ID NO: 452 - DNA, 3477 bp, Gossypium raimondii; identical to SEQ ID NO: 400
  source 1..3477: mol_type = genomic DNA

SEQ ID NO: 453 - DNA, 3148 bp, Gossypium raimondii; identical to SEQ ID NO: 401
  source 1..3148: mol_type = genomic DNA

SEQ ID NO: 454 - DNA, 3372 bp, Gossypium raimondii; identical to SEQ ID NO: 406
  source 1..3372: mol_type = genomic DNA

SEQ ID NO: 455 - DNA, 3257 bp, Gossypium raimondii
  source 1..3257: mol_type = genomic DNA
gctcctataagaattaagaagcaggaaaattactattttaatatttttcccttacaccctccattgtcgctctcttttacttttagtgccaaagacccgactcttcagtaatcctgccttcttcttctgtttttactttgcggatggagaaagcaagtactgaagaggcactagaattaccatctctgcccctaccactgccaacaataccatccaatgtgaagctagagagcttgaagcctcccaagtattctattgtcagtaggagagaagttgggacgagtggacgaaagatatccctgcttgccaaccacttcaaagtttctgtcaatgccccagatgctgtattttaccagtatactgttacagttttgtcagaagatagtagagttgttgaaagcaagaggattgggagaaaacttgttgataaactttatcaaacatactcttcggaacttgctggaaaaagatttgcctatgatggggaaaagagtttgtatacagtgggtcctttgccacagaacaagtttgaatttacaatagtgctagaagactcatttgcaaaatggagtcctgatgctgatggaggccctgctgagactggcaagaggacaaagcgttcttttcagtcaaagacttacaaagtggaactaagctattctgctaagatacccttgaagtcaatatctcttgccctcaaaggagttcagtcagatgatagcactcaggatgctttgagagtacttgacatcattctaaggcagcaagctgctgatcgaggttgccttttggtgagacaatcattctttcaagatgattcaaggaattatgttgatttgggaggaggggtattgggtctgcggggcttccattccagttttcgtcccactcaggggggcttgtctttgaatatggatgtatctacaacaatgattttaaggcctggaccagtatttgagtttctaaaacaaaacctgaatctaaatgatgaacgtttctggctgaaagccagacgaatgttgaagaatatgaggattaaaacaagacaccgtaacatggaattcaaaatcactggtctaagtgagaagccctgttgtgagctattcttcccaatgaaagttaaaaatggtggttgtggtgaagtccggactgttgagatcacagtgtatgagtatttcaccaaacactgtggaattgaactcacatattctgcagacatgccatgccttgatgttggtaaaccaaaacgtcctaactatttacccctagagctctgttcacttgtttcacttcagcggtacacaaaagcgttaactacaaatcaaagggcgaccctggttgaaagatccaggcaaaagcctcgggaaagaattcaaattctgactgatgctttgaaaaacaacaaattcaatgagaaccctgtactttctgcatgtgaaatttcaataggtaggcaattgacagaagttgagggtcggatcctggagactccaaggttgaaggttgggaatcacgaggattgcatccctcgaaatggtagatggaactataacaacaagagatttctggatccaaagaaaattgaacgttggattgctgtcaacttctctgctcgctgtgatctcagtcaaatttcaagggatttaatcagttgtgcaagaaacaagggcattgaaatggaacgtccgcacacattgattgaggaggaacggcatcaagctgctaaagctggccctgctgctagagtggaagcaatgtttgatcagattatagcaaagcttcctggcccccctgagttcattctttgtgtcttgccagtgagaaaaaactctgatatatatggaccttggaagaaaaaatgtctttgcgatatgggaattgccacacaatgcattagccctggaaaaattaatgaccaatacctcacaaatgtcctccttaaaatcaattcaaagcttggaggaatcaactctttattggaaatagagaaaccttcaatcctcccattgctgaaggatactcctacattgattttgggaatggatgtctctcatgggtcccctggtcgatcagatgtcccatcaatagctgcagttgttggttcgctccattggcctttgatttcaaggtacagagcatctgtgagaacacaatctccaaagatggagatgattgaagctttatataagccatcaccagacggaaaggttgatgatggtattatcagggaactgcttgttgatttctataaaacgagcggtaatcgcaaaccaaaacaaattatcatcttcagggatggagtaagtgaatcacagtttaaccaagtattaaacattgagctggagcaaatcatcaagtcatatcagtttctgggcgagtctgatgttcccaagttcacagtagtcgttgctcagaagaatcatcatacaaaattattccaagctaatgcccctgaaaatgttccaccagggacagtagtggacacaaaaattgtgcatccgagaaactatgatttctacatgtctgctcatgcagggatgatcggaacatctaggccagctcattatcatgtcttgcttgatgagataggtttctctcctaatgacctgcagaatcttatccactgtctttcctatgtataccaaaggagcacagcagcagtctcaatagtggctcctatttgttatgctcaccttgcggcatatcagatgggccaatttttgaagctggatgaactttcagaaacatcttcaggaaacgtaacatccacaggaagtatccttgtgccagaccttccgaggctgaaaaagaatgtggcaagtacaatgttcttctgttgaggggatcacccatttcagtaaatacatgctaggctaactgtagatagtttgggtaggctaggggtatacaaagcatacaactccaggcttttgcttttgtgattgattattgaggctggctggctttaacaagcaaaagtttttgtttaaaccatgactaggttatgttgaggggttaggagccattataagaaaagcttaggtgtatcttatatttgtttcatattttactttagtcaaaatcctgctattgctcagaagcttcattcagatagaaaaagctttttttccgtttcttctacttttctttgagcttttagaatccatatttaaagtgtgaatacaagaaaatgtttgatttgagctgggggtgttaggagtaagtattcagaagtgaaaaaattgagttgagtctta

SEQ ID NO: 456 - DNA, 3089 bp, Gossypium raimondii
  source 1..3089: mol_type = genomic DNA
ttactgattgatttcaagatggagaaagcaagtactgaagaggcactagaattaccatctctgcccctaccactgccaacaataccatccaatgtgaagctagagagcttgaagcctcccaagtattctattgtcagtaggagagaagttgggacgagtggacgaaagatatccctgcttgccaaccacttcaaagtttctgtcaatgccccagatgctgtattttaccagtatactgttacagttttgtcagaagatagtagagttgttgaaagcaagaggattgggagaaaacttgttgataaactttatcaaacatactcttcggaacttgctggaaaaagatttgcctatgatggggaaaagagtttgtatacagtgggtcctttgccacagaacaagtttgaatttacaatagtgctagaagactcatttgcaaaatggagtcctgatgctgatggaggccctgctgagactggcaagaggacaaagcgttcttttcagtcaaagacttacaaagtggaactaagctattctgctaagatacccttgaagtcaatatctcttgccctcaaaggagttcagtcagatgatagcactcaggatgctttgagagtacttgacatcattctaaggcagcaagctgctgatcgaggttgccttttggtgagacaatcattctttcaagatgattcaaggaattatgttgatttgggaggaggggtattgggtctgcggggcttccattccagttttcgtcccactcaggggggcttgtctttgaatatggatgtatctacaacaatgattttaaggcctggaccagtatttgagtttctaaaacaaaacctgaatctaaatgatgaacgtttctggctgaaagccagacgaatgttgaagaatatgaggattaaaacaagacaccgtaacatggaattcaaaatcactggtctaagtgagaagccctgttgtgagctattcttcccaatgaaagttaaaaatggtggttgtggtgaagtccggactgttgagatcacagtgtatgagtatttcaccaaacactgtggaattgaactcacatattctgcagacatgccatgccttgatgttggtaaaccaaaacgtcctaactatttacccctagagctctgttcacttgtttcacttcagcggtacacaaaagcgttaactacaaatcaaagggcgaccctggttgaaagatccaggcaaaagcctcgggaaagaattcaaattctgactgatgctttgaaaaacaacaaattcaatgagaaccctgtactttctgcatgtgaaatttcaataggtaggcaattgacagaagttgagggtcggatcctggagactccaaggttgaaggttgggaatcacgaggattgcatccctcgaaatggtagatggaactataacaacaagagatttctggatccaaagaaaattgaacgttggattgctgtcaacttctctgctcgctgtgatctcagtcaaatttcaagggatttaatcagttgtgcaagaaacaagggcattgaaatggaacgtccgcacacattgattgaggaggaacggcatcaagctgctaaagctggccctgctgctagagtggaagcaatgtttgatcagattatagcaaagcttcctggcccccctgagttcattctttgtgtcttgccagtgagaaaaaactctgatatatatggaccttggaagaaaaaatgtctttgcgatatgggaattgccacacaatgcattagccctggaaaaattaatgaccaatacctcacaaatgtcctccttaaaatcaattcaaagcttggaggaatcaactctttattggaaatagagaaaccttcaatcctcccattgctgaaggatactcctacattgattttgggaatggatgtctctcatgggtcccctggtcgatcagatgtcccatcaatagctgcagttgttggttcgctccattggcctttgatttcaaggtacagagcatctgtgagaacacaatctccaaagatggagatgattgaagctttatataagccatcaccagacggaaaggttgatgatggtattatcagggaactgcttgttgatttctataaaacgagcggtaatcgcaaaccaaaacaaattatcatcttcagggatggagtaagtgaatcacagtttaaccaagtattaaacattgagctggagcaaatcatcaagtcatatcagtttctgggcgagtctgatgttcccaagttcacagtagtcgttgctcagaagaatcatcatacaaaattattccaagctaatgcccctgaaaatgttccaccagggacagtagtggacacaaaaattgtgcatccgagaaactatgatttctacatgtctgctcatgcagggatgatcggaacatctaggccagctcattatcatgtcttgcttgatgagataggtttctctcctaatgacctgcagaatcttatccactgtctttcctatgtataccaaaggagcacagcagcagtctcaatagatgggccaatttttgaagctggatgaactttcagaaacatcttcaggaaacgtaacatccacaggaagtatccttgtgccagaccttccgaggctgaaaaagaatgtggcaagtacaatgttcttctgttgaggggatcacccatttcagtaaatacatgctaggctaactgtagatagtttgggtaggctaggggtatacaaagcatacaactccaggcttttgcttttgtgattgattattgaggctggctggctttaacaagcaaaagtttttgtttaaaccatgactaggttatgttgaggggttaggagccattataagaaaagcttaggtgtatcttatatttgtttcatattttactttagtcaaaatcctgctattgctcagaagcttcattcagatagaaaaagctttttttccgtttcttctacttttctttgagcttttagaatccatatttaaagtgtgaatacaagaaaatgtttgatttgagctgggggtgttaggagtaagtattcagaagtgaaaaaattgagttgag

SEQ ID NO: 457 - DNA, 2886 bp, Gossypium raimondii
  source 1..2886: mol_type = genomic DNA
gactcttcagtaatcctgccttcttcttctgtttttactttgcggatggagaaagcaagtactgaagaggcactagaattaccatctctgcccctaccactgccaacaataccatccaatgtgaagctagagagcttgaagcctcccaagtattctattgtcagtaggagagaagttgggacgagtggacgaaagatatccctgcttgccaaccacttcaaagtttctgtcaatgccccagatgctgtattttaccagtatactgttacagttttgtcagaagatagtagagttgttgaaagcaagaggattgggagaaaacttgttgataaactttatcaaacatactcttcggaacttgctggaaaaagatttgcctatgatggggaaaagagtttgtatacagtgggtcctttgccacagaacaagtttgaatttacaatagtgctagaagactcatttgcaaaatggagtcctgatgctgatggaggccctgctgagactggcaagaggacaaagcgttcttttcagtcaaagacttacaaagtggaactaagctattctgctaagatacccttgaagtcaatatctcttgccctcaaaggagttcagtcagatgatagcactcaggatgctttgagagtacttgacatcattctaaggcagcaagctgctgatcgaggttgccttttggtgagacaatcattctttcaagatgattcaaggaattatgttgatttgggaggaggggtattgggtctgcggggcttccattccagttttcgtcccactcaggggggcttgtctttgaatatggatgtatctacaacaatgattttaaggcctggaccagtatttgagtttctaaaacaaaacctgaatctaaatgatgaacgtttctggctgaaagccagacgaatgttgaagaatatgaggattaaaacaagacaccgtaacatggaattcaaaatcactggtctaagtgagaagccctgttgtgagctattcttcccaatgaaagttaaaaatggtggttgtggtgaagtccggactgttgagatcacagtgtatgagtatttcaccaaacactgtggaattgaactcacatattctgcagacatgccatgccttgatgttggtaaaccaaaacgtcctaactatttacccctagagctctgttcacttgtttcacttcagcggtacacaaaagcgttaactacaaatcaaagggcgaccctggttgaaagatccaggcaaaagcctcgggaaagaattcaaattctgactgatgctttgaaaaacaacaaattcaatgagaaccctgtactttctgcatgtgaaatttcaataggtaggcaattgacagaagttgagggtcggatcctggagactccaaggttgaaggttgggaatcacgaggattgcatccctcgaaatggtagatggaactataacaacaagagatttctggatccaaagaaaattgaacgttggattgctgtcaacttctctgctcgctgtgatctcagtcaaatttcaagggatttaatcagttgtgcaagaaacaagggcattgaaatggaacgtccgcacacattgattgaggaggaacggcatcaagctgctaaagctggccctgctgctagagtggaagcaatgtttgatcagattatagcaaagcttcctggcccccctgagttcattctttgtgtcttgccagtgagaaaaaactctgatatatatggaccttggaagaaaaaatgtctttgcgatatgggaattgccacacaatgcattagccctggaaaaattaatgaccaatacctcacaaatgtcctccttaaaatcaattcaaagcttggaggaatcaactctttattggaaatagagaaaccttcaatcctcccattgctgaaggatactcctacattgattttgggaatggatgtctctcatgggtcccctggtcgatcagatgtcccatcaatagctgcagttgttggttcgctccattggcctttgatttcaaggtacagagcatctgtgagaacacaatctccaaagatggagatgattgaagctttatataagccatcaccagacggaaaggttgatgatggtattatcagggaactgcttgttgatttctataaaacgagcggtaatcgcaaaccaaaacaaattatcatcttcagggatggagtaagtgaatcacagtttaaccaagtattaaacattgagctggagcaaatcatcaagtcatatcagtttctgggcgagtctgatgttcccaagttcacagtagtcgttgctcagaagaatcatcatacaaaattattccaagctaatgcccctgaaaatgttccaccagggacagtagtggacacaaaaattgtgcatccgagaaactatgatttctacatgtctgctcatgcagggatgatcggaacatctaggccagctcattatcatgtcttgcttgatgagataggtttctctcctaatgacctgcagaatcttatccactgtctttcctatgtgtaagttataccaaaggagcacagcagcagtctcaatagtggctcctatttgttatgctcaccttgcggcatatcagatgggccaatttttgaagctggatgaactttcagaaacatcttcaggaaacgtaacatccacaggaagtatccttgtgccagaccttccgaggctgaaaaagaatgtggcaagtacaatgttcttctgttgaggggatcacccatttcagtaaatacatgctaggctaactgtagatagtttgggtaggctaggggtatacaaagcatacaactccaggcttttgcttttgtgattgattattgaggctggctggctttaacaagcaaa

SEQ ID NO: 458 - DNA, 3137 bp, Gossypium raimondii
  source 1..3137: mol_type = genomic DNA
agtcaagagtgtcgtttgtttcattttttgtcccttctgttttggagtttttgaaattttcatctgtttgcttagttttccaaatttccggcaatgtctggccgaggcggtggtgaacgtggcagtggtcggggtggtggtcgacgtggccgggggcagggccgtggtcgcggtcaaccttcgcagtcttcctctcgcggcggcggcggtagagcaagaggccgtggatcatctggttctactgcaacttataatccccctcctcctcaaatggctccggctcagccacctcctcaaatggctgtagctacgccagttcctccatcgggggcccctttttctcatccttcttcaagttctggtgtaggatcactttccagagaggtatcggagaagcttacaatggagccggtggctgtgactacggcgcctcctcttcctccgtcgtcgtcaaaggcgattaggttccctccaagaccggggttcggcacggtcggtacaaagtgtgtggttagggccaaccattttctcgtagatgttgctaatgccgatcttcatcactacgatgttactataacgcctgaggtaaccgcaaaaaaggttaacagagcaataatgaagcaacttattgatgtatacaaagagtcgcatcttggacgtcggtgtccagcttatgatggcaggaagagtttgtacactgctggtcctcttcccttcgagtcaaaggagcttgttatcaagctacctgaggaagatcgcagtgctggttcgtctaggcctgcgcggaaggagcgacaatttaaggttgcaatcaaattggcctccaagccagaccttcattatctgagggagtttctgagcagaaagcattttgaatgccctcaagaagctattcaagttctggatgttgttcttagagctaaaccatctcagacatatactgaggtgggaaggtcttttttccatacatcattaggtcctagaggagaacttggtaatggaatagaatactggtctggatattatcagagtcttcgacccactcagatgggtttatctcttaatattgatgtgtctgctcgatcattctatgagccaattttagtttcagagtttgttgcgaaacatttccgacgatcaaacctgtcaaagccgctgtctgatcaagatcgtattaaagtgaaaaaggccttgaagggagtaagagttaagctcatctacatggattatgccaaaacttgcaagattattggagtatctagagaccctataagccagttgacatttactcatgatgataagagaacaaatgtctctgtggtcaagtatttccgtgagaaatacaatgttgtgcttaaatatccatccttgcctgcacttcaaagtggaagcgaagctagacctgtctacctgccaatggagctttgtagtatcgttgagggtcaaagatacacaaaaaaactaaatgaacaacaagttagatctctgctgagagcaacttgtcaacgtccgaacattagggaggggaatattacaaagatggtccaggtcaataattttgaggtggaggagcttgttactaaagaatttggaatgcatgttcgcaaagaacttgcattgattaatgcacgagttctaaatcctccagtgctaaagtatcacgatagtggacgtgacaaaattgttaatcctagctgtgggcaatggaacatgatcaacaagaaaatggtcaatgggggtaaagttgatttctggtcttgtgtgaacttctcctctgaatataggaatatgtcagaagacttctgtgcggggctggtgaatatgtgtaacagcaaaggaatggtgtttcgccaaactccttcaattgcaatgcgatcagctcgtgctgatcgaattgatcagactctcatggatgtatacaaagagtctgcaggcttgaataagccacttaagttgttgataattatcttacctgatcagactggctcatatggaaaaataaagcgaatttgtgagacggagctaggtattgtttcacaatgttgtaagcctgcgcaagcttcaaagtttagcaaccaatattttgaaaatgttgctctcaagatcaatgctaaggttggggggagaaatactgtgctgaacgatgctgttttaaggagaattccgcttgtgactgatgtccctacaatcatttttggggcagatgtcactcatccgccgcctggcgaagactctagttcttctatagctgcagtcgttgcttcaatggattggcctgaggtaaccaagtatcgtggaattgtctctgcacagactcaccgggtggaaataatcgaggatctttataaacaaactagggatccacagaagggtttagttgagggtggaatggttagggagttgcttcttgctttctacaggtcaacgaaacaaaagccttctagaattatcttctatagagatggtgttagtgaaggacaattcagccaagttttgctttatgaaatggatgcgattcggaaggcttgttcctcgctacaggaaggatatatgcctcgggttacatttgttgtggttcaaaagaggcatcatactcgcttattccctactgatcgcaacaaaactgataggagtggcaacatattaccaggtactgttgtggatactagcatctgtcatccaactgagtttgatttttatctcaatagtcatgctggaatccaggggacaagcaagcccacacattaccacgttttgttggatgaaaatggcttcagtgctgacatcttgcaagtgctcacaaacaatttatgttacacgtatgcgaggtgtaccaagtccgtttccatagttcctccggcgtactatgctcacctcgctgcttatagggcacgctattatattgaggatgagatgtcggatagtgggtctactggtggaggccgaaagccgaaagacaaggttgtagaggttaggccgctgcccagcataaaggataatgtgaaggaagtgatgttctacgtctgataaattatgtttggttgattgtgggaagttgcgcaagtatagttgcacagtttgtggatgatggtggatcttgttgattccattggtggactttgtaattatttaatttt

SEQ ID NO: 459 - DNA, 3400 bp, Gossypium raimondii
  source 1..3400: mol_type = genomic DNA
cttctattataaaatgggctcattcattcctagcctctctgtactcaagagtcaagagtgtcgtttgtttcattttttgtcccttctgttttggagtttttgaaattttcatctgtttgcttagttttccaaatttccggcaatgtctggccgaggcggtggtgaacgtggcagtggtcggggtggtggtcgacgtggccgggggcagggccgtggtcgcggtcaaccttcgcagtcttcctctcgcggcggcggcggtagagcaagaggccgtggatcatctggttctactgcaacttataatccccctcctcctcaaatggctccggctcagccacctcctcaaatggctgtagctacgccagttcctccatcgggggcccctttttctcatccttcttcaagttctggtgtaggatcactttccagagaggtatcggagaagcttacaatggagccggtggctgtgactacggcgcctcctcttcctccgtcgtcgtcaaaggcgattaggttccctccaagaccggggttcggcacggtcggtacaaagtgtgtggttagggccaaccattttctcgtagatgttgctaatgccgatcttcatcactacgatgttactataacgcctgaggtaaccgcaaaaaaggttaacagagcaataatgaagcaacttattgatgtatacaaagagtcgcatcttggacgtcggtgtccagcttatgatggcaggaagagtttgtacactgctggtcctcttcccttcgagtcaaaggagcttgttatcaagctacctgaggaagatcgcagtgctggttcgtctaggcctgcgcggaaggagcgacaatttaaggttgcaatcaaattggcctccaagccagaccttcattatctgagggagtttctgagcagaaagcattttgaatgccctcaagaagctattcaagttctggatgttgttcttagagctaaaccatctcagacatatactgaggtgggaaggtcttttttccatacatcattaggtcctagaggagaacttggtaatggaatagaatactggtctggatattatcagagtcttcgacccactcagatgggtttatctcttaatattgatgtgtctgctcgatcattctatgagccaattttagtttcagagtttgttgcgaaacatttccgacgatcaaacctgtcaaagccgctgtctgatcaagatcgtattaaagtgaaaaaggccttgaagggagtaagagttaagctcatctacatggattatgccaaaacttgcaagattattggagtatctagagaccctataagccagttgacatttactcatgatgataagagaacaaatgtctctgtggtcaagtatttccgtgagaaatacaatgttgtgcttaaatatccatccttgcctgcacttcaaagtggaagcgaagctagacctgtctacctgccaatggagctttgtagtatcgttgagggtcaaagatacacaaaaaaactaaatgaacaacaagttagatctctgctgagagcaacttgtcaacgtccgaacattagggaggggaatattacaaagatggtccaggtcaataattttgaggtggaggagcttgttactaaagaatttggaatgcatgttcgcaaagaacttgcattgattaatgcacgagttctaaatcctccagtgctaaagtatcacgatagtggacgtgacaaaattgttaatcctagctgtgggcaatggaacatgatcaacaagaaaatggtcaatgggggtaaagttgatttctggtcttgtgtgaacttctcctctgaatataggaatatgtcagaagacttctgtgcggggctggtgaatatgtgtaacagcaaaggaatggtgtttcgccaaactccttcaattgcaatgcgatcagctcgtgctgatcgaattgatcagactctcatggatgtatacaaagagtctgcaggcttgaataagccacttaagttgttgataattatcttacctgatcagactggctcatatggaaaaataaagcgaatttgtgagacggagctaggtattgtttcacaatgttgtaagcctgcgcaagcttcaaagtttagcaaccaatattttgaaaatgttgctctcaagatcaatgctaaggttggggggagaaatactgtgctgaacgatgctgttttaaggagaattccgcttgtgactgatgtccctacaatcatttttggggcagatgtcactcatccgccgcctggcgaagactctagttcttctatagctgcagtcgttgcttcaatggattggcctgaggtaaccaagtatcgtggaattgtctctgcacagactcaccgggtggaaataatcgaggatctttataaacaaactagggatccacagaagggtttagttgagggtggaatggttagggagttgcttcttgctttctacaggtcaacgaaacaaaagccttctagaattatcttctatagagatggtgttagtgaaggacaattcagccaagttttgctttatgaaatggatgcgattcggaaggcttgttcctcgctacaggaaggatatatgcctcgggttacatttgttgtggttcaaaagaggcatcatactcgcttattccctactgatcgcaacaaaactgataggagtggcaacatattaccaggtactgttgtggatactagcatctgtcatccaactgagtttgatttttatctcaatagtcatgctggaatccaggggacaagcaagcccacacattaccacgttttgttggatgaaaatggcttcagtgctgacatcttgcaagtgctcacaaacaatttatgttacacgtatgcgaggtgtaccaagtccgtttccatagttcctccggcgtactatgctcacctcgctgcttatagggcacgctattatattgaggatgagatgtcggatagtgggtctactggtggaggccgaaagccgaaagacaaggttgtagaggttaggccgctgcccagcataaaggataatgtgaaggaagtgatgttctacgtctgataaattatgtttggttgattgtgggaagttgcgcaagtatagttgcacagtttgtggatgatggtggagtctaattttggagtttttgttttggtggttgagcgacttgttgtctgaagtttgaattattataaatcacacactgtttgtggattacgaaaattacataaatgttctttatttttaagacatgttcttagaaaggagttttggtatcattcttaagcttcttttatatcaccgattaatacaagagacgatgaaattttagagaataatgtctttttattaagagtttttaaatgttcagtacacaaatggtaa

SEQ ID NO: 460 - DNA, 3286 bp, Gossypium raimondii
  source 1..3286: mol_type = genomic DNA
agtcaagagtgtcgtttgtttcattttttgtcccttctgttttggagtttttgaaattttcatctgtttgcttagttttccaaatttccggcaatgtctggccgaggcggtggtgaacgtggcagtggtcggggtggtggtcgacgtggccgggggcagggccgtggtcgcggtcaaccttcgcagtcttcctctcgcggcggcggcggtagagcaagaggccgtggatcatctggttctactgcaacttataatccccctcctcctcaaatggctccggctcagccacctcctcaaatggctgtagctacgccagttcctccatcgggggcccctttttctcatccttcttcaagttctggtgtaggatcactttccagagaggtatcggagaagcttacaatggagccggtggctgtgactacggcgcctcctcttcctccgtcgtcgtcaaaggcgattaggttccctccaagaccggggttcggcacggtcggtacaaagtgtgtggttagggccaaccattttctcgtagatgttgctaatgccgatcttcatcactacgatgttactataacgcctgaggtaaccgcaaaaaaggttaacagagcaataatgaagcaacttattgatgtatacaaagagtcgcatcttggacgtcggtgtccagcttatgatggcaggaagagtttgtacactgctggtcctcttcccttcgagtcaaaggagcttgttatcaagctacctgaggaagatcgcagtgctggttcgtctaggcctgcgcggaaggagcgacaatttaaggttgcaatcaaattggcctccaagccagaccttcattatctgagggagtttctgagcagaaagcattttgaatgccctcaagaagctattcaagttctggatgttgttcttagagctaaaccatctcagacatatactgaggtgggaaggtcttttttccatacatcattaggtcctagaggagaacttggtaatggaatagaatactggtctggatattatcagagtcttcgacccactcagatgggtttatctcttaatattgatgtgtctgctcgatcattctatgagccaattttagtttcagagtttgttgcgaaacatttccgacgatcaaacctgtcaaagccgctgtctgatcaagatcgtattaaagtgaaaaaggccttgaagggagtaagagttaagctcatctacatggattatgccaaaacttgcaagattattggagtatctagagaccctataagccagttgacatttactcatgatgataagagaacaaatgtctctgtggtcaagtatttccgtgagaaatacaatgttgtgcttaaatatccatccttgcctgcacttcaaagtggaagcgaagctagacctgtctacctgccaatggagctttgtagtatcgttgagggtcaaagatacacaaaaaaactaaatgaacaacaagttagatctctgctgagagcaacttgtcaacgtccgaacattagggaggggaatattacaaagatggtccaggtcaataattttgaggtggaggagcttgttactaaagaatttggaatgcatgttcgcaaagaacttgcattgattaatgcacgagttctaaatcctccagtgctaaagtatcacgatagtggacgtgacaaaattgttaatcctagctgtgggcaatggaacatgatcaacaagaaaatggtcaatgggggtaaagttgatttctggtcttgtgtgaacttctcctctgaatataggaatatgtcagaagacttctgtgcggggctggtgaatatgtgtaacagcaaaggaatggtgtttcgccaaactccttcaattgcaatgcgatcagctcgtgctgatcgaattgatcagactctcatggatgtatacaaagagtctgcaggcttgaataagccacttaagttgttgataattatcttacctgatcagactggctcatatggaaaaataaagcgaatttgtgagacggagctaggtattgtttcacaatgttgtaagcctgcgcaagcttcaaagtttagcaaccaatattttgaaaatgttgctctcaagatcaatgctaaggttggggggagaaatactgtgctgaacgatgctgttttaaggagaattccgcttgtgactgatgtccctacaatcatttttggggcagatgtcactcatccgccgcctggcgaagactctagttcttctatagctgcagtcgttgcttcaatggattggcctgaggtaaccaagtatcgtggaattgtctctgcacagactcaccgggtggaaataatcgaggatctttataaacaaactagggatccacagaagggtttagttgagggtggaatggttagggagttgcttcttgctttctacaggtcaacgaaacaaaagccttctagaattatcttctatagagatggtgttagtgaaggacaattcagccaagttttgctttatgaaatggatgcgattcggaaggaaggatatatgcctcgggttacatttgttgtggttcaaaagaggcatcatactcgcttattccctactgatcgcaacaaaactgataggagtggcaacatattaccaggtactgttgtggatactagcatctgtcatccaactgagtttgatttttatctcaatagtcatgctggaatccaggggacaagcaagcccacacattaccacgttttgttggatgaaaatggcttcagtgctgacatcttgcaagtgctcacaaacaatttatgttacacgtatgcgaggtgtaccaagtccgtttccatagttcctccggcgtactatgctcacctcgctgcttatagggcacgctattatattgaggatgagatgtcggatagtgggtctactggtggaggccgaaagccgaaagacaaggttgtagaggttaggccgctgcccagcataaaggataatgtgaaggaagtgatgttctacgtctgataaattatgtttggttgattgtgggaagttgcgcaagtatagttgcacagtttgtggatgatggtggagtctaattttggagtttttgttttggtggttgagcgacttgttgtctgaagtttgaattattataaatcacacactgtttgtggattacgaaaattacataaatgttctttatttttaagacatgttcttagaaaggagttttggtatcattcttaagcttcttttatatcaccgattaatacaagagacgatgaaattttagagaata

SEQ ID NO: 461 - DNA, 3388 bp, Gossypium raimondii
  source 1..3388: mol_type = genomic DNA
agtcaagagtgtcgtttgtttcattttttgtcccttctgttttggagtttttgaaattttcatctgtttgcttagttttccaaatttccggcaatgtctggccgaggcggtggtgaacgtggcagtggtcggggtggtggtcgacgtggccgggggcagggccgtggtcgcggtcaaccttcgcagtcttcctctcgcggcggcggcggtagagcaagaggccgtggatcatctggttctactgcaacttataatccccctcctcctcaaatggctccggctcagccacctcctcaaatggctgtagctacgccagttcctccatcgggggcccctttttctcatccttcttcaagttctggtgtaggatcactttccagagaggtatcggagaagcttacaatggagccggtggctgtgactacggcgcctcctcttcctccgtcgtcgtcaaaggcgattaggttccctccaagaccggggttcggcacggtcggtacaaagtgtgtggttagggccaaccattttctcgtagatgttgctaatgccgatcttcatcactacgatgttactataacgcctgaggtaaccgcaaaaaaggttaacagagcaataatgaagcaacttattgatgtatacaaagagtcgcatcttggacgtcggtgtccagcttatgatggcaggaagagtttgtacactgctggtcctcttcccttcgagtcaaaggagcttgttatcaagctacctgaggaagatcgcagtgctggttcgtctaggcctgcgcggaaggagcgacaatttaaggttgcaatcaaattggcctccaagccagaccttcattatctgagggagtttctgagcagaaagcattttgaatgccctcaagaagctattcaagttctggatgttgttcttagagctaaaccatctcagacatatactgaggtgggaaggtcttttttccatacatcattaggtcctagaggagaacttggtaatggaatagaatactggtctggatattatcagagtcttcgacccactcagatgggtttatctcttaatattgatgtgtctgctcgatcattctatgagccaattttagtttcagagtttgttgcgaaacatttccgacgatcaaacctgtcaaagccgctgtctgatcaagatcgtattaaagtgaaaaaggccttgaagggagtaagagttaagctcatctacatggattatgccaaaacttgcaagattattggagtatctagagaccctataagccagttgacatttactcatgatgataagagaacaaatgtctctgtggtcaagtatttccgtgagaaatacaatgttgtgcttaaatatccatccttgcctgcacttcaaagtggaagcgaagctagacctgtctacctgccaatggagctttgtagtatcgttgagggtcaaagatacacaaaaaaactaaatgaacaacaagttagatctctgctgagagcaacttgtcaacgtccgaacattagggaggggaatattacaaagatggtccaggtcaataattttgaggtggaggagcttgttactaaagaatttggaatgcatgttcgcaaagaacttgcattgattaatgcacgagttctaaatcctccagtgctaaagtatcacgatagtggacgtgacaaaattgttaatcctagctgtgggcaatggaacatgatcaacaagaaaatggtcaatgggggtaaagttgatttctggtcttgtgtgaacttctcctctgaatataggaatatgtcagaagacttctgtgcggggctggtgaatatgtgtaacagcaaaggaatggtgtttcgccaaactccttcaattgcaatgcgatcagctcgtgctgatcgaattgatcagactctcatggatgtatacaaagagtctgcaggcttgaataagccacttaagttgttgataattatcttacctgatcagactggctcatatggaaaaataaagcgaatttgtgagacggagctaggtattgtttcacaatgttgtaagcctgcgcaagcttcaaagtttagcaaccaatattttgaaaatgttgctctcaagatcaatgctaaggttggggggagaaatactgtgctgaacgatgctgttttaaggagaattccgcttgtgactgatgtccctacaatcatttttggggcagatgtcactcatccgccgcctggcgaagactctagttcttctatagctgcagtcgttgcttcaatggattggcctgaggtaaccaagtatcgtggaattgtctctgcacagactcaccgggtggaaataatcgaggatctttataaacaaactagggatccacagaagggtttagttgagggtggaatggttagggagttgcttcttgctttctacaggtcaacgaaacaaaagccttctagaattatcttctatagagatggtgttagtgaaggacaattcagccaagttttgctttatgaaatggatgcgattcggaaggcttgttcctcgctacaggaaggatatatgcctcgggttacatttgttgtggttcaaaagaggcatcatactcgcttattccctactgatcgcaacaaaactgataggagtggcaacatattaccaggtactgttgtggatactagcatctgtcatccaactgagtttgatttttatctcaatagtcatgctggaatccaggtaaaatgaggccttcccttgaagtgtgatggtttttatgttaattttgtccgatctgatattgatattgatgttgttgtgtaggggacaagcaagcccacacattaccacgttttgttggatgaaaatggcttcagtgctgacatcttgcaagtgctcacaaacaatttatgttacacgtatgcgaggtgtaccaagtccgtttccatagttcctccggcgtactatgctcacctcgctgcttatagggcacgctattatattgaggatgagatgtcggatagtgggtctactggtggaggccgaaagccgaaagacaaggttgtagaggttaggccgctgcccagcataaaggataatgtgaaggaagtgatgttctacgtctgataaattatgtttggttgattgtgggaagttgcgcaagtatagttgcacagtttgtggatgatggtggagtctaattttggagtttttgttttggtggttgagcgacttgttgtctgaagtttgaattattataaatcacacactgtttgtggattacgaaaattacataaatgttctttatttttaagacatgttcttagaaaggagttttggtatcattcttaagcttcttttatatcaccgattaatacaagagacgatgaaattttagagaata

SEQ ID NO: 462 - DNA, 3270 bp, Gossypium raimondii
  source 1..3270: mol_type = genomic DNA
ggctcattcattcctagcctctctgtactcaagagtcaagagtgtcgtttgtttcattttttgtcccttctgttttggagtttttgaaattttcatctgtttgcttagttttccaaatttccggcaatgtctggccgaggcggtggtgaacgtggcagtggtcggggtggtggtcgacgtggccgggggcagggccgtggtcgcggtcaaccttcgcagtcttcctctcgcggcggcggcggtagagcaagaggccgtggatcatctggttctactgcaacttataatccccctcctcctcaaatggctccggctcagccacctcctcaaatggctgtagctacgccagttcctccatcgggggcccctttttctcatccttcttcaagttctggtgtaggatcactttccagagaggtatcggagaagcttacaatggagccggtggctgtgactacggcgcctcctcttcctccgtcgtcgtcaaaggcgattaggttccctccaagaccggggttcggcacggtcggtacaaagtgtgtggttagggccaaccattttctcgtagatgttgctaatgccgatcttcatcactacgatgttactataacgcctgaggtaaccgcaaaaaaggttaacagagcaataatgaagcaacttattgatgtatacaaagagtcgcatcttggacgtcggtgtccagcttatgatggcaggaagagtttgtacactgctggtcctcttcccttcgagtcaaaggagcttgttatcaagctacctgaggaagatcgcagtgctggttcgtctaggcctgcgcggaaggagcgacaatttaaggttgcaatcaaactggcctccaagccagaccttcattatctcagggagtttttgagcagaaagcattttgaatgtcctcaagaagctattcaagttctggatgttgttcttagagctaaaccatctcagatatatactgaggtgggaaggtcttttttctatacatcattaggtcctagaggagaacttggtaatggaacagaatactggtctggatattatcagagtcttcgacccactcagatgggtttatctcttaatattgatgtgtctgctcgatcattctatgagccaattttagtttcagagtttgttgtgaaacatttccgacgatcaaacctgtcaaagccgctgtctgatcaagatcgtattaaagtgaaaaaggccttgaagggagtaagagttaggctcatctacatggattatgccaaaacttgcaagattattggagtatctagagaccctataagccagttgacatttcctcttgatgataagagaacaaatgtctctgtggtcaagtatttccgtgagaaatacaatgttgtgcttaaatatccatccttgcctgcacttcaaagtggaagtgaagctagacctgtctacctgccaatggagctttgtagtatcgttgagggtcaaagatacacaaaaaaactaaatgaacaacaagttagatctctgctgagagcaacttgtcaacgtccgaacattagggaggggaatattacaaagatggtccaggtcaataattttgaggtggaggagcttgttactaaagaatttggaatgcatgttcgcaaagaacttgcattgattaatgcacaagttctaaatcctccagtgctaaagtatcacgatagtggacgtgacaaaatcgttaatcctagttgcgggcaatggaacatgatcaacaagaaaatggtcaattggggtaaagtcgatttctggtcttgtgtgaacttctcctcggaatattggaatatgtcagaagagttctgtgcggagctggtgaatatgtgtaacaacaaaggaatggtgttttgccaaactccttcaattgcaatgcgatcagcttgtgctgaccgaattgatcagattctcatggatgtatacaaagagtctgcaggcttgaataagccacttcagttgttgataattatcttacctgatcagactggctcttacggaaaaataaagcgaatttgtgagacggagctaggtattgtttcacaatgttgtaagcctgtgcaagctgcaaagtttagcaaccaatattttgaaaatgttgctctcaagatcaatgctaaggttggggggcgaaatactgtgctgaacgatgctattttaaggagaattccgcttgtgactgatgtccctacaatcatttttggggcagatgtcactcatccgccgcctggcgaagactctagttcttctatagctgcagtcgttgcttcaatggattggcctgaggtaaccaagtatcgtggaattgtctctgcacagactcaccggatggaaataatccaggatctttataaacaaacaaaggatccacagaagggtttagttgagggtggaatggttagggaattgcttgttgctttcttcaagtcaacaagacaaaagccttctagaattatcttctatagaggtggtgttagtgaaggacaattcagccaagttttgctttatgaaatggatgcgatttggaaggcttgttcctcgctacaggaaggatatatgcctcgggttacatttgttgtggttcaaaagaggcatcatactcgcttattccctactgatcgcaacaaaactgatgggagtggcaacatattaccaggggacaagcaaggccacacgttaccacgttttgtttgatgaaaatggcttcagtgctgacatcttgcaagtgctcacaaacagtttatgttacacgtatgcgaggtgtaccaagtccgtttccatagtgcctccggcatactatgctcacctcgctgcttatagggcacgctattatattgaggatgagatgtcggatagtgggtctactggtggaggccgaaagccgaaagacaaggttgtagagtttaggccgctccccagcataaaggacaatgtgaaggaagtgtttggttggtggaaagttgcgcaagtatagttgcacagtttgtggatgatggtggagtcttgttgattccattggtggactttgtaattatttaattttggagtttctgttttggtggttgagcgaattgtcgtctgaagtttggattaccataatgcacacactgtttgtggattacgaaaatttcagaaatgtcctgtattttcaagaaaagttcttagaaaggatttttagtattatttttaagtttcttttagatcaccaattaatacaagtgatgatgaaattttaaagaataa

SEQ ID NO: 463 - DNA, 3240 bp, Gossypium raimondii
  source 1..3240: mol_type = genomic DNA
agtcaagagtgtcgtttgtttcattttttgtcccttctgttttggagtttttgaaattttcatctgtttgcttagttttccaaatttccggcaatgtctggccgaggcggtggtgaacgtggcagtggtcggggtggtggtcgacgtggccgggggcagggccgtggtcgcggtcaaccttcgcagtcttcctctcgcggcggcggcggtagagcaagaggccgtggatcatctggttctactgcaacttataatccccctcctcctcaaatggctccggctcagccacctcctcaaatggctgtagctacgccagttcctccatcgggggcccctttttctcatccttcttcaagttctggtgtaggatcactttccagagaggtatcggagaagcttacaatggagccggtggctgtgactacggcgcctcctcttcctccgtcgtcgtcaaaggcgattaggttccctccaagaccggggttcggcacggtcggtacaaagtgtgtggttagggccaaccattttctcgtagatgttgctaatgccgatcttcatcactacgatgttactataacgcctgaggtaaccgcaaaaaaggttaacagagcaataatgaagcaacttattgatgtatacaaagagtcgcatcttggacgtcggtgtccagcttatgatggcaggaagagtttgtacactgctggtcctcttcccttcgagtcaaaggagcttgttatcaagctacctgaggaagatcgcagtgctggttcgtctaggcctgcgcggaaggagcgacaatttaaggttgcaatcaaattggcctccaagccagaccttcattatctgagggagtttctgagcagaaagcattttgaatgccctcaagaagctattcaagttctggatgttgttcttagagctaaaccatctcagacatatactgaggtgggaaggtcttttttccatacatcattaggtcctagaggagaacttggtaatggaatagaatactggtctggatattatcagagtcttcgacccactcagatgggtttatctcttaatattgatgtgtctgctcgatcattctatgagccaattttagtttcagagtttgttgcgaaacatttccgacgatcaaacctgtcaaagccgctgtctgatcaagatcgtattaaagtgaaaaaggccttgaagggagtaagagttaagctcatctacatggattatgccaaaacttgcaagattattggagtatctagagaccctataagccagttgacatttactcatgatgataagagaacaaatgtctctgtggtcaagtatttccgtgagaaatacaatgttgtgcttaaatatccatccttgcctgcacttcaaagtggaagcgaagctagacctgtctacctgccaatggagctttgtagtatcgttgagggtcaaagatacacaaaaaaactaaatgaacaacaagttagatctctgctgagagcaacttgtcaacgtccgaacattagggaggggaatattacaaagatggtccaggtcaataattttgaggtggaggagcttgttactaaagaatttggaatgcatgttcgcaaagaacttgcattgattaatgcacgagttctaaatcctccagtgctaaagtatcacgatagtggacgtgacaaaatcgttaatcctagttgcgggcaatggaacatgatcaacaagaaaatggtcaattggggtaaagtcgatttctggtcttgtgtgaacttctcctcggaatattggaatatgtcagaagagttctgtgcggagctggtgaatatgtgtaacaacaaaggaatggtgttttgccaaactccttcaattgcaatgcgatcagcttgtgctgaccgaattgatcagattctcatggatgtatacaaagagtctgcaggcttgaataagccacttcagttgttgataattatcttacctgatcagactggctcttacggaaaaataaagcgaatttgtgagacggagctaggtattgtttcacaatgttgtaagcctgtgcaagctgcaaagtttagcaaccaatattttgaaaatgttgctctcaagatcaatgctaaggttggggggcgaaatactgtgctgaacgatgctattttaaggagaattccgcttgtgactgatgtccctacaatcatttttggggcagatgtcactcatccgccgcctggcgaagactctagttcttctatagctgcagtcgttgcttcaatggattggcctgaggtaaccaagtatcgtggaattgtctctgcacagactcaccggatggaaataatccaggatctttataaacaaacaaaggatccacagaagggtttagttgagggtggaatggttagggaattgcttgttgctttcttcaagtcaacaagacaaaagccttctagaattatcttctatagaggtggtgttagtgaaggacaattcagccaagttttgctttatgaaatggatgcgatttggaaggcttgttcctcgctacaggaaggatatatgcctcgggttacatttgttgtggttcaaaagaggcatcatactcgcttattccctactgatcgcaacaaaactgatgggagtggcaacatattaccaggggacaagcaaggccacacgttaccacgttttgtttgatgaaaatggcttcagtgctgacatcttgcaagtgctcacaaacagtttatgttacacgtatgcgaggtgtaccaagtccgtttccatagtgcctccggcatactatgctcacctcgctgcttatagggcacgctattatattgaggatgagatgtcggatagtgggtctactggtggaggccgaaagccgaaagacaaggttgtagagtttaggccgctccccagcataaaggacaatgtgaaggaagtgtttggttggtggaaagttgcgcaagtatagttgcacagtttgtggatgatggtggagtcttgttgattccattggtggactttgtaattatttaattttggagtttctgttttggtggttgagcgaattgtcgtctgaagtttggattaccataatgcacacactgtttgtggattacgaaaatttcagaaatgtcctgtattttcaagaaaagttcttagaaaggatttttagtattatttttaagtttcttttagatcaccaattaatacaagtgatgatgaaattttaaagaataatgt

SEQ ID NO: 464 - DNA, 3240 bp, Gossypium raimondii
  source 1..3240: mol_type = genomic DNA
agtcaagagtgtcgtttgtttcattttttgtcccttctgttttggagtttttgaaattttcatctgtttgcttagttttccaaatttccggcaatgtctggccgaggcggtggtgaacgtggcagtggtcggggtggtggtcgacgtggccgggggcagggccgtggtcgcggtcaaccttcgcagtcttcctctcgcggcggcggcggtagagcaagaggccgtggatcatctggttctactgcaacttataatccccctcctcctcaaatggctccggctcagccacctcctcaaatggctgtagctacgccagttcctccatcgggggcccctttttctcatccttcttcaagttctggtgtaggatcactttccagagaggtatcggagaagcttacaatggagccggtggctgtgactacggcgcctcctcttcctccgtcgtcgtcaaaggcgattaggttccctccaagaccggggttcggcacggtcggtacaaagtgtgtggttagggccaaccattttctcgtagatgttgctaatgccgatcttcatcactacgatgttactataacgcctgaggtaaccgcaaaaaaggttaacagagcaataatgaagcaacttattgatgtatacaaagagtcgcatcttggacgtcggtgtccagcttatgatggcaggaagagtttgtacactgctggtcctcttcccttcgagtcaaaggagcttgttatcaagctacctgaggaagatcgcagtgctggttcgtctaggcctgcgcggaaggagcgacaatttaaggttgcaatcaaattggcctccaagccagaccttcattatctgagggagtttctgagcagaaagcattttgaatgccctcaagaagctattcaagttctggatgttgttcttagagctaaaccatctcagacatatactgaggtgggaaggtcttttttccatacatcattaggtcctagaggagaacttggtaatggaatagaatactggtctggatattatcagagtcttcgacccactcagatgggtttatctcttaatattgatgtgtctgctcgatcattctatgagccaattttagtttcagagtttgttgcgaaacatttccgacgatcaaacctgtcaaagccgctgtctgatcaagatcgtattaaagtgaaaaaggccttgaagggagtaagagttaagctcatctacatggattatgccaaaacttgcaagattattggagtatctagagaccctataagccagttgacatttactcatgatgataagagaacaaatgtctctgtggtcaagtatttccgtgagaaatacaatgttgtgcttaaatatccatccttgcctgcacttcaaagtggaagcgaagctagacctgtctacctgccaatggagctttgtagtatcgttgagggtcaaagatacacaaaaaaactaaatgaacaacaagttagatctctgctgagagcaacttgtcaacgtccgaacattagggaggggaatattacaaagatggtccaggtcaataattttgaggtggaggagcttgttactaaagaatttggaatgcatgttcgcaaagaacttgcattgattaatgcacgagttctaaatcctccagtgctaaagtatcacgatagtggacgtgacaaaattgttaatcctagctgtgggcaatggaacatgatcaacaagaaaatggtcaatgggggtaaagttgatttctggtcttgtgtgaacttctcctctgaatataggaatatgtcagaagacttctgtgcggggctggtgaatatgtgtaacagcaaaggaatggtgtttcgccaaactccttcaattgcaatgcgatcagctcgtgctgatcgaattgatcagactctcatggatgtatacaaagagtctgcaggcttgaataagccacttaagttgttgataattatcttacctgatcagactggctcatatggaaaaataaagcgaatttgtgagacggagctaggtattgtttcacaatgttgtaagcctgtgcaagctgcaaagtttagcaaccaatattttgaaaatgttgctctcaagatcaatgctaaggttggggggcgaaatactgtgctgaacgatgctattttaaggagaattccgcttgtgactgatgtccctacaatcatttttggggcagatgtcactcatccgccgcctggcgaagactctagttcttctatagctgcagtcgttgcttcaatggattggcctgaggtaaccaagtatcgtggaattgtctctgcacagactcaccggatggaaataatccaggatctttataaacaaacaaaggatccacagaagggtttagttgagggtggaatggttagggaattgcttgttgctttcttcaagtcaacaagacaaaagccttctagaattatcttctatagaggtggtgttagtgaaggacaattcagccaagttttgctttatgaaatggatgcgatttggaaggcttgttcctcgctacaggaaggatatatgcctcgggttacatttgttgtggttcaaaagaggcatcatactcgcttattccctactgatcgcaacaaaactgatgggagtggcaacatattaccaggggacaagcaaggccacacgttaccacgttttgtttgatgaaaatggcttcagtgctgacatcttgcaagtgctcacaaacagtttatgttacacgtatgcgaggtgtaccaagtccgtttccatagtgcctccggcatactatgctcacctcgctgcttatagggcacgctattatattgaggatgagatgtcggatagtgggtctactggtggaggccgaaagccgaaagacaaggttgtagagtttaggccgctccccagcataaaggacaatgtgaaggaagtgtttggttggtggaaagttgcgcaagtatagttgcacagtttgtggatgatggtggagtcttgttgattccattggtggactttgtaattatttaattttggagtttctgttttggtggttgagcgaattgtcgtctgaagtttggattaccataatgcacacactgtttgtggattacgaaaatttcagaaatgtcctgtattttcaagaaaagttcttagaaaggatttttagtattatttttaagtttcttttagatcaccaattaatacaagtgatgatgaaattttaaagaataatgt

SEQ ID NO: 465 - DNA, 3240 bp, Gossypium raimondii
  source 1..3240: mol_type = genomic DNA
agtcaagagtgtcgtttgtttcattttttgtcccttctgttttggagtttttgaaattttcatctgtttgcttagttttccaaatttccggcaatgtctggccgaggcggtggtgaacgtggcagtggtcggggtggtggtcgacgtggccgggggcagggccgtggtcgcggtcaaccttcgcagtcttcctctcgcggcggcggcggtagagcaagaggccgtggatcatctggttctactgcaacttataatccccctcctcctcaaatggctccggctcagccacctcctcaaatggctgtagctacgccagttcctccatcgggggcccctttttctcatccttcttcaagttctggtgtaggatcactttccagagaggtatcggagaagcttacaatggagccggtggctgtgactacggcgcctcctcttcctccgtcgtcgtcaaaggcgattaggttccctccaagaccggggttcggcacggtcggtacaaagtgtgtggttagggccaaccattttctcgtagatgttgctaatgccgatcttcatcactacgatgttactataacgcctgaggtaaccgcaaaaaaggttaacagagcaataatgaagcaacttattgatgtatacaaagagtcgcatcttggacgtcggtgtccagcttatgatggcaggaagagtttgtacactgctggtcctcttcccttcgagtcaaaggagcttgttatcaagctacctgaggaagatcgcagtgctggttcgtctaggcctgcgcggaaggagcgacaatttaaggttgcaatcaaattggcctccaagccagaccttcattatctgagggagtttctgagcagaaagcattttgaatgccctcaagaagctattcaagttctggatgttgttcttagagctaaaccatctcagacatatactgaggtgggaaggtcttttttccatacatcattaggtcctagaggagaacttggtaatggaatagaatactggtctggatattatcagagtcttcgacccactcagatgggtttatctcttaatattgatgtgtctgctcgatcattctatgagccaattttagtttcagagtttgttgcgaaacatttccgacgatcaaacctgtcaaagccgctgtctgatcaagatcgtattaaagtgaaaaaggccttgaagggagtaagagttaagctcatctacatggattatgccaaaacttgcaagattattggagtatctagagaccctataagccagttgacatttactcatgatgataagagaacaaatgtctctgtggtcaagtatttccgtgagaaatacaatgttgtgcttaaatatccatccttgcctgcacttcaaagtggaagcgaagctagacctgtctacctgccaatggagctttgtagtatcgttgagggtcaaagatacacaaaaaaactaaatgaacaacaagttagatctctgctgagagcaacttgtcaacgtccgaacattagggaggggaatattacaaagatggtccaggtcaataattttgaggtggaggagcttgttactaaagaatttggaatgcatgttcgcaaagaacttgcattgattaatgcacaagttctaaatcctccagtgctaaagtatcacgatagtggacgtgacaaaatcgttaatcctagttgcgggcaatggaacatgatcaacaagaaaatggtcaattggggtaaagtcgatttctggtcttgtgtgaacttctcctcggaatattggaatatgtcagaagagttctgtgcggagctggtgaatatgtgtaacaacaaaggaatggtgttttgccaaactccttcaattgcaatgcgatcagcttgtgctgaccgaattgatcagattctcatggatgtatacaaagagtctgcaggcttgaataagccacttcagttgttgataattatcttacctgatcagactggctcttacggaaaaataaagcgaatttgtgagacggagctaggtattgtttcacaatgttgtaagcctgtgcaagctgcaaagtttagcaaccaatattttgaaaatgttgctctcaagatcaatgctaaggttggggggcgaaatactgtgctgaacgatgctattttaaggagaattccgcttgtgactgatgtccctacaatcatttttggggcagatgtcactcatccgccgcctggcgaagactctagttcttctatagctgcagtcgttgcttcaatggattggcctgaggtaaccaagtatcgtggaattgtctctgcacagactcaccggatggaaataatccaggatctttataaacaaacaaaggatccacagaagggtttagttgagggtggaatggttagggaattgcttgttgctttcttcaagtcaacaagacaaaagccttctagaattatcttctatagaggtggtgttagtgaaggacaattcagccaagttttgctttatgaaatggatgcgatttggaaggcttgttcctcgctacaggaaggatatatgcctcgggttacatttgttgtggttcaaaagaggcatcatactcgcttattccctactgatcgcaacaaaactgatgggagtggcaacatattaccaggggacaagcaaggccacacgttaccacgttttgtttgatgaaaatggcttcagtgctgacatcttgcaagtgctcacaaacagtttatgttacacgtatgcgaggtgtaccaagtccgtttccatagtgcctccggcatactatgctcacctcgctgcttatagggcacgctattatattgaggatgagatgtcggatagtgggtctactggtggaggccgaaagccgaaagacaaggttgtagagtttaggccgctccccagcataaaggacaatgtgaaggaagtgtttggttggtggaaagttgcgcaagtatagttgcacagtttgtggatgatggtggagtcttgttgattccattggtggactttgtaattatttaattttggagtttctgttttggtggttgagcgaattgtcgtctgaagtttggattaccataatgcacacactgtttgtggattacgaaaatttcagaaatgtcctgtattttcaagaaaagttcttagaaaggatttttagtattatttttaagtttcttttagatcaccaattaatacaagtgatgatgaaattttaaagaataatgt

SEQ ID NO: 466 - DNA, 2631 bp, Gossypium raimondii
  source 1..2631: mol_type = genomic DNA
agtcaagagtgtcgtttgtttcattttttgtcccttctgttttggagtttttgaaattttcatctgtttgcttagttttccaaatttccggcaatgtctggccgaggcggtggtgaacgtggcagtggtcggggtggtggtcgacgtggccgggggcagggccgtggtcgcggtcaaccttcgcagtcttcctctcgcggcggcggcggtagagcaagaggccgtggatcatctggttctactgcaacttataatccccctcctcctcaaatggctccggctcagccacctcctcaaatggctgtagctacgccagttcctccatcgggggcccctttttctcatccttcttcaagttctggtgtaggatcactttccagagaggtatcggagaagcttacaatggagccggtggctgtgactacggcgcctcctcttcctccgtcgtcgtcaaaggcgattaggttccctccaagaccggggttcggcacggtcggtacaaagtgtgtggttagggccaaccattttctcgtagatgttgctaatgccgatcttcatcactacgatgttactataacgcctgaggtaaccgcaaaaaaggttaacagagcaataatgaagcaacttattgatgtatacaaagagtcgcatcttggacgtcggtgtccagcttatgatggcaggaagagtttgtacactgctggtcctcttcccttcgagtcaaaggagcttgttatcaagctacctgaggaagatcgcagtgctggttcgtctaggcctgcgcggaaggagcgacaatttaaggttgcaatcaaactggcctccaagccagaccttcattatctcagggagtttttgagcagaaagcattttgaatgtcctcaagaagctattcaagttctggatgttgttcttagagctaaaccatctcagatatatactgaggtgggaaggtcttttttctatacatcattaggtcctagaggagaacttggtaatggaacagaatactggtctggatattatcagagtcttcgacccactcagatgggtttatctcttaatattgatgtgtctgctcgatcattctatgagccaattttagtttcagagtttgttgtgaaacatttccgacgatcaaacctgtcaaagccgctgtctgatcaagatcgtattaaagtgaaaaaggccttgaagggagtaagagttaggctcatctacatggattatgccaaaacttgcaagattattggagtatctagagaccctataagccagttgacatttcctcttgatgataagagaacaaatgtctctgtggtcaagtatttccgtgagaaatacaatgttgtgcttaaatatccatccttgcctgcacttcaaagtggaagtgaagctagacctgtctacctgccaatggagatggtccaggtcaataattttgaggtggaggagcttgttactaaagaatttggaatgcatgttcgcaaagaacttgcattgattaatgcacaagttctaaatcctccagtgctaaagtatcacgatagtggacgtgacaaaatcgttaatcctagttgcgggcaatggaacatgatcaacaaggtgttttgccaaactccttcaattgcaatgcgatcagcttgtgctgaccgaattgatcagattctcatggatgtatacaaagagtctgcaggcttgaataagccacttcagttgttgataattatcttacctgatcagactggctcttacggaaaaataaagcgaatttgtgagacggagctaggtattgtttcacaatgttgtaagcctgtgcaagctgcaaagtttagcaaccaatattttgaaaatgttgctctcaagatcaatgctaaggttggggggcgaaatactgtgctgaacgatgctattttaaggagaattccgcttgtgactgatgtccctacaatcatttttggggcagatgtcactcatccgccgcctggcgaagactctagttcttctatagctgcagtcgttgcttcaatggattggcctgaggtaaccaagtatcgtggaattgtctctgcacagactcaccggatggaaataatccaggatctttataaacaaacaaaggatccacagaagggtttagttgagggtggaatggttagaggtggtgttagtgaaggacaattcagccaagttttgctttatgaaatggatgcgatttggaaggcttgttcctcgctacaggaaggatatatgcctcgggttacatttgttgtggttcaaaagaggcatcatactcgcttattccctactgatcgcaacaaaactgatgggagtggcaacatattaccaggtactgttgtggatactagcatctgtcatccaaccgagtttgatttttatctcaatagtcatgctggaatcctggggacaagcaaggccacacgttaccacgttttgtttgatgaaaatggcttcagtgctgacatcttgcaagtgctcacaaacagtttatgttacacgtatgcgaggtgtaccaagtccgtttccatagggcacgctattatattgaggatgagatgtcggatagtgggtctactggtggaggccgaaagccgaaagacaaggttgtag

SEQ ID NO: 467 - DNA, 2964 bp, Gossypium raimondii
  source 1..2964: mol_type = genomic DNA
ccttactaccctaactcaacgacattattttttgaaagaactcgatcaagattgctttttccgtagttacttttccttaaaaaaacccaagggaaagtttaactgttaatgatttgcttaaatgagttgggctttttgttatttattgtctcgttaatttttattttcattggattttaatgtgtattttccttttctgttttcttatttatttacttgtctctttgtccatctctgttacttgcatcttcttctcgtctcttttgatggcctttggtgcttcattgcttataggttactgtaacgcctgaggtaaccgcaaaaaaggttaacagagcaataatgaagcaacttattgatgtatacaaagagtcgcatcttggacgtcggtgtccagcttatgatggcaggaagagtttgtacactgctggtcctcttcccttcgagtcaaaggagcttgttatcaagctacctgaggaagatcgcagtgctggttcgtctaggcctgcgcggaaggagcgacaatttaaggttgcaatcaaactggcctccaagccagaccttcattatctcagggagtttttgagcagaaagcattttgaatgtcctcaagaagctattcaagttctggatgttgttcttagagctaaaccatctcagatatatactgaggtgggaaggtcttttttctatacatcattaggtcctagaggagaacttggtaatggaacagaatactggtctggatattatcagagtcttcgacccactcagatgggtttatctcttaatattgatgtgtctgctcgatcattctatgagccaattttagtttcagagtttgttgtgaaacatttccgacgatcaaacctgtcaaagccgctgtctgatcaagatcgtattaaagtgaaaaaggccttgaagggagtaagagttaggctcatctacatggattatgccaaaacttgcaagattattggagtatctagagaccctataagccagttgacatttcctcttgatgataagagaacaaatgtctctgtggtcaagtatttccgtgagaaatacaatgttgtgcttaaatatccatccttgcctgcacttcaaagtggaagtgaagctagacctgtctacctgccaatggagctttgtagtatcgttgagggtcaaagatacacaaaaaaactaaatgaacaacaagttagatctctgctgagagcaacttgtcaacgtccgaacattagggaggggaatattacaaagatggtccaggtcaataattttgaggtggaggagcttgttactaaagaatttggaatgcatgttcgcaaagaacttgcattgattaatgcacaagttctaaatcctccagtgctaaagtatcacgatagtggacgtgacaaaatcgttaatcctagttgcgggcaatggaacatgatcaacaagaaaatggtcaattggggtaaagtcgatttctggtcttgtgtgaacttctcctcggaatattggaatatgtcagaagagttctgtgcggagctggtgaatatgtgtaacaacaaaggaatggtgttttgccaaactccttcaattgcaatgcgatcagcttgtgctgaccgaattgatcagattctcatggatgtatacaaagagtctgcaggcttgaataagccacttcagttgttgataattatcttacctgatcagactggctcttacggaaaaataaagcgaatttgtgagacggagctaggtattgtttcacaatgttgtaagcctgtgcaagctgcaaagtttagcaaccaatattttgaaaatgttgctctcaagatcaatgctaaggttggggggcgaaatactgtgctgaacgatgctattttaaggagaattccgcttgtgactgatgtccctacaatcatttttggggcagatgtcactcatccgccgcctggcgaagactctagttcttctatagctgcagtcgttgcttcaatggattggcctgaggtaaccaagtatcgtggaattgtctctgcacagactcaccggatggaaataatccaggatctttataaacaaacaaaggatccacagaagggtttagttgagggtggaatggttagggaattgcttgttgctttcttcaagtcaacaagacaaaagccttctagaattatcttctatagaggtggtgttagtgaaggacaattcagccaagttttgctttatgaaatggatgcgatttggaaggcttgttcctcgctacaggaaggatatatgcctcgggttacatttgttgtggttcaaaagaggcatcatactcgcttattccctactgatcgcaacaaaactgatgggagtggcaacatattaccaggggacaagcaaggccacacgttaccacgttttgtttgatgaaaatggcttcagtgctgacatcttgcaagtgctcacaaacagtttatgttacacgtatgcgaggtgtaccaagtccgtttccatagtgcctccggcatactatgctcacctcgctgcttatagggcacgctattatattgaggatgagatgtcggatagtgggtctactggtggaggccgaaagccgaaagacaaggttgtagagtttaggccgctccccagcataaaggacaatgtgaaggaagtgtttggttggtggaaagttgcgcaagtatagttgcacagtttgtggatgatggtggagtcttgttgattccattggtggactttgtaattatttaattttggagtttctgttttggtggttgagcgaattgtcgtctgaagtttggattaccataatgcacacactgtttgtggattacgaaaatttcagaaatgtcctgtattttcaagaaaagttcttagaaaggatttttagtattatttttaagtttcttttagatcaccaattaatacaagtgatgatgaaattttaaagaataa

SEQ ID NO: 468 - DNA, 5643 bp, Gossypium raimondii
  source 1..5643: mol_type = genomic DNA
gttcgactcattaataagcgaacaaatgtaatgataaaaaattgttggaagaggagttaccagatttgactttccattgaccgagcacaattcattacaagaaatcctaggagaccgctctgcttagtaaaccgaatgggatttcgacatctatttgtccatttgatcaaagcaaacaaaaatctttttttctttttgcttagcggttgagacttggaaaataagcaatttttaccagtcttctcaccgctgtggctataattccctcgttgatgccgggcggcgaattgtccaccgacgggaccgagccgttcatggcctctaaagttaaagccttttctactccgtcgccgatcgttgaaatcagccgaaaagatgaacctataatggaaaagaaagagaaggatccacgaaaaattgctagaaagtatcaactggagttatgcaagaaagccatggaagagaacataattgtttatttggagactggttgtgggaagacccacatcgcagttctgcttatttatgagcttggccatttgatacggaaacctcagaatagggtatgcatttttcttgctcccacagtggctcttgttcagcagcaagcccgggttatagaagattctcttgatttcaaggttgggacttattgtggtaactgcagacacttgaagaaccatcatgactgggaaatagagatcaaagaatatgaggttcttgttatgactccccaaatactacttcgtagcttatatcactgcttcatcaggatggacttaatcgctcttctgatatttgatgagtgtcatcatgctcaaataaaaagcaaccatccttatgcagaaatcatgaaagttttttatgataaagctactgcatcaatgcttcctcgtatatttggaatgacagcatctcccgttgttggtaaagatgcttccagtcaagtaaatttacctaaaagcatcaacagcctcgaaaacttgcttgatgctaaggtatattcagttggagataaggaggaattggaaagctttgtagcatctcctgtggttagagtatatgattatggtcctgtcaattttggttcttcttgttccaccattatctattgtagtaaacttgaggagattaagcgccagtgcataccttttgtcaggaagaatggtgatattcaatctgccaggaacacaaaaaagctgctcaacagaatgcatgataatataatcttttgcttggaaaatttgggcatttggggagcattgcaagcttgccgacttcttttaactggtaataactctgagaggaatgaattgatagaagatgaagggattttaagtgacgactctgtatgtgatcgatatcttgttcatgctgctgatgtttttgcttcagattgtacgagagatggatctgcaaacgatttatctgatgtagagattttgaaggaaccatttttctcgaaaaagctgctacgtcttgttggaattctttccaccttcaggttacagccaaatatgaaatgcataatttttgtgaataggattgttactgcaagatccttgtcatacatactgcaaaaccttaagttcctattattttggaagtgccattttcttgtgggagtccactctggacttaaaagtatgtcaagaaagacaatgaaaaacattcttgagaagttcagaacaggagagttgaatcttttgattgcaactaaagtcggtgaagaaggacttgacattcagacatgctgccttgtgatacgttttgaccttccagaaactgttgcgagctttatccaatcaagaggacgtgcaagaatgcctctctctgagtatgcatttctggtgaacagtgggaacgagaaggaactagatttgattaaaaattttaagaaagatgaagatcgtatgaatgtggaaatttctttcagaacatctactgaggtttctattggtcttgaggagagaatctatatggttgattcatctggtgcttccatcagttcaggatatagtatctctctacttcatcattactgctcaaaactgccccatgatgagtactttttccccaagccaagcttttattattttgaagattcaggaggaacaatctgcaatataatattaccttcgaatgctccaataaatcaaattgccagtacacctcaatcttcagttaatgctgccaaaaaagatgcttgtctaaaagcaattgaagaattgcataaattgggagccttgactgaccatctcttgccactgcaaaacagtgttcttgaggaggaaacattgctggtgtcttctgattctgggagctctgaagatgaggattcacgaggtgaactacatgagatgcttgttcctgctgtgcttaaagaatcatggactaacttagagaactgtgtcctcctttatgcttactatataaaatttaatccgaatcctaaggacaggagctataaagagtttgctctctttgtcaagtctcctctccctaaggaggctgagagaatggagctggatcttcacctatctcggcgtaggtcggtgatgacaaagcttaccccatctggagttgcagaatttaagagagaagagatcatgcaggcacagcattttcaagaaatgttcttcaaggtcatccttgatagatcagaactcctttctgaatttattactttaggaaatgtctttctttcatcaagctcctcaacattctatttattgcttcctgttattctctccaattgtgagaataaagtgacagtggattgggggattgtccaaagatgtttgtcgtctccactttttaagcctcctgttgcagctgcaaagattgaaaatttcccttcagatgtttgcttgcaccttgtaaatggttgtaggagtataagagacattgagaatagtttggtgtatgccacacacaagagggccttttactttattactagcattgttggtgaaaaaaatggttacagcccatatagagattcaggcactttaaatcacgtggagcacttaaacatgtctggcattcatcttaagtaccctgaacaacctcttctgcatgcaaaaccactttttaagttgcacaatttgctccacaaccgaaagccggaggattcagaagcaaatgaactggaagaatacttcattgatttgcctcctgagctttgtcagctgaaaataataggcttctccaaagagatagggagttcgctttctttgttaccatcaattatgcatcgcctggagaacttgcttgtggctattgaactgaagcatgttttttctgcttcatttgccgagggagctgaagttactgcccttagggtcctagaagcacttactacagagaagtgtcaagagcgtttttctcttgaaaggcttgagacacttggtgattccttcctcaagtttgctgtggcccgccatctttttcttttacatgatgcacttgatgaaggggaattgactaggagaaggtctaatgttgtaaataattctaatttattcaagctggcaacaaggcgaaatttacaggtttacatacgtgatcaaccttttgatccttatcagttctttcccttgggccatccctgcccagtaatttgtacaaaagaaactaaaggaactgttcacccacaatctagttgtcaagtagatcatacaaagagtgaagtcaaatgtagtagaaatcaccattggctacataaggacacaatttctgatgtggttgaggctcttgtaggagcatttatagttgataggggcttccaagcggcaacagcatttcttagatggataggcatacgagtggacttccaaggttctcaacttaatagtatttgcgctgcaagcaagagatttatgccactttcctccctattggatattggagatcttgaaaatttgttgggttaccagtttcttcataagggtctcctccttcaggcgattgtgcatccttcttttaataggcatgggggaggctgctaccagagattggagtttcttggagatgctgtcttagattatttaattacatcatatctgttttcactgtatccaaagttgaaacctggtcagttgactgatttgagatcagtgtcagtgaacaacaagtcctttgccaatgttgcagtggacagacgcttacacaaatttcttatgtgtgactcttgtcacctcaacgaggccatagaaaaatatgttgacttcatcacatcatcatcaccagacaggggattgtttgaagggccaaaatgtccgaaggctcttggtgacttggtagagtcttgtttcggtgctattctccttgatacagggttcaacttgaaccgtgtttggaagataatgctatccattctggatccaatcaagagcctttcaagtgtgcagctcaatcctatcagggaagtacaggagctttcccagtgttataactgggatttgcagtttctagttgcaaaagttggtagaaatttttcagtggatgcaaaggtaaatgcaggagatgtacctctatgtgtttcttacagcaacattaatagaaaagaagctatcagaactactgcacatcaactatatgtaaagttaaaggctctaggatatgcacccaaatcaaagtccttggaagaagttttgaagggaagccccaagaatgaagccaagctgattggatacgatgaaacacccattgatgtcagtgttactgacatagttggatttgaaaacatgaaattgcaagaatctcttgtgaatgatttcaaccccaaaactcgttctattaaaaggacaacttctagcggtgtatcttgcatctcacctggtagcagacctccaccttcttttgaagtaaaagcagcaaggggttcagcctctggtattgaagccaaaggcaaaccccccaattgctccattgtggatcctagttgtgggattgactcgccatccaaaggtgaatcacatggtcgtactgctagatcacagttatacgaaatctgtgctatcaattgctggaaaccccctttgtttgaatgttgcaaagaggaaggaccaagtcatttgagatcattcacttacagggtaatagttgaaatcgaagaagctccagatatgatattggagtgcttcagcagtcctcggaccacaaagaaggcagcagccgagcatgcagcggaaggtgcactctggtatttaaaacatggaggatacttacaataggtcaacttaaccgactgaacctcattgctagacataatggagatcaaggtttgaatttagtcattttgctatctcagttcaatggctctagtctctctcttcatcccctatttaatgaacttaaaaaccagcattttctttaaaagtcgaataaaagatgatttaacaacaaaattaaaattttgcttcgaacttgttaacgtggcatttttggtatgtccatgtatccaacaaggagcccaatttaattcaatccatgtatctggtgctgtgtcatgaaagtgtaaagattaaatttattaaactcgagatagaggattaaagctattcaattgagataataagatgatcgaatttagatttcaaactcaaatatgtttgatgatgtctatattgatggctgtta

SEQ ID NO: 469 - DNA, 5036 bp, Gossypium raimondii
  source 1..5036: mol_type = genomic DNA
gatggaatttgttattgttttatagcaagcccgggttatagaagattctcttgatttcaaggttgggacttattgtggtaactgcagacacttgaagaaccatcatgactgggaaatagagatcaaagaatatgaggttcttgttatgactccccaaatactacttcgtagcttatatcactgcttcatcaggatggacttaatcgctcttctgatatttgatgagtgtcatcatgctcaaataaaaagcaaccatccttatgcagaaatcatgaaagttttttatgataaagctactgcatcaatgcttcctcgtatatttggaatgacagcatctcccgttgttggtaaagatgcttccagtcaagtaaatttacctaaaagcatcaacagcctcgaaaacttgcttgatgctaaggtatattcagttggagataaggaggaattggaaagctttgtagcatctcctgtggttagagtatatgattatggtcctgtcaattttggttcttcttgttccaccattatctattgtagtaaacttgaggagattaagcgccagtgcataccttttgtcaggaagaatggtgatattcaatctgccaggaacacaaaaaagctgctcaacagaatgcatgataatataatcttttgcttggaaaatttgggcatttggggagcattgcaagcttgccgacttcttttaactggtaataactctgagaggaatgaattgatagaagatgaagggattttaagtgacgactctgtatgtgatcgatatcttgttcatgctgctgatgtttttgcttcagattgtacgagagatggatctgcaaacgatttatctgatgtagagattttgaaggaaccatttttctcgaaaaagctgctacgtcttgttggaattctttccaccttcaggttacagccaaatatgaaatgcataatttttgtgaataggattgttactgcaagatccttgtcatacatactgcaaaaccttaagttcctattattttggaagtgccattttcttgtgggagtccactctggacttaaaagtatgtcaagaaagacaatgaaaaacattcttgagaagttcagaacaggagagttgaatcttttgattgcaactaaagtcggtgaagaaggacttgacattcagacatgctgccttgtgatacgttttgaccttccagaaactgttgcgagctttatccaatcaagaggacgtgcaagaatgcctctctctgagtatgcatttctggtgaacagtgggaacgagaaggaactagatttgattaaaaattttaagaaagatgaagatcgtatgaatgtggaaatttctttcagaacatctactgaggtttctattggtcttgaggagagaatctatatggttgattcatctggtgcttccatcagttcaggatatagtatctctctacttcatcattactgctcaaaactgccccatgatgagtactttttccccaagccaagcttttattattttgaagattcaggaggaacaatctgcaatataatattaccttcgaatgctccaataaatcaaattgccagtacacctcaatcttcagttaatgctgccaaaaaagatgcttgtctaaaagcaattgaagaattgcataaattgggagccttgactgaccatctcttgccactgcaaaacagtgttcttgaggaggaaacattgctggtgtcttctgattctgggagctctgaagcagatgaggattcacgaggtgaactacatgagatgcttgttcctgctgtgcttaaagaatcatggactaacttagagaactgtgtcctcctttatgcttactatataaaatttaatccgaatcctaaggacaggagctataaagagtttgctctctttgtcaagtctcctctccctaaggaggctgagagaatggagctggatcttcacctatctcggcgtaggtcggtgatgacaaagcttaccccatctggagttgcagaatttaagagagaagagatcatgcaggcacagcattttcaagaaatgttcttcaaggtcatccttgatagatcagaactcctttctgaatttattactttaggaaatgtctttctttcatcaagctcctcaacattctatttattgcttcctgttattctctccaattgtgagaataaagtgacagtggattgggggattgtccaaagatgtttgtcgtctccactttttaagcctcctgttgcagctgcaaagattgaaaatttcccttcagatgtttgcttgcaccttgtaaatggttgtaggagtataagagacattgagaatagtttggtgtatgccacacacaagagggccttttactttattactagcattgttggtgaaaaaaatggttacagcccatatagagattcaggcactttaaatcacgtggagcacttaaacatgtctggcattcatcttaagtaccctgaacaacctcttctgcatgcaaaaccactttttaagttgcacaatttgctccacaaccgaaagccggaggattcagaagcaaatgaactggaagaatacttcattgatttgcctcctgagctttgtcagctgaaaataataggcttctccaaagagatagggagttcgctttctttgttaccatcaattatgcatcgcctggagaacttgcttgtggctattgaactgaagcatgttttttctgcttcatttgccgagggagctgaagttactgcccttagggtcctagaagcacttactacagagaagtgtcaagagcgtttttctcttgaaaggcttgagacacttggtgattccttcctcaagtttgctgtggcccgccatctttttcttttacatgatgcacttgatgaaggggaattgactaggagaaggtctaatgttgtaaataattctaatttattcaagctggcaacaaggcgaaatttacaggtttacatacgtgatcaaccttttgatccttatcagttctttcccttgggccatccctgcccagtaatttgtacaaaagaaactaaaggaactgttcacccacaatctagttgtcaagtagatcatacaaagagtgaagtcaaatgtagtagaaatcaccattggctacataaggacacaatttctgatgtggttgaggctcttgtaggagcatttatagttgataggggcttccaagcggcaacagcatttcttagatggataggcatacgagtggacttccaaggttctcaacttaatagtatttgcgctgcaagcaagagatttatgccactttcctccctattggatattggagatcttgaaaatttgttgggttaccagtttcttcataagggtctcctccttcaggcgattgtgcatccttcttttaataggcatgggggaggctgctaccagagattggagtttcttggagatgctgtcttagattatttaattacatcatatctgttttcactgtatccaaagttgaaacctggtcagttgactgatttgagatcagtgtcagtgaacaacaagtcctttgccaatgttgcagtggacagacgcttacacaaatttcttatgtgtgactcttgtcacctcaacgaggccatagaaaaatatgttgacttcatcacatcatcatcaccagacaggggattgtttgaagggccaaaatgtccgaaggctcttggtgacttggtagagtcttgtttcggtgctattctccttgatacagggttcaacttgaaccgtgtttggaagataatgctatccattctggatccaatcaagagcctttcaagtgtgcagctcaatcctatcagggaagtacaggagctttcccagtgttataactgggatttgcagtttctagttgcaaaagttggtagaaatttttcagtggatgcaaaggtaaatgcaggagatgtacctctatgtgtttcttacagcaacattaatagaaaagaagctatcagaactactgcacatcaactatatgtaaagttaaaggctctaggatatgcacccaaatcaaagtccttggaagaagttttgaagggaagccccaagaatgaagccaagctgattggatacgatgaaacacccattgatgtcagtgttactgacatagttggatttgaaaacatgaaattgcaagaatctcttgtgaatgatttcaaccccaaaactcgttctattaaaaggacaacttctagcggtgtatcttgcatctcacctggtagcagacctccaccttcttttgaagtaaaagcagcaaggggttcagcctctggtattgaagccaaaggcaaaccccccaattgctccattgtggatcctagttgtgggattgactcgccatccaaaggtgaatcacatggtcgtactgctagatcacagttatacgaaatctgtgctatcaattgctggaaaccccctttgtttgaatgttgcaaagaggaaggaccaagtcatttgagatcattcacttacagggtaatagttgaaatcgaagaagctccagatatgatattggagtgcttcagcagtcctcggaccacaaagaaggcagcagccgagcatgcagcggaaggtgcactctggtatttaaaacatggaggatacttacaataggtcaacttaaccgactgaacctcattgctagacataatggagatcaaggtttgaatttagtcattttgctatctcagttcaatggctctagtctctctcttcatcccctatttaatgaacttaaaaaccagcattttctttaaaagtcgaataaaagatgatttaacaacaaaattaaaattttgcttcgaacttgttaacgtggcatttttggtatgtccatgtatccaacaaggagcccaatttaattcaatccatgtatctggtgctgtgtcatgaaagtgtaaagattaaatttattaaactcgagatagaggattaaagctattcaattgagataataagatgatcgaatttagatttcaaactcaaatat

SEQ ID NO: 470 - DNA, 5194 bp, Gossypium raimondii
  source 1..5194: mol_type = genomic DNA
cattaatactctattgtcgggaattattagtttataatattgttttggctaagtttgggatttaggaaccaacttggatcatcattcgtcaattgtggattctttgcagcagtggaccatgcatggtttttaatggaatttgttattgttttatagcaagcccgggttatagaagattctcttgatttcaaggttgggacttattgtggtaactgcagacacttgaagaaccatcatgactgggaaatagagatcaaagaatatgaggttcttgttatgactccccaaatactacttcgtagcttatatcactgcttcatcaggatggacttaatcgctcttctgatatttgatgagtgtcatcatgctcaaataaaaagcaaccatccttatgcagaaatcatgaaagttttttatgataaagctactgcatcaatgcttcctcgtatatttggaatgacagcatctcccgttgttggtaaagatgcttccagtcaagtaaatttacctaaaagcatcaacagcctcgaaaacttgcttgatgctaaggtatattcagttggagataaggaggaattggaaagctttgtagcatctcctgtggttagagtatatgattatggtcctgtcaattttggttcttcttgttccaccattatctattgtagtaaacttgaggagattaagcgccagtgcataccttttgtcaggaagaatggtgatattcaatctgccaggaacacaaaaaagctgctcaacagaatgcatgataatataatcttttgcttggaaaatttgggcatttggggagcattgcaagcttgccgacttcttttaactggtaataactctgagaggaatgaattgatagaagatgaagggattttaagtgacgactctgtatgtgatcgatatcttgttcatgctgctgatgtttttgcttcagattgtacgagagatggatctgcaaacgatttatctgatgtagagattttgaaggaaccatttttctcgaaaaagctgctacgtcttgttggaattctttccaccttcaggttacagccaaatatgaaatgcataatttttgtgaataggattgttactgcaagatccttgtcatacatactgcaaaaccttaagttcctattattttggaagtgccattttcttgtgggagtccactctggacttaaaagtatgtcaagaaagacaatgaaaaacattcttgagaagttcagaacaggagagttgaatcttttgattgcaactaaagtcggtgaagaaggacttgacattcagacatgctgccttgtgatacgttttgaccttccagaaactgttgcgagctttatccaatcaagaggacgtgcaagaatgcctctctctgagtatgcatttctggtgaacagtgggaacgagaaggaactagatttgattaaaaattttaagaaagatgaagatcgtatgaatgtggaaatttctttcagaacatctactgaggtttctattggtcttgaggagagaatctatatggttgattcatctggtgcttccatcagttcaggatatagtatctctctacttcatcattactgctcaaaactgccccatgatgagtactttttccccaagccaagcttttattattttgaagattcaggaggaacaatctgcaatataatattaccttcgaatgctccaataaatcaaattgccagtacacctcaatcttcagttaatgctgccaaaaaagatgcttgtctaaaagcaattgaagaattgcataaattgggagccttgactgaccatctcttgccactgcaaaacagtgttcttgaggaggaaacattgctggtgtcttctgattctgggagctctgaagatgaggattcacgaggtgaactacatgagatgcttgttcctgctgtgcttaaagaatcatggactaacttagagaactgtgtcctcctttatgcttactatataaaatttaatccgaatcctaaggacaggagctataaagagtttgctctctttgtcaagtctcctctccctaaggaggctgagagaatggagctggatcttcacctatctcggcgtaggtcggtgatgacaaagcttaccccatctggagttgcagaatttaagagagaagagatcatgcaggcacagcattttcaagaaatgttcttcaaggtcatccttgatagatcagaactcctttctgaatttattactttaggaaatgtctttctttcatcaagctcctcaacattctatttattgcttcctgttattctctccaattgtgagaataaagtgacagtggattgggggattgtccaaagatgtttgtcgtctccactttttaagcctcctgttgcagctgcaaagattgaaaatttcccttcagatgtttgcttgcaccttgtaaatggttgtaggagtataagagacattgagaatagtttggtgtatgccacacacaagagggccttttactttattactagcattgttggtgaaaaaaatggttacagcccatatagagattcaggcactttaaatcacgtggagcacttaaacatgtctggcattcatcttaagtaccctgaacaacctcttctgcatgcaaaaccactttttaagttgcacaatttgctccacaaccgaaagccggaggattcagaagcaaatgaactggaagaatacttcattgatttgcctcctgagctttgtcagctgaaaataataggcttctccaaagagatagggagttcgctttctttgttaccatcaattatgcatcgcctggagaacttgcttgtggctattgaactgaagcatgttttttctgcttcatttgccgagggagctgaagttactgcccttagggtcctagaagcacttactacagagaagtgtcaagagcgtttttctcttgaaaggcttgagacacttggtgattccttcctcaagtttgctgtggcccgccatctttttcttttacatgatgcacttgatgaaggggaattgactaggagaaggtctaatgttgtaaataattctaatttattcaagctggcaacaaggcgaaatttacaggtttacatacgtgatcaaccttttgatccttatcagttctttcccttgggccatccctgcccagtaatttgtacaaaagaaactaaaggaactgttcacccacaatctagttgtcaagtagatcatacaaagagtgaagtcaaatgtagtagaaatcaccattggctacataaggacacaatttctgatgtggttgaggctcttgtaggagcatttatagttgataggggcttccaagcggcaacagcatttcttagatggataggcatacgagtggacttccaaggttctcaacttaatagtatttgcgctgcaagcaagagatttatgccactttcctccctattggatattggagatcttgaaaatttgttgggttaccagtttcttcataagggtctcctccttcaggcgattgtgcatccttcttttaataggcatgggggaggctgctaccagagattggagtttcttggagatgctgtcttagattatttaattacatcatatctgttttcactgtatccaaagttgaaacctggtcagttgactgatttgagatcagtgtcagtgaacaacaagtcctttgccaatgttgcagtggacagacgcttacacaaatttcttatgtgtgactcttgtcacctcaacgaggccatagaaaaatatgttgacttcatcacatcatcatcaccagacaggggattgtttgaagggccaaaatgtccgaaggctcttggtgacttggtagagtcttgtttcggtgctattctccttgatacagggttcaacttgaaccgtgtttggaagataatgctatccattctggatccaatcaagagcctttcaagtgtgcagctcaatcctatcagggaagtacaggagctttcccagtgttataactgggatttgcagtttctagttgcaaaagttggtagaaatttttcagtggatgcaaaggtaaatgcaggagatgtacctctatgtgtttcttacagcaacattaatagaaaagaagctatcagaactactgcacatcaactatatgtaaagttaaaggctctaggatatgcacccaaatcaaagtccttggaagaagttttgaagggaagccccaagaatgaagccaagctgattggatacgatgaaacacccattgatgtcagtgttactgacatagttggatttgaaaacatgaaattgcaagaatctcttgtgaatgatttcaaccccaaaactcgttctattaaaaggacaacttctagcggtgtatcttgcatctcacctggtagcagacctccaccttcttttgaagtaaaagcagcaaggggttcagcctctggtattgaagccaaaggcaaaccccccaattgctccattgtggatcctagttgtgggattgactcgccatccaaaggtgaatcacatggtcgtactgctagatcacagttatacgaaatctgtgctatcaattgctggaaaccccctttgtttgaatgttgcaaagaggaaggaccaagtcatttgagatcattcacttacagggtaatagttgaaatcgaagaagctccagatatgatattggagtgcttcagcagtcctcggaccacaaagaaggcagcagccgagcatgcagcggaaggtgcactctggtatttaaaacatggaggatacttacaataggtcaacttaaccgactgaacctcattgctagacataatggagatcaaggtttgaatttagtcattttgctatctcagttcaatggctctagtctctctcttcatcccctatttaatgaacttaaaaaccagcattttctttaaaagtcgaataaaagatgatttaacaacaaaattaaaattttgcttcgaacttgttaacgtggcatttttggtatgtccatgtatccaacaaggagcccaatttaattcaatccatgtatctggtgctgtgtcatgaaagtgtaaagattaaatttattaaactcgagatagaggattaaagctattcaattgagataataagatgatcgaatttagatttcaaactcaaatatgtttgatgatgtctatattgatggctgtta

SEQ ID NO: 471 - DNA, 1215 bp, Gossypium raimondii
  source 1..1215: mol_type = genomic DNA
atgggttttcaaatttttggatttcaaaaggttgtttttcaatatgtgaagtgttttgagatacttcttctgaaaagtgtggcacaccgagtctccggcgccgaattcttgctggagttacggactaaagccaagatttttgttcaaaaaggaaggtctatgatgggatgtctggatgaaactagaaccttgaattatggccaagtttttgtgcagttttctggctctagatctaaccaacgtgatattgttcagggtaaggtaattgttgccaaaaacccctacttgcacccaggcgatgtacgtgtattaagggctgtcaatgtgcctgatttgcaccatatggtcgattgtgttgttttccatagaaaggaaccaggtacacctcatcccaatgaatgctctggaactgatctggatggtgatacttactttctctgttgggaccctgaattgattccatataagcaaatcgatgctatggattattcacccgctccaacaaccaaattggatcatgaagttaccattgaggaaattgaagaatacttcacaaactacataaacctgacaaagttgttttctattgcagttgactttccgaaaacgggtgtaccagctgaaataccacaagacttgagggtcaaagaatttccgaatttcatggagaaaccagacaagccaagttatcaatcacacaatgttattggaaagctttttcgagaggtgaagaaccttgcacccaatgaatgctcgattaagttcttaactcgggaaaagatgcagaggttttatgatcccgacatggaagttgaaggctttgaggattatatcgacgatgctttcttctacaaaagtaaatacgattacaaattggggaatttgatggactattgcagggtcaaaacggaggctgaaatactcagtgggggtatcatgaaaatgtcgagatcttttacgaagaaaagagatgcagaagcgatcagcatggcagtgagatcattgagaaaggaagctaggtcatggttcaatgaaaaaagaagtgagttggatgaagaaatagatgatgcatatgcaaaagcctcagcttggtactatgtcacatatcatccaagttattggggtcagtataatgagggaatgaatagggatcatttcttgagctttccttggtgtgtttatgacaagttggtccagatcaagaaagaaaatgca

SEQ ID NO: 472 - DNA, 3928 bp, Gossypium raimondii
  source 1..3928: mol_type = genomic DNA
aaacaaaatcgctgacgtggccaaaagccattcgctattagatagggaagccaatggaaaattggaaaaatatataataatttaatgttaaacgtgtgacgtggccagccgaagcgatttgcagaacatcctgcaatgtggggtgcgacggaggaaatcacggcatttttcttcgtctatttgagtaaattgactaaaatagttgacaatccaggattctaagtaaagttggagtcttttatgttactctcactctaatatcaatggagtttgggtttagttatcgttatgactgatcattcatcttcttcttctctttgttaattaattgtatgctgtaaggtggtaagagcacagagtgaattgagacaatgggtaagacgattcaggtttatgggttcctctcaaatgtgtctgcaggagaagtaaagacatttttagagggatatacgggcagagaaactgtttatgccctgaagatcaggcagcataaaaagggtggaagagcatatgctattgtgcagtttaccagaagctctgctgcagagctaattataaggttggctaatcaaaggctatactatgggagatcatatcttaaggctcgagaaatggagaccgacatcgtgccaaagccgagagcctttttgcacacaatggaacgtgttacggtgaattttggctgtcaagtctctgtagaaaaattttatgttctctggaaagcagaaaatgttactctaaattttgggactggaatgcggaaattggaatttctagtgtcgtattgtaggtcaaaatacaagcttgagctcttctatgagaacatctggcagattgagctgcgttgtcctgacagtcaaacctcaaagcatcttctgattcagttatttggcgctccccggatatatgagaaagaagtgcgtgcttctgaacttgtatttgatgatcccttgcttaactatttcaaggatgtgcctgatgatcaatgggtaaggacaacggatttcactcgttctaattgtattggacaatcttctgtattatgcttggagcttcctcacaacctccgacttccaaattttcgggagaactttgcttattacaaagaaaatgaaagcagattggttttggaaagtggttcttcttactcctgcaatcttagtctagtcccaattgtatgccctttgcgggtaattgacttgccatttgaaatcttgttcaaggttaatctgttggtgcaaaatgggtgcatcccaggaccagcacttgatgatactttttatcgattggttgatccttgtagaatggacaaagtctacatagaccatgcgctggagaaactttattatctaagagaatgctgctatgaaccttcgaggtggctctttgaggagtacaaaaatttctcaagatcgaggaaatatcaaggttcacctgctatatccttagatgaaggtttggtatatgtaagaagggttcagataacgccttctagggtctacttttgtggtcctgagattaatgtttcaaaccgtgtgctacgccaattccataatgatattgataattttcttcgcatcagttttgttgatgaagagttggagaagatccattcaataaatgtgcaggcaaggggtaggagaactagtatttacgaaaggattctttctactcttagaaatggcgtactgattggggataagagatttgaatttcttgccttttcatcaagtcaattacgggagaactcagcctggatgtttgcttcaagaaaggggctcactgcagcagatataaggtcatggatgggaaattttagtaaaataagaaatgtggcaaaatatgctgctagactgggccaatctttcagttcatcaactgaaactcttagtgtttctaaagatgaaatcaaccttattccagatatagaaattatgaaggatgggattaaatacgtcttttcagatggaattggaaaaatatcagctaaatttgctaagaaggtggcagctaaatgtcggttgaagggttgcactccatctgcctttcagattcggattggtggattcaagggtgttgtggctattgacccgacctcatcttggaaattatccctcagaaagagtatggaaaagtatgaatcagagaacactaaactggatgttttggcttggagtaagtatcagccatgttttctgaaccgccagttgattaccctgttatctactcttggagttccagaccgtgcttttgagaaaaaacaaagagaagtaattgagcaactcaatgctctcctgacggatcctttagaggctcaggaggctctggagttaatgtctccaggagaaaatactaacattctgaaggaaatgctcttgtgtggttataagcctgatgctgaaccattcctttcaatgatgttggaagcttttcgagcttcgaagttgctggagttgcggactaaagccaggatttttgttcaaaaaggaaggtctatgatgggatgtctggatgaaactagaaccttgaattatggccaagtttttgtgcagttttctggctctagatctgagcaacgttgtattgttcagggtaaggtaattgttgccaaaaacccctgcttgcacccaggcgatgtgcgtgtattaagggctgtcaatgtgcctgatttgcaccatatggtcgattgtgttgtttttccacagaaaggaaccagacctcatcccaatgaatgctctggaagtgatctggatggtgatatttactttgtctgttgggaccctgaattgattccatataagcaaatggatcctatggattattcacccgctccaacaaccatattggatcatgaagttaccattgaggaaattgaagaatacttcacaaactacatagtcaatgacagtttgggaataatttcaaatgctcatactgcttttgctgatagagaacctggcaaagcaatgtgccacccgtgcctggagcttgcaaagctgttttcaattgcagttgactttccgaaaacgggtgtaccagctgaaataccacaagaactgagggtcaaagaatatccggatttcatggagaaaccagacaagccaagttatcaatcacacaatgttattggaaagcttttccgagaggtgaagaaccttgcacccaatgaatgctcgattaagttcttaactcgggaaaagatgcagaggttttatgatcccgacatggaagttgaaggctttgaggattatatcgacgatgctttcttccacaaaagtaaatacgattacaaattggggaatttgatggactattacggggtcaaaacggaggctgaaatactcagtgggggtatcttgaaaatgtcgagatcttttacgaagaaaagggatgcagaagcgatcagtatggcagtgagatcattgagaaaggaagctaggtcatggttcaatgaagaaagaagtgagttggatgaagaaatagatgatgcatatgcaaaagcctcagcttggtactatgtcacatatcatccaagttattggggtcagtataatgagggaatgaatagggatcatttcctgagctttccttggtgtgtttatgacaagttgatccagatcaagaaagaaaaagcagctgttcgggaagctttggatttgtcgtctctggaacatcgctttcaacgtagattgcatttgcattgaggtgttctggcttatgtttcctgtttactgtagtaggtaaatgtgggtagctcatgtttcctaacgacactgaatgttatatatataatgtataaacatatccagtttagtttggattgtgcatgttttggacctgttgtaaaaataagagatcggattagtttggttgaatcgaaaacgtgtgatctgcatatttagtgtgtatcatttaaaatcctttgaac

SEQ ID NO: 473 - DNA, 1188 bp, Gossypium raimondii
  source 1..1188: mol_type = genomic DNA
ttagtttctccgattgcatatttatcttcaacttttcgagcttcgaagttgctgaagttgcggactaaagccaggatttttgttcaaaaaggaaggtctatgatgggatgtctggatgaaactagaaccttgaattatggccaagtttttgtgcagttttctggctctagatctgaccaacgtgatattgttcagggtaaggtaattgttgccaaaaacccctgcttgcacccgggcgatgtgcgtgtattaagggctgtcaatgtgcctgatttgcaccatatggtcgattgtgttaatcaaatttttagacctcatcccaatgaatgctctggaagtgatctggatagtgatacttactttgtctgttgggaccctgaattgattccatataagcaaatcaatgctatggattattcacccgctccaacaaccaaattggatcatgaagttaccattgaggaaattgaagaatacttcacaaactacatagtcaatgacaagaacctgacaaagctattttcaattgcagttgactttccgaaaacgggtgtaccagctgaaataccacaagacttgagggtcaaagaattttcggatttcatggagaaaccagacaagccaagttatcaatcacacaatgttattggaaagcttttccgagaggtgaagaaccttgcacccaatgaatgctcgattaagttcttaactcgggaaaagatgcagaggttttatgatcccgacatggaagttgaaggctttgaggattatattgacgatgctttcttctacaaaagtaaatacgattacaaattggggaatgtgatggactattacagggtcaaaacggaggctgaaatactcagtgggggtatcatgaaaatgtcgagatcttttacgaagaaaagagatgcagaagcgatcagcatagcagtgagatcattgagaaaggaagctgggtcatggttcaatgaaaaaggaagcgagttggatgaagaaatagatgatgcatatgcaaaagcctcagcttggtactatgtcacatatcatccaagttattggggtcactttccttggtgtgtttatgacaagttggtccagataagaaagaaaatgcagctgtttcgggaagctttggatttgtcgtctccggaacatcgctttcaacatggattgcatttgcattga

SEQ ID NO: 474 - DNA, 8393 bp, Gossypium raimondii
  source 1..8393: mol_type = genomic DNA
atttgaatttttttaaataaaataataacaaaaataagatactttagtataataaacttgaatttagttagatttttaaaattattactttagaaaattttaaaaagtttaactttctttatatatattctttaatttttttaaaaattattataaaaattttaaaatataaaatttgggtttttataaataatttgaattttaaaaatcatttttataatttttattgagagagaccaatttgttcattttcaaaattgagatgaaccaaagaaatatttacaccgatctattattcaaattattcgaactcgaaacttaaattacttattcaagttgaataaaataattcgatttgattgacttaaaattcaaaattttctaatctaatcgaattttactcacccgtacacacaatacctaatgatattctttgttaaaaataggtgttgcatgcagtggaagctggtgctatttgtttttgatataatcatcaataataaatgataaattcaataaaaataaataaatgatgatatagaaaaagatacttttaataatttttggattaatagaattattaaatatttaaaatttaaaaccattaaactcctctaaaaaagctatcgtagttcgtacaggataaatttggaaataaaaaaattcgtgtaggataattacaacgtacctaatttcctaaaatcccagaaattattgattaaaacaaatgtataaaattctaatatcatccgcacgtgtcatccaaattgtgtcacagccatatccactatcacatttaaactcctcaccataactacgtggtccccacactacttttccctttttacccccaagtgatcgtatgcaagcaatctcaccaatcaacaagatcaaatcaaagccgtcaatacttgatctaacgctgtatgttcgtctaaatccacgtctttgatgatacactcactgcaacgaaattcaattttttataaacagaaatcgaaaaaagtcgaaaatattatatcagattttccttctcacattattgagcataaaaaggcaatacattaattaaaaaattatttctgtaacgtttcccctaaaaggttaatgctattttatcttgcattttatattattaaaaaaattaataaagggattttctaatttaggaagattaacatattataaatgcaatgttgataataaatcaataaaatacgagataaaaaagagagatttttgtttgactttccttttaattcatatatttcatgtggtatgattcctattataagatatctaggcatttaataacatataaattgtttttataaattttggttaatgaaattaatatgcgagaaaaatagggaataaaactcattaacaatggtaaacttagtagtctttttctaaaagaaagggcaaagtgtttttttttttttggtataatattgctccgatttaatttatctaaatatagttttaattcttattgatctaaaagtgagagagtggacggtggagatgtggtagagtatggtaatcgtgtaagaccgcgaagcagaggagacggtaaccactaatagagggacagaagaagcgttggtcacttgtgtattttagtctctctcagccttttagtatttagagggagagggagtgagctaaaaaagaagagaaagagggtcgtagaattttgctgtctctttgagttccttagggtttcttgtttcaatttttttttgttttttctctccggatttcaggtatttcctctgaaacctttttattttggattttttttctttgctttttttttcatggttctttgaggttttttttagagtttttttttggagatttttgggctttgttcttcgcaatgctgctacagtgcgtgtgatttttaaaggtttttcttcctttttaagtatgatctgggttccttcttcctgtttttgttcatggatttttttttctgttaaagtttacgttttttttttggttgatgttttttgtttttcttctctatttttttaaaaaactgtagaatgctgtagtttttaggcagcgtaagcatgttttgtcacttcagtagcttttcgttaactttttttatattatttatattttgttttttttatggtttaaaaaagtattttcttgtcactcttcagagttttgaccaaacttctaaaagctgtttagtttttttaggtggttttaaaccatgtttacaagttcttactctctttatttactcttcctttgcaatttctagcctttgctgtctcttggtgtgctaaaggtattagcttttctgcatatctgctttgagtcctacaatgctgatgtatatctggttaaagttatgatttttatgcaaaatcagtatatttgtccactttgttatagccttttatatttgtgcatacattaaaatgccgtcatagtgtacctgagttcaagttcatattaaacgttcccatattgtgtactctgaagaagggaatctttgtccatctataccatttgtgttcatctttctctatttttgactgttgatactcctatatatataaatatataatctttttggtaataggtcctctgatttttcaggtcatgttgtatttgtttatcgtttgtttagtacacatgcctttcctgtgcatgcatgttgtttttccttgttgaacgtttcgtgagaagaaaattttctttatacttgctaatatttattttcatgttggttagggtatggattcgtttgagcaagagggaaatggggcagcgctggaatccctgcctcctccgccacctgtgcctcctgatgttgttccgatcaaagcagaatcggatgcgaagaagattgtacgacaccctatggcaaggcgtggtgttggaactaaagggcagaaggtaactatactcaccaatcacttcaaagtgagcgtggggagtactgatggacacttctaccattacagcgtacgtgattggatttcttctctctatgcttttgtttctattttttgtcagttgttgcttggaaaacattcataattggggaagtactttgtattcggttcaacaggtttctctttcatatgaagatggtcgccctgtggatggtaagggtgttggaaggaaagtgattgacagagtgcatgagacctacaaaaatgatttggatggaaagaattttgcctatgatggtgaaaaaagtttatttactataggtccgctaccaaacaacaagcttgagtttactgttgtacttgaggatgttgcacctaccaggtagaaatgcacttttaatttttagtatctatactgccccaagtcattgttatgtcagctctaacttgggagtgctatcatgtatagaaacaatggaaatgcaagccctgatggccaggacagcccaaatgggcgtgaaagaaagagattaagaagaccgtatcattcaaagacctttaaagtggagattagctatgctgcgaagatacccatgcaagcaattcaaaatgctctgcgtgggcaggaatctgaaaactctcaagaagcactgagggtgctggatatcattttaaggcagcatgctgcgaaacagtgagttaaaatatgtgtctgcatgtttactttttttttgaaatattgaattttggtcctaggtatcatgttaatcttgacattacctactctttctcaggggatgcctacttgttcgccaatctttctttcaagataatcagaacaacttcacagacattggaggaggtgtccttggctgtagaggtttccattcaagtttcagagccactcaaggaggcctttcactaaatatcggtttggaatcctctctctctctctctcgctctgtcagtacttctgcattttgtgctgtggttattgattaataactcttatattttatctttgtcagatgtatcaactaccatgataattcaacctggtccggtagttgattttttacttgcaaatcagaatgctagagatccttactctcttgactggaacaaggtaataaataactgttatttttgtaaatgtagtttgatttcctttgtatcaattattaaattttattttgaaattgctggaaaatcctgaataggcaaaacgggtgctgaagaatctgaggattaaagttagtccgtctaatcaagagtacaagattactggcttgagtgaacaactgtgcaaggatcagttgtatggcttccaaattttatttcactcccttttggttgatttatgctaattgactattttattctgagcttgctgcttgcatcttgtgagtaattatttgtttttgatgagttactgttcccatgttgtaggttctcaatgaagcagaaaaataccaaaaatgaaaatggtgaagctgagacactggagattactatttatgattattttgttaaccatcgcaacatacagttgcgttattctgctgatttgccatgtattaatgttgggaagcctaagaggccaacatatattcctattgaggttatttcctgcactgatttgttttcaatttgttaaattagaaaagttttgtaactaattcttgtctactgtttgttgttcacctgtggcaataatgcagctttgctctttggtgtctttgcaacgctacactaaggcactatccactttccaaagagcttccctggttgaaaaatcgaggcagaagcctcaagaaaggatgaatgttttgtctaatgtaggtctttttttgaagcttttgaattgcgttgtttcacttatgccaaaatttaagtgacacaagtgttgaaaatttatttgcaggttttacgtaccagtaattatggtgctgaaccaatgctgaaatcttgtggtgttaatataaactctaatttcacccaagtggatggacgtattctgccagcaccaagggtaggtgaataatgtccgtgtattgttccttgatagaacaatcatttgtgttagttgtttagactttctttttatattagatcttcctgctaattgagttctcttgattacagttaagagtcggcaacggtgaagatttctttccaaggaatgggcgttggaattttaacaacaaggtcattgctctttttgatttttcagccttctatcctgtatttgttttatccatttatttctttaagagtttatgtatgctttcatagaaattggtggagccatctaggattgaaagatgggctgttgtgaacttctcggctcctcgttgtgatccaaacaacattgcaagggatttgattcgttgtggagaaatgaaaggaattgtaagtcagcatccacttttttatttctgttatggtttgcttgttggcataggaatagctataaaattcaacttgttggctaaagttctttctgttctctctttttcagcgtattgatcccccatttgatatattcaatgagatgaaccagaatagacgcctttcacccgtggttagagttgaaaaaatgtttgaacagatacaatctaaacttcctggagctccgcagttccttctttgtctgcttcctgataggaaaaactctgatctttatggttggcggaatctctcttttcatacattttgtctgcatgtttatcttgaagtgtattacttgcatataaagttcattaaaattttcaagggccatggaagcggaagaatctttctgagtatggcatcgtgactcagtgtatggcaccagctagggtgaatgatcaataccttacaaatcttcttctgaagatcaatgctaaggtttgtttactgttcctatcaaatgggttcttattgctttaagctatttttattgttgcagttctaacttctgtaattatatcagtagctgtatcttcctcttactatgtaaatctggtaatgtcttatctttttattttctcacagcttggaggtcttaattcaatgctaactattgagcaaacaccttcaatccctatgatttcaaaggttccaactatcatccttggaatggatgtatctcatggctctcctgggcagtctgatgtgccgtcaatagctgcggtagagatcttgtttcttattattgaatttcttttgcttccgtctattgaattaataatggaagtcatagaggcttaattgtgcagtctttctgatattcaaattctgcgagttcttttaattgcatttaattgtaggtggttagctccaggcaatggccattgatttcccgctatagggcatcagtccgtacacagtctccgaagcttgaaatggtagattctcttttcaaaccagtttctgacaaagtggatgagggtatcatgaggtgcgtttgaatcatatagttctttggcttctgaagggataaatatttttcaagaaaaacttgaacgactagtttttatttttttgcaaaatatttatgtttttgtatccttttctaatctttaatccttctcttgtttccagttggagtttggtatggattgggttgtaataagaatattgtatatgtttgcatagctaacatgcttttcttttatttcagggaagctctcttagacttctatacaagttcagggaagaggaagcctgatcagatcattattttcaggttttactttttaagattttttgtctcgcacttcaaaaatgacaatatatatgctgaagaatgctttattaggaatatcaagcgtatagattttgctgtttttccggattttctattgcttatctatcttgatttttgtgcactgccatgtctcttgtttgttatttcttgtgagctagtttgtggttaaattgcagtttctgttgagtttcactgatatgcttgtgctgaagtttattacttgctcattacttggtttaaattagggatggggttagcgagtctcagttcaatcaagttttgaacaaagaacttgatcaagttattgaggtatgcagtagttcctttcaatcatttgaactgaaaatttcattgttcttaaatttattcacagcgaagttattttggtagttctaaaatgttacctcaagatctttatcatttggataatacatttctactgtaataggcttgcaagttccttgacgagaattggaaccctaagtttgtggttattgttgcacaaaaaaaccatcataccaagtttttccagcagggatctcctgacaatgtgctacctggttaggcttacccattctttaataaatgtcaggcaggaccactgttgtagtggttaaagcttgtattttttttattgtgcaggtactgtcattgacaacaaagtatgccatccgaagaacaatgatttttacctttgtgctcatgctggaatgatagtaagttcacttatttttgtttctgttaattgatgattgataatacagctgtctcaattttgcagtcattgataacacattatatgatttgtgtttgccgttcaggggaccacaaggccgacccactatcatgttctcttagaccaggttgggttttcagctgatgatctgcaggagcttgttcattctctatcctacgtgtaagtacagaaacaagcgtacagaaacaacttatttttttacaaatagtttaagctgttttcactgtcacaatctttgtattctgtctgttgcaggtatcaaaggagcaccacagccatatctgttggtaagtataagtattgtttctgatctttgctttgggttttccgtttttgatgcataattttgtagtttcatttcttaagtgcattgtttctgatctttgctttgggttttccttttttgatgcagtggcccctatttgctacgctcatttggcagcttcacagttggggcaatttatgaagtttgaggatgcttcagagacatcatcgagccatggtggggtgactgctccgggagcaatttctgttcctcagcttcccaggttgaaggataatgtcagcagctccatgttcttctgctgaaaaccgttgaaccatctttttgtatagggcttttggattttggctaccaaaaactatttatgctgctttttcaaagtagtctcagacttttgggttgcaacactcttaggtgtttcgtatgttatctgaacttatgaacggttgtctagctaaagctcacttctgcagtggcttttgtggcttttacctgtttggttttatactttgataaatatggttatggtttgctcttttgattataagttttctttttctagtttttttcattagttgagttgaagataaaacgagctctgatttcaaagtaccgtacattttaaattaaaacaggatataaaagaagagaaaagcaatgctttcaaagtagtatact

SEQ ID NO: 475 - DNA, 8340 bp, Gossypium raimondii
  source 1..8340: mol_type = genomic DNA
tattctttaatttttttaaaaattattataaaaattttaaaatataaaatttgggtttttataaataatttgaattttaaaaatcatttttataatttttattgagagagaccaatttgttcattttcaaaattgagatgaaccaaagaaatatttacaccgatctattattcaaattattcgaactcgaaacttaaattacttattcaagttgaataaaataattcgatttgattgacttaaaattcaaaattttctaatctaatcgaattttactcacccgtacacacaatacctaatgatattctttgttaaaaataggtgttgcatgcagtggaagctggtgctatttgtttttgatataatcatcaataataaatgataaattcaataaaaataaataaatgatgatatagaaaaagatacttttaataatttttggattaatagaattattaaatatttaaaatttaaaaccattaaactcctctaaaaaagctatcgtagttcgtacaggataaatttggaaataaaaaaattcgtgtaggataattacaacgtacctaatttcctaaaatcccagaaattattgattaaaacaaatgtataaaattctaatatcatccgcacgtgtcatccaaattgtgtcacagccatatccactatcacatttaaactcctcaccataactacgtggtccccacactacttttccctttttacccccaagtgatcgtatgcaagcaatctcaccaatcaacaagatcaaatcaaagccgtcaatacttgatctaacgctgtatgttcgtctaaatccacgtctttgatgatacactcactgcaacgaaattcaattttttataaacagaaatcgaaaaaagtcgaaaatattatatcagattttccttctcacattattgagcataaaaaggcaatacattaattaaaaaattatttctgtaacgtttcccctaaaaggttaatgctattttatcttgcattttatattattaaaaaaattaataaagggattttctaatttaggaagattaacatattataaatgcaatgttgataataaatcaataaaatacgagataaaaaagagagatttttgtttgactttccttttaattcatatatttcatgtggtatgattcctattataagatatctaggcatttaataacatataaattgtttttataaattttggttaatgaaattaatatgcgagaaaaatagggaataaaactcattaacaatggtaaacttagtagtctttttctaaaagaaagggcaaagtgtttttttttttttggtataatattgctccgatttaatttatctaaatatagttttaattcttattgatctaaaagtgagagagtggacggtggagatgtggtagagtatggtaatcgtgtaagaccgcgaagcagaggagacggtaaccactaatagagggacagaagaagcgttggtcacttgtgtattttagtctctctcagccttttagtatttagagggagagggagtgagctaaaaaagaagagaaagagggtcgtagaattttgctgtctctttgagttccttagggtttcttgtttcaatttttttttgttttttctctccggatttcaggtatttcctctgaaacctttttattttggattttttttctttgctttttttttcatggttctttgaggttttttttagagtttttttttggagatttttgggctttgttcttcgcaatgctgctacagtgcgtgtgatttttaaaggtttttcttcctttttaagtatgatctgggttccttcttcctgtttttgttcatggatttttttttctgttaaagtttacgttttttttttggttgatgttttttgtttttcttctctatttttttaaaaaactgtagaatgctgtagtttttaggcagcgtaagcatgttttgtcacttcagtagcttttcgttaactttttttatattatttatattttgttttttttatggtttaaaaaagtattttcttgtcactcttcagagttttgaccaaacttctaaaagctgtttagtttttttaggtggttttaaaccatgtttacaagttcttactctctttatttactcttcctttgcaatttctagcctttgctgtctcttggtgtgctaaaggtattagcttttctgcatatctgctttgagtcctacaatgctgatgtatatctggttaaagttatgatttttatgcaaaatcagtatatttgtccactttgttatagccttttatatttgtgcatacattaaaatgccgtcatagtgtacctgagttcaagttcatattaaacgttcccatattgtgtactctgaagaagggaatctttgtccatctataccatttgtgttcatctttctctatttttgactgttgatactcctatatatataaatatataatctttttggtaataggtcctctgatttttcaggtcatgttgtatttgtttatcgtttgtttagtacacatgcctttcctgtgcatgcatgttgtttttccttgttgaacgtttcgtgagaagaaaattttctttatacttgctaatatttattttcatgttggttagggtatggattcgtttgagcaagagggaaatggggcagcgctggaatccctgcctcctccgccacctgtgcctcctgatgttgttccgatcaaagcagaatcggatgcgaagaagattgtacgacaccctatggcaaggcgtggtgttggaactaaagggcagaaggtaactatactcaccaatcacttcaaagtgagcgtggggagtactgatggacacttctaccattacagcgtacgtgattggatttcttctctctatgcttttgtttctattttttgtcagttgttgcttggaaaacattcataattggggaagtactttgtattcggttcaacaggtttctctttcatatgaagatggtcgccctgtggatggtaagggtgttggaaggaaagtgattgacagagtgcatgagacctacaaaaatgatttggatggaaagaattttgcctatgatggtgaaaaaagtttatttactataggtccgctaccaaacaacaagcttgagtttactgttgtacttgaggatgttgcacctaccaggtagaaatgcacttttaatttttagtatctatactgccccaagtcattgttatgtcagctctaacttgggagtgctatcatgtatagaaacaatggaaatgcaagccctgatggccaggacagcccaaatgggcgtgaaagaaagagattaagaagaccgtatcattcaaagacctttaaagtggagattagctatgctgcgaagatacccatgcaagcaattcaaaatgctctgcgtgggcaggaatctgaaaactctcaagaagcactgagggtgctggatatcattttaaggcagcatgctgcgaaacagtgagttaaaatatgtgtctgcatgtttactttttttttgaaatattgaattttggtcctaggtatcatgttaatcttgacattacctactctttctcaggggatgcctacttgttcgccaatctttctttcaagataatcagaacaacttcacagacattggaggaggtgtccttggctgtagaggtttccattcaagtttcagagccactcaaggaggcctttcactaaatatcggtttggaatcctctctctctctctctcgctctgtcagtacttctgcattttgtgctgtggttattgattaataactcttatattttatctttgtcagatgtatcaactaccatgataattcaacctggtccggtagttgattttttacttgcaaatcagaatgctagagatccttactctcttgactggaacaaggtaataaataactgttatttttgtaaatgtagtttgatttcctttgtatcaattattaaattttattttgaaattgctggaaaatcctgaataggcaaaacgggtgctgaagaatctgaggattaaagttagtccgtctaatcaagagtacaagattactggcttgagtgaacaactgtgcaaggatcagttgtatggcttccaaattttatttcactcccttttggttgatttatgctaattgactattttattctgagcttgctgcttgcatcttgtgagtaattatttgtttttgatgagttactgttcccatgttgtaggttctcaatgaagcagaaaaataccaaaaatgaaaatggtgaagctgagacactggagattactatttatgattattttgttaaccatcgcaacatacagttgcgttattctgctgatttgccatgtattaatgttgggaagcctaagaggccaacatatattcctattgaggttatttcctgcactgatttgttttcaatttgttaaattagaaaagttttgtaactaattcttgtctactgtttgttgttcacctgtggcaataatgcagctttgctctttggtgtctttgcaacgctacactaaggcactatccactttccaaagagcttccctggttgaaaaatcgaggcagaagcctcaagaaaggatgaatgttttgtctaatgtaggtctttttttgaagcttttgaattgcgttgtttcacttatgccaaaatttaagtgacacaagtgttgaaaatttatttgcaggttttacgtaccagtaattatggtgctgaaccaatgctgaaatcttgtggtgttaatataaactctaatttcacccaagtggatggacgtattctgccagcaccaagggtaggtgaataatgtccgtgtattgttccttgatagaacaatcatttgtgttagttgtttagactttctttttatattagatcttcctgctaattgagttctcttgattacagttaagagtcggcaacggtgaagatttctttccaaggaatgggcgttggaattttaacaacaaggtcattgctctttttgatttttcagccttctatcctgtatttgttttatccatttatttctttaagagtttatgtatgctttcatagaaattggtggagccatctaggattgaaagatgggctgttgtgaacttctcggctcctcgttgtgatccaaacaacattgcaagggatttgattcgttgtggagaaatgaaaggaattgtaagtcagcatccacttttttatttctgttatggtttgcttgttggcataggaatagctataaaattcaacttgttggctaaagttctttctgttctctctttttcagcgtattgatcccccatttgatatattcaatgagatgaaccagaatagacgcctttcacccgtggttagagttgaaaaaatgtttgaacagatacaatctaaacttcctggagctccgcagttccttctttgtctgcttcctgataggaaaaactctgatctttatggttggcggaatctctcttttcatacattttgtctgcatgtttatcttgaagtgtattacttgcatataaagttcattaaaattttcaagggccatggaagcggaagaatctttctgagtatggcatcgtgactcagtgtatggcaccagctagggtgaatgatcaataccttacaaatcttcttctgaagatcaatgctaaggtttgtttactgttcctatcaaatgggttcttattgctttaagctatttttattgttgcagttctaacttctgtaattatatcagtagctgtatcttcctcttactatgtaaatctggtaatgtcttatctttttattttctcacagcttggaggtcttaattcaatgctaactattgagcaaacaccttcaatccctatgatttcaaaggttccaactatcatccttggaatggatgtatctcatggctctcctgggcagtctgatgtgccgtcaatagctgcggtagagatcttgtttcttattattgaatttcttttgcttccgtctattgaattaataatggaagtcatagaggcttaattgtgcagtctttctgatattcaaattctgcgagttcttttaattgcatttaattgtaggtggttagctccaggcaatggccattgatttcccgctatagggcatcagtccgtacacagtctccgaagcttgaaatggtagattctcttttcaaaccagtttctgacaaagtggatgagggtatcatgaggtgcgtttgaatcatatagttctttggcttctgaagggataaatatttttcaagaaaaacttgaacgactagtttttatttttttgcaaaatatttatgtttttgtatccttttctaatctttaatccttctcttgtttccagttggagtttggtatggattgggttgtaataagaatattgtatatgtttgcatagctaacatgcttttcttttatttcagggaagctctcttagacttctatacaagttcagggaagaggaagcctgatcagatcattattttcaggttttactttttaagattttttgtctcgcacttcaaaaatgacaatatatatgctgaagaatgctttattaggaatatcaagcgtatagattttgctgtttttccggattttctattgcttatctatcttgatttttgtgcactgccatgtctcttgtttgttatttcttgtgagctagtttgtggttaaattgcagtttctgttgagtttcactgatatgcttgtgctgaagtttattacttgctcattacttggtttaaattagggatggggttagcgagtctcagttcaatcaagttttgaacaaagaacttgatcaagttattgaggtatgcagtagttcctttcaatcatttgaactgaaaatttcattgttcttaaatttattcacagcgaagttattttggtagttctaaaatgttacctcaagatctttatcatttggataatacatttctactgtaataggcttgcaagttccttgacgagaattggaaccctaagtttgtggttattgttgcacaaaaaaaccatcataccaagtttttccagcagggatctcctgacaatgtgctacctggttaggcttacccattctttaataaatgtcaggcaggaccactgttgtagtggttaaagcttgtattttttttattgtgcaggtactgtcattgacaacaaagtatgccatccgaagaacaatgatttttacctttgtgctcatgctggaatgatagtaagttcacttatttttgtttctgttaattgatgattgataatacagctgtctcaattttgcagtcattgataacacattatatgatttgtgtttgccgttcaggggaccacaaggccgacccactatcatgttctcttagaccaggttgggttttcagctgatgatctgcaggagcttgttcattctctatcctacgtgtaagtacagaaacaagcgtacagaaacaacttatttttttacaaatagtttaagctgttttcactgtcacaatctttgtattctgtctgttgcaggtatcaaaggagcaccacagccatatctgttggtaagtataagtattgtttctgatctttgctttgggttttccgtttttgatgcataattttgtagtttcatttcttaagtgcattgtttctgatctttgctttgggttttccttttttgatgcagtggcccctatttgctacgctcatttggcagcttcacagttggggcaatttatgaagtttgaggatgcttcagagacatcatcgagccatggtggggtgactgctccgggagcaatttctgttcctcagcttcccaggttgaaggataatgtcagcagctccatgttcttctgctgaaaaccgttgaaccatctttttgtatagggcttttggattttggctaccaaaaactatttatgctgctttttcaaagtagtctcagacttttgggttgcaacactcttaggtgtttcgtatgttatctgaacttatgaacggttgtctagctaaagctcacttctgcagtggcttttgtggcttttacctgtttggttttatactttgataaatatggttatggtttgctcttttgattataagttttctttttctagtttttttcattagttgagttgaagataaaacgagctctgatttcaaagtaccgtacattttaaattaaaacaggatataaaagaagagaaaagcaatgctttcaaagtagtatacttgcaaaattaaaacaaggaggatcaactttgcttgaaaatttgaatctgagctgactttgttgagcagagaa

SEQ ID NO: 476 - DNA, 7993 bp, Gossypium raimondii
  source 1..7993: mol_type = genomic DNA
taatctaatcgaattttactcacccgtacacacaatacctaatgatattctttgttaaaaataggtgttgcatgcagtggaagctggtgctatttgtttttgatataatcatcaataataaatgataaattcaataaaaataaataaatgatgatatagaaaaagatacttttaataatttttggattaatagaattattaaatatttaaaatttaaaaccattaaactcctctaaaaaagctatcgtagttcgtacaggataaatttggaaataaaaaaattcgtgtaggataattacaacgtacctaatttcctaaaatcccagaaattattgattaaaacaaatgtataaaattctaatatcatccgcacgtgtcatccaaattgtgtcacagccatatccactatcacatttaaactcctcaccataactacgtggtccccacactacttttccctttttacccccaagtgatcgtatgcaagcaatctcaccaatcaacaagatcaaatcaaagccgtcaatacttgatctaacgctgtatgttcgtctaaatccacgtctttgatgatacactcactgcaacgaaattcaattttttataaacagaaatcgaaaaaagtcgaaaatattatatcagattttccttctcacattattgagcataaaaaggcaatacattaattaaaaaattatttctgtaacgtttcccctaaaaggttaatgctattttatcttgcattttatattattaaaaaaattaataaagggattttctaatttaggaagattaacatattataaatgcaatgttgataataaatcaataaaatacgagataaaaaagagagatttttgtttgactttccttttaattcatatatttcatgtggtatgattcctattataagatatctaggcatttaataacatataaattgtttttataaattttggttaatgaaattaatatgcgagaaaaatagggaataaaactcattaacaatggtaaacttagtagtctttttctaaaagaaagggcaaagtgtttttttttttttggtataatattgctccgatttaatttatctaaatatagttttaattcttattgatctaaaagtgagagagtggacggtggagatgtggtagagtatggtaatcgtgtaagaccgcgaagcagaggagacggtaaccactaatagagggacagaagaagcgttggtcacttgtgtattttagtctctctcagccttttagtatttagagggagagggagtgagctaaaaaagaagagaaagagggtcgtagaattttgctgtctctttgagttccttagggtttcttgtttcaatttttttttgttttttctctccggatttcaggtatttcctctgaaacctttttattttggattttttttctttgctttttttttcatggttctttgaggttttttttagagtttttttttggagatttttgggctttgttcttcgcaatgctgctacagtgcgtgtgatttttaaaggtttttcttcctttttaagtatgatctgggttccttcttcctgtttttgttcatggatttttttttctgttaaagtttacgttttttttttggttgatgttttttgtttttcttctctatttttttaaaaaactgtagaatgctgtagtttttaggcagcgtaagcatgttttgtcacttcagtagcttttcgttaactttttttatattatttatattttgttttttttatggtttaaaaaagtattttcttgtcactcttcagagttttgaccaaacttctaaaagctgtttagtttttttaggtggttttaaaccatgtttacaagttcttactctctttatttactcttcctttgcaatttctagcctttgctgtctcttggtgtgctaaaggtattagcttttctgcatatctgctttgagtcctacaatgctgatgtatatctggttaaagttatgatttttatgcaaaatcagtatatttgtccactttgttatagccttttatatttgtgcatacattaaaatgccgtcatagtgtacctgagttcaagttcatattaaacgttcccatattgtgtactctgaagaagggaatctttgtccatctataccatttgtgttcatctttctctatttttgactgttgatactcctatatatataaatatataatctttttggtaataggtcctctgatttttcaggtcatgttgtatttgtttatcgtttgtttagtacacatgcctttcctgtgcatgcatgttgtttttccttgttgaacgtttcgtgagaagaaaattttctttatacttgctaatatttattttcatgttggttagggtatggattcgtttgagcaagagggaaatggggcagcgctggaatccctgcctcctccgccacctgtgcctcctgatgttgttccgatcaaagcagaatcggatgcgaagaagattgtacgacaccctatggcaaggcgtggtgttggaactaaagggcagaaggtaactatactcaccaatcacttcaaagtgagcgtggggagtactgatggacacttctaccattacagcgtacgtgattggatttcttctctctatgcttttgtttctattttttgtcagttgttgcttggaaaacattcataattggggaagtactttgtattcggttcaacaggtttctctttcatatgaagatggtcgccctgtggatggtaagggtgttggaaggaaagtgattgacagagtgcatgagacctacaaaaatgatttggatggaaagaattttgcctatgatggtgaaaaaagtttatttactataggtccgctaccaaacaacaagcttgagtttactgttgtacttgaggatgttgcacctaccaggtagaaatgcacttttaatttttagtatctatactgccccaagtcattgttatgtcagctctaacttgggagtgctatcatgtatagaaacaatggaaatgcaagccctgatggccaggacagcccaaatgggcgtgaaagaaagagattaagaagaccgtatcattcaaagacctttaaagtggagattagctatgctgcgaagatacccatgcaagcaattcaaaatgctctgcgtgggcaggaatctgaaaactctcaagaagcactgagggtgctggatatcattttaaggcagcatgctgcgaaacagtgagttaaaatatgtgtctgcatgtttactttttttttgaaatattgaattttggtcctaggtatcatgttaatcttgacattacctactctttctcaggggatgcctacttgttcgccaatctttctttcaagataatcagaacaacttcacagacattggaggaggtgtccttggctgtagaggtttccattcaagtttcagagccactcaaggaggcctttcactaaatatcggtttggaatcctctctctctctctctcgctctgtcagtacttctgcattttgtgctgtggttattgattaataactcttatattttatctttgtcagatgtatcaactaccatgataattcaacctggtccggtagttgattttttacttgcaaatcagaatgctagagatccttactctcttgactggaacaaggtaataaataactgttatttttgtaaatgtagtttgatttcctttgtatcaattattaaattttattttgaaattgctggaaaatcctgaataggcaaaacgggtgctgaagaatctgaggattaaagttagtccgtctaatcaagagtacaagattactggcttgagtgaacaactgtgcaaggatcagttgtatggcttccaaattttatttcactcccttttggttgatttatgctaattgactattttattctgagcttgctgcttgcatcttgtgagtaattatttgtttttgatgagttactgttcccatgttgtaggttctcaatgaagcagaaaaataccaaaaatgaaaatggtgaagctgagacactggagattactatttatgattattttgttaaccatcgcaacatacagttgcgttattctgctgatttgccatgtattaatgttgggaagcctaagaggccaacatatattcctattgaggttatttcctgcactgatttgttttcaatttgttaaattagaaaagttttgtaactaattcttgtctactgtttgttgttcacctgtggcaataatgcagctttgctctttggtgtctttgcaacgctacactaaggcactatccactttccaaagagcttccctggttgaaaaatcgaggcagaagcctcaagaaaggatgaatgttttgtctaatgtaggtctttttttgaagcttttgaattgcgttgtttcacttatgccaaaatttaagtgacacaagtgttgaaaatttatttgcaggttttacgtaccagtaattatggtgctgaaccaatgctgaaatcttgtggtgttaatataaactctaatttcacccaagtggatggacgtattctgccagcaccaagggtaggtgaataatgtccgtgtattgttccttgatagaacaatcatttgtgttagttgtttagactttctttttatattagatcttcctgctaattgagttctcttgattacagttaagagtcggcaacggtgaagatttctttccaaggaatgggcgttggaattttaacaacaaggtcattgctctttttgatttttcagccttctatcctgtatttgttttatccatttatttctttaagagtttatgtatgctttcatagaaattggtggagccatctaggattgaaagatgggctgttgtgaacttctcggctcctcgttgtgatccaaacaacattgcaagggatttgattcgttgtggagaaatgaaaggaattgtaagtcagcatccacttttttatttctgttatggtttgcttgttggcataggaatagctataaaattcaacttgttggctaaagttctttctgttctctctttttcagcgtattgatcccccatttgatatattcaatgagatgaaccagaatagacgcctttcacccgtggttagagttgaaaaaatgtttgaacagatacaatctaaacttcctggagctccgcagttccttctttgtctgcttcctgataggaaaaactctgatctttatggttggcggaatctctcttttcatacattttgtctgcatgtttatcttgaagtgtattacttgcatataaagttcattaaaattttcaagggccatggaagcggaagaatctttctgagtatggcatcgtgactcagtgtatggcaccagctagggtgaatgatcaataccttacaaatcttcttctgaagatcaatgctaaggtttgtttactgttcctatcaaatgggttcttattgctttaagctatttttattgttgcagttctaacttctgtaattatatcagtagctgtatcttcctcttactatgtaaatctggtaatgtcttatctttttattttctcacagcttggaggtcttaattcaatgctaactattgagcaaacaccttcaatccctatgatttcaaaggttccaactatcatccttggaatggatgtatctcatggctctcctgggcagtctgatgtgccgtcaatagctgcggtagagatcttgtttcttattattgaatttcttttgcttccgtctattgaattaataatggaagtcatagaggcttaattgtgcagtctttctgatattcaaattctgcgagttcttttaattgcatttaattgtaggtggttagctccaggcaatggccattgatttcccgctatagggcatcagtccgtacacagtctccgaagcttgaaatggtagattctcttttcaaaccagtttctgacaaagtggatgagggtatcatgaggtgcgtttgaatcatatagttctttggcttctgaagggataaatatttttcaagaaaaacttgaacgactagtttttatttttttgcaaaatatttatgtttttgtatccttttctaatctttaatccttctcttgtttccagttggagtttggtatggattgggttgtaataagaatattgtatatgtttgcatagctaacatgcttttcttttatttcagggaagctctcttagacttctatacaagttcagggaagaggaagcctgatcagatcattattttcaggttttactttttaagattttttgtctcgcacttcaaaaatgacaatatatatgctgaagaatgctttattaggaatatcaagcgtatagattttgctgtttttccggattttctattgcttatctatcttgatttttgtgcactgccatgtctcttgtttgttatttcttgtgagctagtttgtggttaaattgcagtttctgttgagtttcactgatatgcttgtgctgaagtttattacttgctcattacttggtttaaattagggatggggttagcgagtctcagttcaatcaagttttgaacaaagaacttgatcaagttattgaggtatgcagtagttcctttcaatcatttgaactgaaaatttcattgttcttaaatttattcacagcgaagttattttggtagttctaaaatgttacctcaagatctttatcatttggataatacatttctactgtaataggcttgcaagttccttgacgagaattggaaccctaagtttgtggttattgttgcacaaaaaaaccatcataccaagtttttccagcagggatctcctgacaatgtgctacctggttaggcttacccattctttaataaatgtcaggcaggaccactgttgtagtggttaaagcttgtattttttttattgtgcaggtactgtcattgacaacaaagtatgccatccgaagaacaatgatttttacctttgtgctcatgctggaatgatagtaagttcacttatttttgtttctgttaattgatgattgataatacagctgtctcaattttgcagtcattgataacacattatatgatttgtgtttgccgttcaggggaccacaaggccgacccactatcatgttctcttagaccaggttgggttttcagctgatgatctgcaggagcttgttcattctctatcctacgtgtaagtacagaaacaagcgtacagaaacaacttatttttttacaaatagtttaagctgttttcactgtcacaatctttgtattctgtctgttgcaggtatcaaaggagcaccacagccatatctgttggtaagtataagtattgtttctgatctttgctttgggttttccgtttttgatgcataattttgtagtttcatttcttaagtgcattgtttctgatctttgctttgggttttccttttttgatgcagtggcccctatttgctacgctcatttggcagcttcacagttggggcaatttatgaagtttgaggatgcttcagagacatcatcgagccatggtggggtgactgctccgggagcaatttctgttcctcagcttcccaggttgaaggataatgtcagcagctccatgttcttctgctgaaaaccgttgaaccatctttttgtatagggcttttggattttggctaccaaaaactatttatgctgctttttcaaagtagtctcagacttttgggttgcaacactcttaggtgtttcgtatgttatctgaacttatgaacggttgtctagctaaagctcacttctgcagtggcttttgtggcttttacctgtttggttttatactttgataaatatggttatggtttgctcttttgattataagttttctttttctagtttttttcattagttgagttgaagataaaacgagctctgatttcaaagtaccgtacattttaaattaaaacaggatataaaagaagagaaaagcaatg

SEQ ID NO: 477 - DNA, 9115 bp, Gossypium raimondii
  source 1..9115: mol_type = genomic DNA
gaaatggatgattgattcaaactccaccctacttcggtggataaatttaataagaagggaaacaaaattcaccgaatcctatggacgtgataaattctaaaatctagttaaatacgcattcaaagctatattttcttttcggtaccacattcaaagcgtctaattcaggatttcccaaaattacctaccaaataaagaaaatcctaatctcacccacgtgttattgaaatatcgtcacagctataatcactgccgcgttccggattcatgataaatctgtgattctcaaatttcaatgcgcgctgtcaagtaaatatacagtgaaaaaataccggatctccatacccgaggtagtgacaaatccgttggtaccccaaagtggagaggtgttcctatgcggatctcactcaccaactggtcacatcagagacgtccatcattgatcttcgaatgtagtgaaaaatatattattttaagattcttttcatttaacacgttattttcatataatatttacattaattaaataggagttaattgtgtcatacatccccaaattatgaaactcattttaaataggtccctaatttcataacattctaattacatctctgaattattggtattatatcaattaggtccttctattaatgaaatagttaatttaatcattaaaagatatataaaatcttacatgacgcaattaaaaacaaaaatattaaaagaaagtaaagtgttggcacataatttttaaaattaaaaactaaaaataaagtaaaatcgaaaaataaagagagtaaagaaagtttctctaaaagctttaaaaacctcaaaaccaaaatttttacaatattttacctttttaagtttttcatttaatttacatcatataagatctaatgtctcattcaacaattaaattaacaatattagtaacagaccttattgatatgacatcaataatttaggaatttaattataatattttataatttgaggaccaatttaaaatagaaatcataatttaagaatatttgatgcaatttttaaaaattaaatttatctaattagttaacttgttcgtaagaataacttgttatatctcctagacaaaaatataataaaaaaactcacaaggatattgttaattatatatatatatgttttttaattaatgtgtttttttttgctagaataattttaaatttcattttgtgttttttaagggtgcaagatgttatacaatttcacaattaattaatttttttgtaaattcaatatttgaaattaaataaatatattttatcaaattaaatataaaatcttagttaaacaaatgttttttttataaaaaacaaatctttagttaaacgaagatttaaaatatttaacacataaattactataattttgtaattaaaattatgtaaaaaaaaaaacttatgaaagaaaactatttaaaaatgagatggacggtagagatatgtaaaatgtagagtaaaaggtgtaaggcgcgatgtagaggagaaaaacattgtacttaacggagagaccaaaaagagtggcccttaaagtttttatattatttcactgtctttaatttttagtttttcgagtgagaggtaagtaaaaagagggagacacagacgggagccttgaacttcacatttctctttcatgttttagggtttctatccttgttttctctgtaaatttcaggtaaattcctctcaaaacctcttcagtttcagttttctgggcttgtatttttctgatttggtggttttctctgggtttttgaggtaatttaaaaaaattctggatttctttttcaacctttttccgtgcaatgcctgcttcacttggtgtgtttttcttccagtggtttttttccttctttttaactactatctgagtacactaattccctgttttttgcttctagttttaagtcaacgttcaagttcatacgtttttagcttttttccccctctgacgtaactattttttggtcttttttagctactttagtaagctttttcagaatcctgttatttttttttatctaggttttttttttgttataaaaaattttcttctcatttttttgagcgagactattaaaaacctgtaacattttggcttcatttgccacttaatgttaactttggtgtgcctgtatgtgcgtcttaagctcatattcttagatgtgctttattttgcactctgaagggtaatctttttccttttttttaccatttatgctcatttccgggatttttcttgttggtgttccagctgtcttcaagaatacgcttattttgctgcagatcgtctaatttctaggtaatatttgtattcattgtaaatatggctttccgatgcttgcatgttggatttcttagcacattgtaagagaaaaacttcatttttgaactgcatgatcatagtgttttgttgtcatgactttgcttctgtttttgggtgtttgaatgtctgactgttcgcctgttccactctacaaatatagtaagatcttttagccattattcagttcactgaattccctgaatgcatgtttacgtttctcttaaagttattggcttgttatatgtcaagtgtaattgcttctcttttttttttttttcccctttttttctctcttttgttaataataatgaccaatgtgtcaactcaaaaatactatactgttttctgcctgaaatgattatatgatactattccttatcttccttcaaagcggttttcgttcaaagcggtcttccttcaaaatgattatatgaccaatcttggtacttcctagtattttctcttcttcgttgcattacatattgttttctttgttttaggacatggactcgtttgagcaggatggaaatggggcggcacctgactctctgcctccacccccacctgtgcctcctgatgtggtgcctatcaaagcagaacctgaacctgcaaagaagaaggttgtgcgagtcccaatggccaggcgtggtcttggatctaaagggcagaagataactcttctcaccaatcacttcaaagtgaatgttggaagctctgatggacacttcttccattactgtgtatgctatttgattccttcactctatgcttttccattaatagtcctcaggtttttgttaatggtagttattgatgcaagcttcttcttttgtatttggttcaacaggtttctctttattatgaagatggccgtccagttgatggcaagggtgttggaagaaaagtgatagagagggtgcaagagacctatggcaatgaattggctggaaaggactttgcttatgatggggagaaaagtttatttactgttggtgctcttccaaataacaagcatgagtttacagttgtacttgaggatgttacatctaacaggtagacatgctcgtaagactggtttttagtataaattctcccatttattgataattaagttctaaatgtggattgtggaccttctcatttatagaaacaacgggaatgcaagccctgatgtccacgatgactcaaatgggcaagacaggaagagaattaaacggccttatcagtcaaagacctttaaagtggagatcagctttgctgcaaagattcccatgcaagcgattcaaaatgctctgcgtggacaggaatcagaaaactcacaagaggccctaagggtgttggatatcattttacggcagcatgctgcaaaacagtgagttaaaaatatcagcctgtatgtcattttttttccacttaaggttttggtcctggatgttaaatttattctgacattaacttgaattttataggggatgtctactcgttcgccaatcattctttcaaaataatcctgataattttacagacattggaggtggtgtcctgggctgcaggggtttccattctagcttcagagcctctcaagggggcctttccctgaatattggttggaacttggaatcttacctctgactcttatgcatttattactttgtgtttttcttttaattactcaatttatttctattttagatgtctcaactaccatgataattcgtcctggtcctgttgtggactttttgcttgccaatcagaatgctagagatccgtactccctggactggaccaaggtaaccaataaccttctctgtctccaagtgaatttgagttaccttgcatcaattattgaacctttattgcttggttccccctgtataggctaaacgaagccttaagaacctgaggataaaggtcagtccatccaatcaggagtacaagatcactggattgagcgagcagttgtgcaaagatcagttgtatggtttcctgatttcagaccattgctttttcttcaatctgttttaaatcagctagtatttgtttttgtctgatggagtcttgtcttatgcttcagttttaagtaattactttttttatttgttgcatgtttgtgtcctttatgtaggttttcattgaagcagaaaagcatgaagaatgataatggtgaagctgagaatctagagattactgtttatgattattttgtcaaccatcgcaacatacagttgcgctattctgcagacctgccatgcattaatgtcggaaagccaaaacggccgacatatattcctttggaggtgaattcatggactgtgattttgtttgtttatggaatctatgttttgtaactaatacttgtctatggtttgttgggcacctgttgcaatagctctgttccctggtgtctttgcaacgttacaccaaagcgctaaccactttccagagagcttctttggttgaaaaatcaagacagaagcctcaggaaagaatgacagtcttatccagtgtaggtcttttctctaagcttttgactcacttcatatttattgtgctgtaaaatacatgtcaatgagtgttgttgcaaattttgtgcaggctttacagaggagcaactatggtgctgagccaatgctgcgttcttgtggtatttctatcagcactaatttcacccaagtcgaaggtcgtgttctgccagcgccaagggtagagtcatatttggctggattaattctttttttcatccattgatatgtcatgcatttatgttgggtgtttagagttatcctaatgattttggttggatctacattctaatttttctttttgacagttaaaagtggggaatggtgaagatttctttcctcggaacgggagatggaattttaataacaaggtttttgctcccttttgtattgaaactttctattttatatatgtttatctattgtttctcaacagtgtatgcttttgtagaaattagtggagccaactaagattgaaagatgggctgttgtcaacttctctgcacgatgtgatacgaatagccttgtccgggatctgattagatgtggagacatgaaaggaattgtaagtttgaccaagtttttttttttaaattttgttgtgacggttgtcacttggcatatacaaggttataaattgaacttgtgggctaaagttgttttccttgtctctattttagcggatagaccctccatttgatgtgttccaagagtccaatcagaacagacgttgctctcctttggttagagtcgagaaaatgtttgaggatatccaatctaaacttcctggagctccacagtttcttctttgtcttttacctgataggaaaaattctgatctttatggtattcaaaatctcacctgtttgtgcgttaactgtgcttttctttctcttgaagtcttccttgcatctaaaatttgactttttgaaggtccatggaagaagaagaatctttctgagtttggcatagtcactcagtgcatggctccaactagggtcaatgatcagtaccttacaaacctgcttctaaaaatcaatgcaaaggtatgctctcatcaaatttattcttctttattttttgaacttgggaagattaaacactaacctgctaattacctctacgcagcttggaggactgaattccatgctagcaattgagcaaacaccttcaattccagttgtttcaaaggttccaaccatcatccttggaatggatgtgtctcatggctctcctgggcagtccgatattccatcaattgctgcggtagggatgatattgttcaatatctttgtgtttcttgggtttccatcaactgctagctacttgtaatggcagttatggatatgtgattctgcattctgtactctacataactatttcctctcgaggtagcttcttgacctgtacttattttagagttccttttgttgaatttctaggtggtcagctccaggcagtggcctttgatttcccgctatagagcatctgttcgtacacaatctcctaagcttgaaatgatagattctctattcaaaaaagtgtctgacaaggaggatgaaggtatcatgaggtgcgccagcaatgaagttcctttcttttcagatttaatttttacatcttttttctttctttttaatttatttctttttagttaaaaaattatgtgttgctcttgttgaacattcatgtctagcatcttaacttttgggtctagtagtgtttatggttgtgttcctaattaatatttttttaatcacagggaggttctcttggacttttatacaagttcaggaaagaggaagcctgatcaaattatcatattcaggttttgctgtttctcatattcaatctctataaaatataacatattccaactcaaatggagtagtacgttttcaagtaacttgcgaagacaaaattttggtgttcctgtttcttaattcgcattgcttctctgcttgcaaactatttgtatggacttcttagcaattatatatttacctatctaatcatcttttatttgctaaacatgtaacagttatttggggaatattgtatattcaagcatcttttatctgcatggtgtttttgtgctgcttacagattatacaagttgaatgtcctttttgagcttctaatcatcctagaatgtttcttgcttcctgcaatttggaatgcttagatctctatcattctttagcctcgtctacattcctaatttatttctcttgctatatagctttgattgttgtgatattccgtctatcatttgcacatctgtgttgtctaattatgttatgggagtataatacctgccatgtaaaagcatttttgcattttagaattttgttttttttctcataaatgtttgtgtttatgctgcttggttaatctatcatatctgctatgtaaaagtgctttttcatttcagaattgtgtattttatcataaaagcttatggtgcttggttaatctatatatcaaacatatcctgtttttaagggttcttcgctgcaagtttttgttttatcttatgattaatcatgtctctcatgcgttttgttattagctggtttgtgattattgtgctgatgtttctgttacattttattgagatgctgatggaatattgcttccttgctcattattcttggttcaactcagggatggagttagcgagtcacagttcaatcaagtattgaacattgaactggatcaagtaattgaggtatgcagtaagattacattgctggtgataaatcattgtcttaaagatgacagtgattgggataaatcatcagttgttaacgtttctactttataggcttgcaaatttcttgatgagagttggaaccccaagtttgtggtcattgtggcacagaaaaaccatcatactaagtttttccagcagggatctcctgacaatgtcccgcctggtgagtctcagtcatgatttggtgcatgtcatttggtaccttggttatagttttcacaatttatcctgttttcctttatgcaggaaccgttatagacaacaaaatctgtcatcctaagaacaatgacttctatctttgtgcccatgctggaatgattgtaagttcttcgagaatttagttttcttgattactgattctgtagttatgcttttttgtccctttatacgaagttgagtctccttttaaaattgaatcaaggctctgatttctattcttttgacttttttcaataagcttgcagttgaataatcagagaaattgctattctgaaccttgatggcctcctgttccttgtaatgttcatttctttatataatttgtgtttgcttttcagggaaccacgaggcctactcattatcatgttctcttagatcagattgggttttcggctgatgatctgcaggaactagtccactctctgtcgtatgtgtaagtgttcaatcatgtatagtaattgctccgctaatgttttgatctctaaccaatgctggattccttataaactgtctattgcaggtatcaaaggagcaccactgccatatctgtaggtgagaattctgatttagctttgacctctgtttgtgaaagcttccagccagttgtttgatttcgtaattcaattttttctgaagcgattgtttgtgatgttttacggattgctaatatgacaacatgacgtgtgttgtagttgctcctatttgctatgcacatttggcagccgcacaggtgggtacattcatgaagtttgaagatgcctcagagacaaactcgagtcatggtggagttaccgcacctggagccatttctgtccctcagctgccgaggttgaaggagaacgtctgcaattccatgttcttctgctgatcccccatgttttgtataggcttttggttgttaccaaaatgactgaaacgtttttaagttatatgaaagttaaaaaaagtagggttatcattgatgtggtggtggttgaaacatcaccccttttgggtgtttggccctgctgtttgtaggatctatgaaggtatgtttgactagcacttgttaaatggctttcgcctctgtaatacccgtaatcctgtttggtgataatcaatgcatagcctcagctatcgttaacttaaaacctgctttgtatgctgtggaacgtgggatatccatcatataagatgggatttgccctgagttgtatgaaaacagttataaatcaatgaaagcagagcc

SEQ ID NO: 478 - DNA, 8393 bp, Gossypium raimondii; identical to SEQ ID NO: 474
  source 1..8393: mol_type = genomic DNA

SEQ ID NO: 479 - DNA, 8340 bp, Gossypium raimondii; identical to SEQ ID NO: 475
  source 1..8340: mol_type = genomic DNA

SEQ ID NO: 480 - DNA, 7993 bp, Gossypium raimondii; identical to SEQ ID NO: 476
  source 1..7993: mol_type = genomic DNA

SEQ ID NO: 481 - DNA, 9115 bp, Gossypium raimondii; identical to SEQ ID NO: 477
  source 1..9115: mol_type = genomic DNA

SEQ ID NO: 482 - DNA, 9063 bp, Gossypium raimondii
  source 1..9063: mol_type = genomic DNA
aatctcatggaattcgagtttttttgggtcctactctaataatactttggtatgtttattttcagaaagtaacttacaattttgttttgcattttcctatatttgttttatagaaataatttgatcaatcaaaaaaattaagcctattttttttttagaaaatcactttgtgttttgaaaagtattaagtcatttctaaaaaatagtttcttagtaacttgatttttaataaaaaaaaaacttacatgcagtcaagtattattatattaataatattattttaaatttaaaaatattaaaatattaatatcaaatattataattttcaatattattaaacatacatatttaattatttatactcaaccatataataaattattaatataaataatataaattattattttaataaagttatttaatattacaattttttaataataaaatttaacattaataacaattttaaatttgaagtaatattcttaatattttattgaaaatttttatattaatattttactaataaatatttattgcgatttataagtaattttaaataaatttataaatagttagtaatagatgttttataatataaaatataaatatttgttattaatattgcaatttataaatattttactaagcaggatttaaatatatttttaataatttatatttatttttaagctttcttttaattttttagaagtattgtaaaaattttaaaaaattaaaatgatattttagttatagttcagtgaccaaattaataattaatgatttaaattaacgtgccacatgatcatttaatatataaaatttaacagagagactaatttgtatgttttaaaatgtataaaggttaatttgcctattttttttaatagagagccaaaatgcaacctgctcctaagataggactttccctaatacttttattgaattccaagataacataatcactatatgtttttgtcatgagtcgacggactaaaacccatgacaaatacacacaaattatcccgtaaaggtcaactaatcacatgaggctaatttaatccacttaagctgacctgcttcgtgaaacatatagagaagccttggtattcaatgaaacaatctactaaaactagagatacaagataattatagtagattttaaaggataaagatccataaagtttaaatccaattactttgtagtgtccaaacacattccaaatgcagcagaaaccaagggatctgagccgttgatatttgttcatcgttgaacctttctaaccaatcaaaatcaacgatctgatctttttagctataagggttccacagagattgttctacaaccggaatagccgcccttcgtttactccacggaaaagatctaagcagtcaaatcaagttttgttaaatatcaacggtggagatattccaaatatttaaacctaaagtgttttaacatcatatgctaaaagaacccatctttttattgccgctcctataagaattaagaagcaggaaaattactattttaatatttttcccttacaccctccattgtcgctctcttttacttttagtgccaaagacccgactcttcagtaatcctgccttcttcttctgtttttactttgcgggtatgattttccctgctcttttcttttggttcatccttgaatgttgatcatcgtcctaagtcttctctttttcttgcttgctgccatattttgtggtttatgttttcttcttttgaactttcttttcttttctgccgaattttgaactgcattgttgtctaatactctgatattttgtttttgtatgtgttttattttccattacaattgctatttttctttaagttctacctatgttcttctctgtaagcttttgtgtttgtatgttttgtttcttttctcggctaatctcagacatttgttcttattaaaatttcacgttgtttgttaatctgagacattgtagtcgaggaaaagaaaatttttgaaacttgtcttgtgctggactctactatcagtctctcactgtgtttttttttttttttgcttttgctgcttatttcgaggagtcaacgagaaactgttttgatttttttttttgtattttgaattctatttgatggtcaaactttaactcctttcggaagcaatttcttttgacaatgccgtttgattttcgctatgttaaataatcgtcaaagcgattttgactttttattctaaattatatatttccgtttcttaagattttgattattttgttaatccgtgctaaacaaccctaatcaggaaaaatatttcattgagagaagctttttatttgttgtaattgcataaaataagcagtatttctctgctcttggtttcctttttttttttttcaccccttagtacatgtcctccattgttagagtccagagcaactgatttcgagtactggcttttttttcctattcggaaaaatattatcgcgttttatttttaaagtcgagcctatgttgcttagatttttcttgaagtacccgtttctggtcatgggtatgggatacggccttctaactattctccaaataaatgaaaaacttagaagaaatcaagcatgccatgttgtactcatacccatatttgacactcacaaataagtagtatagagtggagctatttaatatcaaaaagaaaagtgtataattttctgctacaactttagcatttgaatttttgctctctaaggatagttatgtaagttgcctgtttggaattttatctcctcatcctttcaagtttattttgctttgtattaacaatataggattctttttcaaaataaattccaaaatttaataatagccttctccttggaaaattttatgtaagattttatgttggtcatcacctgtgtctaatcttatatgctggttctgataacttgtaatcttggacaactagtaactcatatactgtgtttttcatttattttattctattttattgcagttttttgtctttaattttcctatttgtttttcactgaaggagaaattttttgttgtggatttcttctttgacaattgtacattttagttgtttacatgttcactgtacttgcaattagtggtgatacttaatgctatcaatctagtactaatgtccttactgattgatttcaagatggagaaagcaagtactgaagaggcactagaattaccatctctgcccctaccactgccaacaataccatccaatgtgaagctagagagcttgaagcctcccaagtattctattgtcagtaggagagaagttgggacgagtggacgaaagatatccctgcttgccaaccacttcaaagtttctgtcaatgccccagatgctgtattttaccagtatactgtaggttattttgtctccattctgtttctttctggaagttcactttaaggatgaatatttaccaaaatatgatttgcaggttacagttttgtcagaagatagtagagttgttgaaagcaagaggattgggagaaaacttgttgataaactttatcaaacatactcttcggaacttgctggaaaaagatttgcctatgatggggaaaagagtttgtatacagtgggtcctttgccacagaacaagtttgaatttacaatagtgctagaagactcatttgcaaaatggtatattcttctactccttactggatttagattttgtatatgttagaatctagatgttataacttttttgtcacaatagctcactgtctggttgtgaaaccaggagtcctgatgctgatggaggccctgctgagactggcaagaggacaaagcgttcttttcagtcaaagacttacaaagtggaactaagctattctgctaagatacccttgaagtcaatatctcttgccctcaaaggagttcagtcagatgatagcactcaggatgctttgagagtacttgacatcattctaaggcagcaagctgctgatcggtatttaattttcttattcttttttggttcaagacttaaccattttcacagaaccatatgtgtacccctggatatctgtatgtattgcttgtcccgtcttattttagtgacggtgttggttttcagaggttgccttttggtgagacaatcattctttcaagatgattcaaggaattatgttgatttgggaggaggggtattgggtctgcggggcttccattccagttttcgtcccactcaggggggcttgtctttgaatatgggtatatttttattcattctatcataactttgatcctaaaacttttttattcttttcatcatgttttctctttaaacctttgttgcagatgtatctacaacaatgattttaaggcctggaccagtatttgagtttctaaaacaaaacctgaatctaaatgatgaacgtttctggctgaaagtaaggaactcaaaaaccaaaaatcttaattactttatgtcctgaaaactaaacttataaattctacaggccagacgaatgttgaagaatatgaggattaaaacaagacaccgtaacatggaattcaaaatcactggtctaagtgagaagccctgttgtgagctattgtatgtgctcatttgctggggatttttcctttcataacttctatttgagttctttctccagaaagaattttaattctggttgtatttgtctttaatttcttctagcttcccaatgaaagttaaaaatggtggttgtggtgaagtccggactgttgagatcacagtgtatgagtatttcaccaaacactgtggaattgaactcacatattctgcagacatgccatgccttgatgttggtaaaccaaaacgtcctaactatttacccctagaggtcagtcaatttttttattcttcataagcatagtgttcattacacaatacactgttatcagacatgtctatcctaacatttaattttatggtgttctagctctgttcacttgtttcacttcagcggtacacaaaagcgttaactacaaatcaaagggcgaccctggttgaaagatccaggcaaaagcctcgggaaagaattcaaattctgactgatgtatgtttctttgtccttatggctataaccatatttgttattttgtcttcactactagaattttttgcttctttaacctggcaggctttgaaaaacaacaaattcaatgagaaccctgtactttctgcatgtgaaatttcaataggtaggcaattgacagaagttgagggtcggatcctggagactccaagggtatgtgttgttgcctctttgtcaagagaaagagagagctagagagttttacctcaatttaactgtttagtgggttcatcgtaacacatctctattgtcattaacagttgaaggttgggaatcacgaggattgcatccctcgaaatggtagatggaactataacaacaaggtagtggtgatagagggtttttgttcatcccaatcttttatgttatagtatactgtgttggtcccaatcttaattgattgcaactctttgcttcagagtttgtctcttatctagtttccatctcatagcatttgatacaacagtttattttcacatatatatattccttccatccctttgcagagatttctggatccaaagaaaattgaacgttggattgctgtcaacttctctgctcgctgtgatctcagtcaaatttcaagggatttaatcagttgtgcaagaaacaagggcattgtaggttattccacattttggctgtcgtcatggtgctatatgacttgttggtataactgtcttcttatacaaatgtattcatacatgaaggaaatggaacgtccgcacacattgattgaggaggaacggcatcaagctgctaaagctggccctgctgctagagtggaagcaatgtttgatcagattatagcaaagcttcctggcccccctgagttcattctttgtgtcttgccagtgagaaaaaactctgatatatatggtatggcttttcctgttgatttcttttcttatttggctagtcaactgacattttccatgctctgtcaaggaccttggaagaaaaaatgtctttgcgatatgggaattgccacacaatgcattagccctggaaaaattaatgaccaatacctcacaaatgtcctccttaaaatcaattcaaaggtaaaatcttaaagcaatgcattttccctgaaaaaaaaagaattgttttaacttttatgttgatctacacctcagatgtactatgatattaccttgtctttcttctgtatagcttggaggaatcaactctttattggaaatagagaaaccttcaatcctcccattgctgaaggatactcctacattgattttgggaatggatgtctctcatgggtcccctggtcgatcagatgtcccatcaatagctgcagtaatttctgaatatttgaacgcattataattattcccctaattttgtgaggatacatccaactgtttaaacctactgtatatatcaggttgttggttcgctccattggcctttgatttcaaggtacagagcatctgtgagaacacaatctccaaagatggagatgattgaagctttatataagccatcaccagacggaaaggttgatgatggtattatcaggtagtttagtaaaactatatccagaactccatgtgtgctgattgctctgttttacctttaagggctttgaaattgattatttaagtataatttcatggtatattataatattataattttatttttcacatgatttcaaagaattctgttcttgttctgtcacaaacaagatccagaagaatatttcagtcagtgaaatcaacattttttgccccatatctgaagttatttcctatgtacttttatttaattttgaatgccagaatgggtagtcttacaatgcattaaaatgcatttttcatttgttatgttgtttgatgtgccactgacgtgcataacttctattatgatacgttgagttgatacaaacaagattgcttgtaaccttggctcttttggtgctgtaaaattaaaatgctggatatgatttgagatttattcatatgaaaatttgagtatgttttttgtgttgcaagggaactgcttgttgatttctataaaacgagcggtaatcgcaaaccaaaacaaattatcatcttcaggtatgtacacttgtgtttgtggatttctgcatattttattacattatggctctaataggagttaaatatttcccctcactggttttctgagcttgttcagtggtcagcaatttgctttttaagatgtgaaagaaaaaatggaagtaattatttctgttttcttgtatgaaccaatcatacactctttacaatggttggttgaacaatttaattcatcacttaaataattagttttgatgattttcttagggatggagtaagtgaatcacagtttaaccaagtattaaacattgagctggagcaaatcatcaaggtacattctggactatggtttatctttttcatcacaatataaccatcatctccctgagtaagggctatgggtcagcatattaattgatgtttctagaaggctgttagaagtgcctttctactgctttcttgtccataacatttttatgttacaagatcctgcgaagggttagttgagggcctcatattttcttgataatagtcaattcttagatagttaaacatcctttgcgcagtcatatcagtttctgggcgagtctgatgttcccaagttcacagtagtcgttgctcagaagaatcatcatacaaaattattccaagctaatgcccctgaaaatgttccaccaggtttgcttctgatatttcattttcctctctagtttattaatttgttggttcactctctcgctttcctctgcagggacagtagtggacacaaaaattgtgcatccgagaaactatgatttctacatgtctgctcatgcagggatgatcgtaagtgttttactgttactatcaaaattttttgttcaatcttgagacattatgaagcagcagtgttgttttttgcttctgaataatatatgcatacatgtgaataagatcctccgttgcattgtttcaaatctaacagggaacatctaggccagctcattatcatgtcttgcttgatgagataggtttctctcctaatgacctgcagaatcttatccactgtctttcctatgtgtaagttgtgaataagctccatctgccatctctaacatcgtaggaagtagcaggcatttttaatcaattacattttgccaaatgcagataccaaaggagcacagcagcagtctcaataggtaattttccccttatcctacaccctgttcatgtttagcaagtcatttgtatcagtcgcattaatatttcataaacctgggttgtatttcatatccagtggctcctatttgttatgctcaccttgcggcatatcagatgggccaatttttgaagctggatgaactttcagaaacatcttcaggaaacgtaacatccacaggaagtatccttgtgccagaccttccgaggctgaaaaagaatgtggcaagtacaatgttcttctgttgaggggatcacccatttcagtaaatacatgctaggctaactgtagatagtttgggtaggctaggggtatacaaagcatacaactccaggcttttgcttttgtgattgattattgaggctggctggctttaacaagcaaaagtttttgtttaaaccatgactaggttatgttgaggggttaggagccattataagaaaagcttaggtgtatcttatatttgtttcatattttactttagtcaaaatcctgctattgctcagaagcttcattcagatagaaaaagctttttttccgtttcttctacttttctttgagcttttagaatccatatttaaagtgtgaatacaagaaaatgtttgatttgagctgggggtgttaggagtaagtattcagaagtgaaaaaattgagttgagtctta

SEQ ID NO: 483 - DNA, 7385 bp, Gossypium raimondii
  source 1..7385: mol_type = genomic DNA
tcatccttgaatgttgatcatcgtcctaagtcttctctttttcttgcttgctgccatattttgtggtttatgttttcttcttttgaactttcttttcttttctgccgaattttgaactgcattgttgtctaatactctgatattttgtttttgtatgtgttttattttccattacaattgctatttttctttaagttctacctatgttcttctctgtaagcttttgtgtttgtatgttttgtttcttttctcggctaatctcagacatttgttcttattaaaatttcacgttgtttgttaatctgagacattgtagtcgaggaaaagaaaatttttgaaacttgtcttgtgctggactctactatcagtctctcactgtgtttttttttttttttgcttttgctgcttatttcgaggagtcaacgagaaactgttttgatttttttttttgtattttgaattctatttgatggtcaaactttaactcctttcggaagcaatttcttttgacaatgccgtttgattttcgctatgttaaataatcgtcaaagcgattttgactttttattctaaattatatatttccgtttcttaagattttgattattttgttaatccgtgctaaacaaccctaatcaggaaaaatatttcattgagagaagctttttatttgttgtaattgcataaaataagcagtatttctctgctcttggtttcctttttttttttttcaccccttagtacatgtcctccattgttagagtccagagcaactgatttcgagtactggcttttttttcctattcggaaaaatattatcgcgttttatttttaaagtcgagcctatgttgcttagatttttcttgaagtacccgtttctggtcatgggtatgggatacggccttctaactattctccaaataaatgaaaaacttagaagaaatcaagcatgccatgttgtactcatacccatatttgacactcacaaataagtagtatagagtggagctatttaatatcaaaaagaaaagtgtataattttctgctacaactttagcatttgaatttttgctctctaaggatagttatgtaagttgcctgtttggaattttatctcctcatcctttcaagtttattttgctttgtattaacaatataggattctttttcaaaataaattccaaaatttaataatagccttctccttggaaaattttatgtaagattttatgttggtcatcacctgtgtctaatcttatatgctggttctgataacttgtaatcttggacaactagtaactcatatactgtgtttttcatttattttattctattttattgcagttttttgtctttaattttcctatttgtttttcactgaaggagaaattttttgttgtggatttcttctttgacaattgtacattttagttgtttacatgttcactgtacttgcaattagtggtgatacttaatgctatcaatctagtactaatgtccttactgattgatttcaagatggagaaagcaagtactgaagaggcactagaattaccatctctgcccctaccactgccaacaataccatccaatgtgaagctagagagcttgaagcctcccaagtattctattgtcagtaggagagaagttgggacgagtggacgaaagatatccctgcttgccaaccacttcaaagtttctgtcaatgccccagatgctgtattttaccagtatactgtaggttattttgtctccattctgtttctttctggaagttcactttaaggatgaatatttaccaaaatatgatttgcaggttacagttttgtcagaagatagtagagttgttgaaagcaagaggattgggagaaaacttgttgataaactttatcaaacatactcttcggaacttgctggaaaaagatttgcctatgatggggaaaagagtttgtatacagtgggtcctttgccacagaacaagtttgaatttacaatagtgctagaagactcatttgcaaaatggtatattcttctactccttactggatttagattttgtatatgttagaatctagatgttataacttttttgtcacaatagctcactgtctggttgtgaaaccaggagtcctgatgctgatggaggccctgctgagactggcaagaggacaaagcgttcttttcagtcaaagacttacaaagtggaactaagctattctgctaagatacccttgaagtcaatatctcttgccctcaaaggagttcagtcagatgatagcactcaggatgctttgagagtacttgacatcattctaaggcagcaagctgctgatcggtatttaattttcttattcttttttggttcaagacttaaccattttcacagaaccatatgtgtacccctggatatctgtatgtattgcttgtcccgtcttattttagtgacggtgttggttttcagaggttgccttttggtgagacaatcattctttcaagatgattcaaggaattatgttgatttgggaggaggggtattgggtctgcggggcttccattccagttttcgtcccactcaggggggcttgtctttgaatatgggtatatttttattcattctatcataactttgatcctaaaacttttttattcttttcatcatgttttctctttaaacctttgttgcagatgtatctacaacaatgattttaaggcctggaccagtatttgagtttctaaaacaaaacctgaatctaaatgatgaacgtttctggctgaaagtaaggaactcaaaaaccaaaaatcttaattactttatgtcctgaaaactaaacttataaattctacaggccagacgaatgttgaagaatatgaggattaaaacaagacaccgtaacatggaattcaaaatcactggtctaagtgagaagccctgttgtgagctattgtatgtgctcatttgctggggatttttcctttcataacttctatttgagttctttctccagaaagaattttaattctggttgtatttgtctttaatttcttctagcttcccaatgaaagttaaaaatggtggttgtggtgaagtccggactgttgagatcacagtgtatgagtatttcaccaaacactgtggaattgaactcacatattctgcagacatgccatgccttgatgttggtaaaccaaaacgtcctaactatttacccctagaggtcagtcaatttttttattcttcataagcatagtgttcattacacaatacactgttatcagacatgtctatcctaacatttaattttatggtgttctagctctgttcacttgtttcacttcagcggtacacaaaagcgttaactacaaatcaaagggcgaccctggttgaaagatccaggcaaaagcctcgggaaagaattcaaattctgactgatgtatgtttctttgtccttatggctataaccatatttgttattttgtcttcactactagaattttttgcttctttaacctggcaggctttgaaaaacaacaaattcaatgagaaccctgtactttctgcatgtgaaatttcaataggtaggcaattgacagaagttgagggtcggatcctggagactccaagggtatgtgttgttgcctctttgtcaagagaaagagagagctagagagttttacctcaatttaactgtttagtgggttcatcgtaacacatctctattgtcattaacagttgaaggttgggaatcacgaggattgcatccctcgaaatggtagatggaactataacaacaaggtagtggtgatagagggtttttgttcatcccaatcttttatgttatagtatactgtgttggtcccaatcttaattgattgcaactctttgcttcagagtttgtctcttatctagtttccatctcatagcatttgatacaacagtttattttcacatatatatattccttccatccctttgcagagatttctggatccaaagaaaattgaacgttggattgctgtcaacttctctgctcgctgtgatctcagtcaaatttcaagggatttaatcagttgtgcaagaaacaagggcattgtaggttattccacattttggctgtcgtcatggtgctatatgacttgttggtataactgtcttcttatacaaatgtattcatacatgaaggaaatggaacgtccgcacacattgattgaggaggaacggcatcaagctgctaaagctggccctgctgctagagtggaagcaatgtttgatcagattatagcaaagcttcctggcccccctgagttcattctttgtgtcttgccagtgagaaaaaactctgatatatatggtatggcttttcctgttgatttcttttcttatttggctagtcaactgacattttccatgctctgtcaaggaccttggaagaaaaaatgtctttgcgatatgggaattgccacacaatgcattagccctggaaaaattaatgaccaatacctcacaaatgtcctccttaaaatcaattcaaaggtaaaatcttaaagcaatgcattttccctgaaaaaaaaagaattgttttaacttttatgttgatctacacctcagatgtactatgatattaccttgtctttcttctgtatagcttggaggaatcaactctttattggaaatagagaaaccttcaatcctcccattgctgaaggatactcctacattgattttgggaatggatgtctctcatgggtcccctggtcgatcagatgtcccatcaatagctgcagtaatttctgaatatttgaacgcattataattattcccctaattttgtgaggatacatccaactgtttaaacctactgtatatatcaggttgttggttcgctccattggcctttgatttcaaggtacagagcatctgtgagaacacaatctccaaagatggagatgattgaagctttatataagccatcaccagacggaaaggttgatgatggtattatcaggtagtttagtaaaactatatccagaactccatgtgtgctgattgctctgttttacctttaagggctttgaaattgattatttaagtataatttcatggtatattataatattataattttatttttcacatgatttcaaagaattctgttcttgttctgtcacaaacaagatccagaagaatatttcagtcagtgaaatcaacattttttgccccatatctgaagttatttcctatgtacttttatttaattttgaatgccagaatgggtagtcttacaatgcattaaaatgcatttttcatttgttatgttgtttgatgtgccactgacgtgcataacttctattatgatacgttgagttgatacaaacaagattgcttgtaaccttggctcttttggtgctgtaaaattaaaatgctggatatgatttgagatttattcatatgaaaatttgagtatgttttttgtgttgcaagggaactgcttgttgatttctataaaacgagcggtaatcgcaaaccaaaacaaattatcatcttcaggtatgtacacttgtgtttgtggatttctgcatattttattacattatggctctaataggagttaaatatttcccctcactggttttctgagcttgttcagtggtcagcaatttgctttttaagatgtgaaagaaaaaatggaagtaattatttctgttttcttgtatgaaccaatcatacactctttacaatggttggttgaacaatttaattcatcacttaaataattagttttgatgattttcttagggatggagtaagtgaatcacagtttaaccaagtattaaacattgagctggagcaaatcatcaaggtacattctggactatggtttatctttttcatcacaatataaccatcatctccctgagtaagggctatgggtcagcatattaattgatgtttctagaaggctgttagaagtgcctttctactgctttcttgtccataacatttttatgttacaagatcctgcgaagggttagttgagggcctcatattttcttgataatagtcaattcttagatagttaaacatcctttgcgcagtcatatcagtttctgggcgagtctgatgttcccaagttcacagtagtcgttgctcagaagaatcatcatacaaaattattccaagctaatgcccctgaaaatgttccaccaggtttgcttctgatatttcattttcctctctagtttattaatttgttggttcactctctcgctttcctctgcagggacagtagtggacacaaaaattgtgcatccgagaaactatgatttctacatgtctgctcatgcagggatgatcgtaagtgttttactgttactatcaaaattttttgttcaatcttgagacattatgaagcagcagtgttgttttttgcttctgaataatatatgcatacatgtgaataagatcctccgttgcattgtttcaaatctaacagggaacatctaggccagctcattatcatgtcttgcttgatgagataggtttctctcctaatgacctgcagaatcttatccactgtctttcctatgtgtaagttgtgaataagctccatctgccatctctaacatcgtaggaagtagcaggcatttttaatcaattacattttgccaaatgcagataccaaaggagcacagcagcagtctcaataggtaattttccccttatcctacaccctgttcatgtttagcaagtcatttgtatcagtcgcattaatatttcataaacctgggttgtatttcatatccagtggctcctatttgttatgctcaccttgcggcatatcagatgggccaatttttgaagctggatgaactttcagaaacatcttcaggaaacgtaacatccacaggaagtatccttgtgccagaccttccgaggctgaaaaagaatgtggcaagtacaatgttcttctgttgaggggatcacccatttcagtaaatacatgctaggctaactgtagatagtttgggtaggctaggggtatacaaagcatacaactccaggcttttgcttttgtgattgattattgaggctggctggctttaacaagcaaaagtttttgtttaaaccatgactaggttatgttgaggggttaggagccattataagaaaagcttaggtgtatcttatatttgtttcatattttactttagtcaaaatcctgctattgctcagaagcttcattcagatagaaaaagctttttttccgtttcttctacttttctttgagcttttagaatccatatttaaagtgtgaatacaagaaaatgtttgatttgagctgggggtgttaggagtaagtattcagaagtgaaaaaattgagttgag

SEQ ID NO: 484 - DNA, 8685 bp, Gossypium raimondii
  source 1..8685: mol_type = genomic DNA
atatttgttttatagaaataatttgatcaatcaaaaaaattaagcctattttttttttagaaaatcactttgtgttttgaaaagtattaagtcatttctaaaaaatagtttcttagtaacttgatttttaataaaaaaaaaacttacatgcagtcaagtattattatattaataatattattttaaatttaaaaatattaaaatattaatatcaaatattataattttcaatattattaaacatacatatttaattatttatactcaaccatataataaattattaatataaataatataaattattattttaataaagttatttaatattacaattttttaataataaaatttaacattaataacaattttaaatttgaagtaatattcttaatattttattgaaaatttttatattaatattttactaataaatatttattgcgatttataagtaattttaaataaatttataaatagttagtaatagatgttttataatataaaatataaatatttgttattaatattgcaatttataaatattttactaagcaggatttaaatatatttttaataatttatatttatttttaagctttcttttaattttttagaagtattgtaaaaattttaaaaaattaaaatgatattttagttatagttcagtgaccaaattaataattaatgatttaaattaacgtgccacatgatcatttaatatataaaatttaacagagagactaatttgtatgttttaaaatgtataaaggttaatttgcctattttttttaatagagagccaaaatgcaacctgctcctaagataggactttccctaatacttttattgaattccaagataacataatcactatatgtttttgtcatgagtcgacggactaaaacccatgacaaatacacacaaattatcccgtaaaggtcaactaatcacatgaggctaatttaatccacttaagctgacctgcttcgtgaaacatatagagaagccttggtattcaatgaaacaatctactaaaactagagatacaagataattatagtagattttaaaggataaagatccataaagtttaaatccaattactttgtagtgtccaaacacattccaaatgcagcagaaaccaagggatctgagccgttgatatttgttcatcgttgaacctttctaaccaatcaaaatcaacgatctgatctttttagctataagggttccacagagattgttctacaaccggaatagccgcccttcgtttactccacggaaaagatctaagcagtcaaatcaagttttgttaaatatcaacggtggagatattccaaatatttaaacctaaagtgttttaacatcatatgctaaaagaacccatctttttattgccgctcctataagaattaagaagcaggaaaattactattttaatatttttcccttacaccctccattgtcgctctcttttacttttagtgccaaagacccgactcttcagtaatcctgccttcttcttctgtttttactttgcgggtatgattttccctgctcttttcttttggttcatccttgaatgttgatcatcgtcctaagtcttctctttttcttgcttgctgccatattttgtggtttatgttttcttcttttgaactttcttttcttttctgccgaattttgaactgcattgttgtctaatactctgatattttgtttttgtatgtgttttattttccattacaattgctatttttctttaagttctacctatgttcttctctgtaagcttttgtgtttgtatgttttgtttcttttctcggctaatctcagacatttgttcttattaaaatttcacgttgtttgttaatctgagacattgtagtcgaggaaaagaaaatttttgaaacttgtcttgtgctggactctactatcagtctctcactgtgtttttttttttttttgcttttgctgcttatttcgaggagtcaacgagaaactgttttgatttttttttttgtattttgaattctatttgatggtcaaactttaactcctttcggaagcaatttcttttgacaatgccgtttgattttcgctatgttaaataatcgtcaaagcgattttgactttttattctaaattatatatttccgtttcttaagattttgattattttgttaatccgtgctaaacaaccctaatcaggaaaaatatttcattgagagaagctttttatttgttgtaattgcataaaataagcagtatttctctgctcttggtttcctttttttttttttcaccccttagtacatgtcctccattgttagagtccagagcaactgatttcgagtactggcttttttttcctattcggaaaaatattatcgcgttttatttttaaagtcgagcctatgttgcttagatttttcttgaagtacccgtttctggtcatgggtatgggatacggccttctaactattctccaaataaatgaaaaacttagaagaaatcaagcatgccatgttgtactcatacccatatttgacactcacaaataagtagtatagagtggagctatttaatatcaaaaagaaaagtgtataattttctgctacaactttagcatttgaatttttgctctctaaggatagttatgtaagttgcctgtttggaattttatctcctcatcctttcaagtttattttgctttgtattaacaatataggattctttttcaaaataaattccaaaatttaataatagccttctccttggaaaattttatgtaagattttatgttggtcatcacctgtgtctaatcttatatgctggttctgataacttgtaatcttggacaactagtaactcatatactgtgtttttcatttattttattctattttattgcagttttttgtctttaattttcctatttgtttttcactgaaggagaaattttttgttgtggatttcttctttgacaattgtacattttagttgtttacatgttcactgtacttgcaattagtggtgatacttaatgctatcaatctagtactaatgtccttactgattgatttcaagatggagaaagcaagtactgaagaggcactagaattaccatctctgcccctaccactgccaacaataccatccaatgtgaagctagagagcttgaagcctcccaagtattctattgtcagtaggagagaagttgggacgagtggacgaaagatatccctgcttgccaaccacttcaaagtttctgtcaatgccccagatgctgtattttaccagtatactgtaggttattttgtctccattctgtttctttctggaagttcactttaaggatgaatatttaccaaaatatgatttgcaggttacagttttgtcagaagatagtagagttgttgaaagcaagaggattgggagaaaacttgttgataaactttatcaaacatactcttcggaacttgctggaaaaagatttgcctatgatggggaaaagagtttgtatacagtgggtcctttgccacagaacaagtttgaatttacaatagtgctagaagactcatttgcaaaatggtatattcttctactccttactggatttagattttgtatatgttagaatctagatgttataacttttttgtcacaatagctcactgtctggttgtgaaaccaggagtcctgatgctgatggaggccctgctgagactggcaagaggacaaagcgttcttttcagtcaaagacttacaaagtggaactaagctattctgctaagatacccttgaagtcaatatctcttgccctcaaaggagttcagtcagatgatagcactcaggatgctttgagagtacttgacatcattctaaggcagcaagctgctgatcggtatttaattttcttattcttttttggttcaagacttaaccattttcacagaaccatatgtgtacccctggatatctgtatgtattgcttgtcccgtcttattttagtgacggtgttggttttcagaggttgccttttggtgagacaatcattctttcaagatgattcaaggaattatgttgatttgggaggaggggtattgggtctgcggggcttccattccagttttcgtcccactcaggggggcttgtctttgaatatgggtatatttttattcattctatcataactttgatcctaaaacttttttattcttttcatcatgttttctctttaaacctttgttgcagatgtatctacaacaatgattttaaggcctggaccagtatttgagtttctaaaacaaaacctgaatctaaatgatgaacgtttctggctgaaagtaaggaactcaaaaaccaaaaatcttaattactttatgtcctgaaaactaaacttataaattctacaggccagacgaatgttgaagaatatgaggattaaaacaagacaccgtaacatggaattcaaaatcactggtctaagtgagaagccctgttgtgagctattgtatgtgctcatttgctggggatttttcctttcataacttctatttgagttctttctccagaaagaattttaattctggttgtatttgtctttaatttcttctagcttcccaatgaaagttaaaaatggtggttgtggtgaagtccggactgttgagatcacagtgtatgagtatttcaccaaacactgtggaattgaactcacatattctgcagacatgccatgccttgatgttggtaaaccaaaacgtcctaactatttacccctagaggtcagtcaatttttttattcttcataagcatagtgttcattacacaatacactgttatcagacatgtctatcctaacatttaattttatggtgttctagctctgttcacttgtttcacttcagcggtacacaaaagcgttaactacaaatcaaagggcgaccctggttgaaagatccaggcaaaagcctcgggaaagaattcaaattctgactgatgtatgtttctttgtccttatggctataaccatatttgttattttgtcttcactactagaattttttgcttctttaacctggcaggctttgaaaaacaacaaattcaatgagaaccctgtactttctgcatgtgaaatttcaataggtaggcaattgacagaagttgagggtcggatcctggagactccaagggtatgtgttgttgcctctttgtcaagagaaagagagagctagagagttttacctcaatttaactgtttagtgggttcatcgtaacacatctctattgtcattaacagttgaaggttgggaatcacgaggattgcatccctcgaaatggtagatggaactataacaacaaggtagtggtgatagagggtttttgttcatcccaatcttttatgttatagtatactgtgttggtcccaatcttaattgattgcaactctttgcttcagagtttgtctcttatctagtttccatctcatagcatttgatacaacagtttattttcacatatatatattccttccatccctttgcagagatttctggatccaaagaaaattgaacgttggattgctgtcaacttctctgctcgctgtgatctcagtcaaatttcaagggatttaatcagttgtgcaagaaacaagggcattgtaggttattccacattttggctgtcgtcatggtgctatatgacttgttggtataactgtcttcttatacaaatgtattcatacatgaaggaaatggaacgtccgcacacattgattgaggaggaacggcatcaagctgctaaagctggccctgctgctagagtggaagcaatgtttgatcagattatagcaaagcttcctggcccccctgagttcattctttgtgtcttgccagtgagaaaaaactctgatatatatggtatggcttttcctgttgatttcttttcttatttggctagtcaactgacattttccatgctctgtcaaggaccttggaagaaaaaatgtctttgcgatatgggaattgccacacaatgcattagccctggaaaaattaatgaccaatacctcacaaatgtcctccttaaaatcaattcaaaggtaaaatcttaaagcaatgcattttccctgaaaaaaaaagaattgttttaacttttatgttgatctacacctcagatgtactatgatattaccttgtctttcttctgtatagcttggaggaatcaactctttattggaaatagagaaaccttcaatcctcccattgctgaaggatactcctacattgattttgggaatggatgtctctcatgggtcccctggtcgatcagatgtcccatcaatagctgcagtaatttctgaatatttgaacgcattataattattcccctaattttgtgaggatacatccaactgtttaaacctactgtatatatcaggttgttggttcgctccattggcctttgatttcaaggtacagagcatctgtgagaacacaatctccaaagatggagatgattgaagctttatataagccatcaccagacggaaaggttgatgatggtattatcaggtagtttagtaaaactatatccagaactccatgtgtgctgattgctctgttttacctttaagggctttgaaattgattatttaagtataatttcatggtatattataatattataattttatttttcacatgatttcaaagaattctgttcttgttctgtcacaaacaagatccagaagaatatttcagtcagtgaaatcaacattttttgccccatatctgaagttatttcctatgtacttttatttaattttgaatgccagaatgggtagtcttacaatgcattaaaatgcatttttcatttgttatgttgtttgatgtgccactgacgtgcataacttctattatgatacgttgagttgatacaaacaagattgcttgtaaccttggctcttttggtgctgtaaaattaaaatgctggatatgatttgagatttattcatatgaaaatttgagtatgttttttgtgttgcaagggaactgcttgttgatttctataaaacgagcggtaatcgcaaaccaaaacaaattatcatcttcaggtatgtacacttgtgtttgtggatttctgcatattttattacattatggctctaataggagttaaatatttcccctcactggttttctgagcttgttcagtggtcagcaatttgctttttaagatgtgaaagaaaaaatggaagtaattatttctgttttcttgtatgaaccaatcatacactctttacaatggttggttgaacaatttaattcatcacttaaataattagttttgatgattttcttagggatggagtaagtgaatcacagtttaaccaagtattaaacattgagctggagcaaatcatcaaggtacattctggactatggtttatctttttcatcacaatataaccatcatctccctgagtaagggctatgggtcagcatattaattgatgtttctagaaggctgttagaagtgcctttctactgctttcttgtccataacatttttatgttacaagatcctgcgaagggttagttgagggcctcatattttcttgataatagtcaattcttagatagttaaacatcctttgcgcagtcatatcagtttctgggcgagtctgatgttcccaagttcacagtagtcgttgctcagaagaatcatcatacaaaattattccaagctaatgcccctgaaaatgttccaccaggtttgcttctgatatttcattttcctctctagtttattaatttgttggttcactctctcgctttcctctgcagggacagtagtggacacaaaaattgtgcatccgagaaactatgatttctacatgtctgctcatgcagggatgatcgtaagtgttttactgttactatcaaaattttttgttcaatcttgagacattatgaagcagcagtgttgttttttgcttctgaataatatatgcatacatgtgaataagatcctccgttgcattgtttcaaatctaacagggaacatctaggccagctcattatcatgtcttgcttgatgagataggtttctctcctaatgacctgcagaatcttatccactgtctttcctatgtgtaagttgtgaataagctccatctgccatctctaacatcgtaggaagtagcaggcatttttaatcaattacattttgccaaatgcagataccaaaggagcacagcagcagtctcaataggtaattttccccttatcctacaccctgttcatgtttagcaagtcatttgtatcagtcgcattaatatttcataaacctgggttgtatttcatatccagtggctcctatttgttatgctcaccttgcggcatatcagatgggccaatttttgaagctggatgaactttcagaaacatcttcaggaaacgtaacatccacaggaagtatccttgtgccagaccttccgaggctgaaaaagaatgtggcaagtacaatgttcttctgttgaggggatcacccatttcagtaaatacatgctaggctaactgtagatagtttgggtaggctaggggtatacaaagcatacaactccaggcttttgcttttgtgattgattattgaggctggctggctttaacaagcaaa

SEQ ID NO: 485 - DNA, 9001 bp, Gossypium raimondii
  source 1..9001: mol_type = genomic DNA
acgcccaaaagtgaggattctttaaaactcccccaaaacatcaatttgtatagcggaagcgattgtgccaaaagaaattacaagtgaacaacaaaaagtcaaataaaagaatgcacacaaagtgtttgagtaaatgctcagagaattctattactcttaagaattcagcttacaatggatgagtacaaatgagggggatgctctctatttatagttgagctccccaaaatctatggtcaagatacatttacatcgacagacgagattaaccatatcccttgattttagtgatttacaagatatgtcatatcaaatctaacataatctttacaatatatgattccctctatattctaagattagttaccaaaattagtttaagttgccatgtcttcattatcgggccaaccaggctttaatctgacagacttctccaacaattccttgaatcgggccagttctcgtggattaaatgttccccatctaatcgatagacctccatagggcgcatcttgtgccatggtcacgggctttgcactttggctcgtgacactagcacccccaatttttttttaatattgatataaatatataccagtatgatacgatttgaaaaaaatatatgggtgtcggccatctagtgttcggaatcccaaaaattattttttaacagaaaaaatacataggtgccgaccatctaatcccataacctaattttactgttcatttcagctcatttaggtgattatttttgaataatgatcatttatgtaaataattatttttttgaagtcatttgggtaaaatagccatattgtacacaaataacattttataatattatactattacttacaaaatataatttatttaagtattaattaaattaaatatattatataaattttttaattttataaataaacgcgtatatccatgtgcaatgcatgaggccagaaaaactagttactataataaattagagtaattaatatttttacaagtctttatttcaaccacattttgaatgtgtcaaattaaaaagtttatgggagaaatatttttttataaataaatatattattatttttataatacataacattgacatgtaaataagttatatttatattttttatcataaattttttataaataaataaataataattcttttaatattttacacgtaaattatattttataagatacttttgaccataattttagaaaaaaattaaactttaaataatataatttttgttccaactttacaaaatttacatggattattatttttataatatctttaattttttttccacaaatattccaaacactagtatgtattcatgtatgaaaatctctattcctccttaaaatacaaaaaaaaaagaagaaggaataatgctctgtaaattggttttgggcctcggccattatggtcggcacaaatcccgatatatatatttgttttcccgctttatcaattaatttgaaaatttcattccccctttgattttggagccactccatttattattaaacccttcattttcccccattcctttttatttccctcccacttcccaaaaccctttcctacatttcccgccgtccaaatcagctcaattcctcacttcggattcggcgccagttcggccatcgttgtttatccggctctctgaacaatcatcgccgactggtcagaatccataaaattacctttgtttcggttcaagggtttcttttctcttgtctaaatcgataatgccgagcacgcgaagagcttctaatcctatgaaggacactgattcgaccaagaatccgactcgctcgagccagcgtaatcggaagacagtgttggagcctgaaaatgatgaagtcatcgttgtcagtgaaggagagaacagtgaagtctctcgtggtggtaagcggaaggaaagctctgcctctggagcgggcaacaacgctaagaagtcaaaaccaagtgtagctaaaatgacgcctttggataccgagaatggtgaagctatggtcgttgacggtactgagaacggcagcaaaacgacaccaaaaaattcgaaaaagacgaaaacggatgtagctgttaatgaagacaaggaggaaacaaagtttttaggggaacctgttgatgacgaggaagccagacggcgatggccaaaacgctatcaaggaaaggtgtgcatatcgtatctttttattttctggggaaaaaaagtttaatcttttgaaagttctcttaaagttttaaattttcttaagtcatgcaatagaattttgaatagtccttttcttttacctttttattgatatttactacttttgtcattagggagcaaaaaaggtcatttcaaagagttcgaatgggtaagtaaacatttttttcccataaatcaatttcacttatactatttatttacattgcatttattgtttaattgaattagtgggtgtttgttattgttttcaaagttttttatatttattttttaagctttcaagttttttttcccttttcaatttagcattttttgttaaaatgactgagagctcggttagtatcttaaaaatcgtttttgaaaaatgtaaatgattgttttttaaatccatcatccagcattttagtttggggctaaaaagattttgataacagccttctaattagtattgcttttgctgtggaataaatgtatttagaaagtaaaaagggatgctaaatacatatggtgtaatgagtttaaaggggctaaggtttggattctgagttcaactttacataagatcaacgtagaagcatttgactgttttgggtgaacaataacgaaaaaaaagttttattgggaaaaaacaagtgaataacttttttcccaacattatatatttttgttaaagatcaagtaaaccctttgttgtatttttaaagatgtgcaaccttaattttccaatttatttggtacagtgactctgaagagatcattcaagctcgacggcactatacccaggcaaaagttgatggttgtatgatatttaatctttatgatgatgctcatgttaaagtcagtattactttctcatctattattttgtccttatatgttcttttaccatatttaaaatcatagtagtcttgtttatttgttggtcatattgatcttttgcatttgcttgattggtagttaaactttcagtcatattttattcatttgattgtttacaaaccttctcaaatttatcatcccctgaattggatattgtttagactttgttaggatgaatgtttttctccacatgaaaatatacaatatgcttgatgttattcaataactgatttacagtacatatttaggatttctagcactaattattctggatcctctctgataagcagagaggaattcgagtaaatggtctatggatttagtcatagtggtaactaattatattatttttgttttgcatatatataggctgaagatggagaagattgctatatatgtaaaattgttgagatgtttgaagcagttgatggagatttgtactttacagctcaatggttttacagggctcaagacacagtaagatgattcttttgtactatttccattagttttgaaccttttaatttgacgttaaatatcaatccttttccaggtacttaaaacgttaggccaccttattgacaagaagcgtgtattcttttcacaaattcaagacgacaatcccttggattgtcttgttgcaaagcttaatattgcaaaagtatctttgaacgtacgttttccgtttcttgcacttcattttaatgtctttcactgtttcaccatgctgtataattattatggttttttaggttgatttggaggcaaagaataaagagattccaagttgtgattattattgtgacatgttatacacattggaatattcgtctttcactaacttgcccccaggtagctgttattcctctgatttgctaaccctttttttgagtgtacgtcaatgaacatttaaaatttactaatttgcttcaacgtctaataatttcttttcctaatcaaagaagggaaaacaaatgctagcgaagaagcttcatctacaatttctgatgacagcccagatacagtaaatggagctaacagtggttccgaggatgcttcattgctggacctgtattctggttgtggagcaatgtcaaccggcttgtgccttggggcaaatatggccggactaaggctagtgactgtgagttagtttacaatatttaaataattgtgcgttttaagttttttgtaattggtaaattcttataaatttagttatttattgggtttttgttgaatgagtttagaaatgggctgtggatataaataaatatgcttgtgaaagtctccaatggaatcatccggaaacaacggtaaaatttatttataatttattttgttatttattgttgttgtttaaatcatgtaataaccttggtgcaatactcggtttctcaggtcaggaatgaatctgctgaagattttttagcattattaaaagaatgggaacggctgtgtgcttcattttcatcgtcaaaatctgagaatttggagaggcagtcattcaattcaagtgtaaatgaagataatgtaaatgatgaagaggaagaggaagatgaaaatgaagatggtgatggtgaagtgtttgaagtagagaaatttcttgctatatgttacggtgatccgaaagagaaaggggaacgtgggttgtacttaaaggtatttgagctttataaccttgatgtttgttggcctgtaatagctctatttatctcatgtggccaattcttttttcttctttcatttattctctttagaacgttgttctgaaatcctagctacggaactaattttacaacttcaattctagcactgattttttagctttatgtttcgcgtgttagctttgttctttttactttggggaactccaccatgacttctatccccttttgtaggttcgttggaagaattatgggccagaagaagatacatgggaacctttagatggattggggtatatcaactgtatttatgattgattatttcgtacttaaatatgcaaacttgtctgttaacagtttcttctttttaacagtgattgtcgagaatgcttgaaggattttgttacaagtggcttcaaagcaaaaattctgcccttacctgtaagtttctcttgtactttctaatgttactttttaaaaaagtgtatttctttaaatgatattcatacattatttatgctgtattttttctttattttgtttgaattactcatgtttgacatatttggatacgagtgtatagacatgatctttcattaacttttcaaatacatagaaaaaaattaaaaaaattgtacatacatatgtataaacccaaatctgaattatatataacctataacattagcccttgctttttatcacaacaaagtagcgtctctagggaaggacaagatagttattaaatcatagaatatttcctgaattcacaacataaatttgccttgtttttgttacaatcacaaattcttagtatgttctgtatttttttacattgtcctatagggtgatgttgatgtggtttgtggagggcctccatgccaaggcatcagtggctttaataggtttagaaacaaggataaccccttgcaagatgaaaagaacaaacaacttcaggttttcatggagatagtggagtacttgaagccaaagtttgttttgatggagaatgttgttgacatagtaaagtttgcagagggatatcttggacgatatgctttgagtaagctaattcatttaaattaccaagtccgaatgggaatgatggcagctggtgcttatggtcttccccaatttcgtatgcgtgctttcttttggggtgctcgtcctaatcaagtgagtttttttcctgtgaatacaaaaaattgtaactcttgagtcacttgatgttgtgttaaccttttggaatatgttgatcttgtgttgattaagtttttcactaataaattcttaacactgttctcagaaattgccacaatatccacttcctacgcatgatcttgtcctgagaggtgtcatacctgttgagtttgaggtacaaaaacctttctttgattttaatttttaaatgcttctatattctcacaatacttagtaaattgcagatgaacactgtaggctgggaagaaggtaaaaagatagagttggaaaagaaacttctactagaagatgccatttctgaccttccatcagtatgttttaagagtacttgaagattttccctcttttttttcactgcttggctagttcatttatcagttacatgtacctttatgtaactcaattattcttataggttggaaattatgaggataaagatgaaatggactatgacaaagatcctaaaacagagtttcagagattcatcaggttaagaagagagggtatgtatacttttcatatttgctaattatttatatacattctctgaagtccatgttaatgaaattgttttggatgggcgttattcaagtgtgtccgacatgaatattttatgatcgatttctttatatgtcttgtagagatgccaggtttttcttcactaaatgcaaaaccaacaaaacatttgctctatgatcatcgtccacttcaactcaacaccgatgattaccaacgtgtttgccgggttcccaaaaggaaggtacatcacttctccccatctcaagccaatcggctttgtgttctgctagatgcttcttgacttgctaatttctttcatctcatttctcattttatcaactttagggggcaaattttagagactttccaggtgttatagttaatagtggtaataaagtcgagtgggatcctaacgttgagagggtttatttggaatccggaaaaccattggtactctttttcattttgttattgttgatattcttcttaatctgcttccatgaaggtgcactgcataacatttttataaaaacaattacaggtccctgattatgccatgtcttttgtcggcggctcatcaagcaagtgagtattttgtctgtcacatgtctctgataataagaaagaaactttttgatcacataaccttactgttatgagattttgtagaccatttgctcgtctatggtgggatgaaactgtacccacagtggtcactagggcagaacctcataatcaggttataatttatccacacattatacgttatagtgttttagtttattttcatattttaatttttgtaactatatgtgtttttgtaccatagcattcatgagttgcaatgatctggtatgtctttgataggcgatattgcatcctgtacaagaccgagttctctcaattcgcgagaacgcaaggttgcaaggcttccctgattactacaagctttttggccccgtcaaggaaaggtacttgtataagcgatgcctttttccaattatgttgttttgatcacatccttttgcaattatttggtttcaagcaatgttatttaaatcagatcaatcaataggatttgttgaatgagaaccggttggagttttagttcataaaaaaggctatgttggatgatccatgaaacactgagaatagatttaaccaagtatgtttaaaaaaatgaatttttagtaattaatttaattgaattgattgaatcaagagccaatgatttaaatggttggattattagtttggttttgttaacatttctttcaacttttaggttatgttttaaaaattagaatggttatcaaattgatcatgccattggtttttacctttcagtttgattgttggttcaatgacaattaaataaataattaaaaatttaaatatatatgaattggttcaattgcttttttttttttatatcggttttaggttttttacgagtggtttttttagaaatatgttcaatcttttgtttggatggttccaacaacagtgctttcaagcatgaaaaccaaaattcatggtctttcctccggtttaagtacactctacaattagtgatagagatcagtcttgtatcttggctatttttcatatcatattctagtttaaacaaaatttaataattagtgttgcaaaattgagtcatattatgataatctttttggcgtggcctatgtataataggtacattcaagttggaaatgctgtagcagtgccagtttcaagggcattagggtatgccctggggttagcttaccaaggtgtagtttcaaatgatgaaccattaacgaaacttcctccaagattccctaacatatctgagaaagcatcttcggattcatctcaagataattcttaaacccccccttttttcttcaatctaattaatattagtcaatggaattgtgtattactttttagattttgaaactctaagagtaattaaaacctagtttaatgttcttcattcgatcccttgttgtacgactacgtgttgtcggtgctaatatttttttaattgagttttaatggttaaaacccattaggtaaactagttactaaattgttagtatgtttttattttgttctctaaatgtattgctaataaggtaactgttagtttacattttttgtattgaacttatttgagtagaattgctattactttgagttgaaatgatatatgcatgtattaagtttgtcaaaaaggaatggataaatttgttagtgattataagacttgatattaaagtgtcttatgaaatatttgattaggcacattataatatagtgtcttataatcaccactaaatttatccatttccttttcacaaacttaatacgttcatgtaacatattgtcttgtaatatcgtgtttatatacaatgtgcaatggtatggggattatggaattgatgtttatatacatttattattgcacgatgttcaatatgg

SEQ ID NO: 486 - DNA, 12802 bp, Gossypium raimondii
  source 1..12802: mol_type = genomic DNA
ttgaaatataaattcacttatagatgttaaaatcataattcaaaagttaatgacattatacaatttataaaagtggaatgaaagcataggccatttgttttgttaaatcgcaagctcatttgaaaaatatttttaaatatagcttttgtaattatagtggtttgactctatgatttaataacgatgtaattaatagacgaaaaattaaaatttaattacatgttattttagtctacattttatatgtctaaatggttttttcgctagctcataaataattggaagttcagtcatgatattatagtgatttgatgttattatagatgtatttatgaaaagaatatcgtcacgacaccattaaatgttggaataaatggatattttggaagctttgaggcatattatcgattagtaaatgtggatatttgaatcataaaactatggttttatattttactccatgagaactttacaatggtatatcatatgctcaaaatagttgagtgatgaatgagaaattgatactcaaagtaagtcacttgtgaattatgttgaggaaagtagaaagcttagtcccacatttgttagatatcaagagtgaaatatatttatatatgtgaaccaacttggtggttattgaatgactaaattaacactatctctcatgcgcaagggggcacaaattcaaacccattagggttgggggcacacccacacgacgtgggtaatgggaaatgtttgtattggttgggcatttttaagcccctatgaatatttaattagtaatctgacacggaagatacacacagtgatagacgaagccatcttattgttgtatcctcgatttttccagcaccaaaggagcggagcggctgaatctatcttccagtataatatttgaatttaatttaattttctattttccaaattatatattattgttcttatatataaatattttataatactgtcattttactaacatttttgtgcaacattaaaagcaaccacagtatcaaatccactctcattaatatttccaaatttttaagctcaccacacaagtaatcgcgggagaagggctcactccaagaagagagaccacactttgcttaagtgtaacctcaactccctcaaattatcacttcgagtatataacttaattattaaacaaagaatatgttaaaaaatgttgcaaaatcacaatatgcaacataacacaagtatgaactacgtcaactgtcgaactgttatcgtttccaactcataagccaaaccctcttaacgcgcattacatgtccaataaaagagggaggtttgcattgcgtgtccaataaacattgggctgtcattgcacattccccataacgcgcgataaccaaacagcttgggttcaaatcatcattgggctgtcattgcacactccccctaacgcgcgttaaccaaaacagcttgggtccaaatcatctgatagtttcaacctgtttcgctctgcagactcagcactgctactgttttcgagtttcaatgagtttaaataaaatctaacaaaaccccatcaccaaatttcattttatactggtatcatacattaagtgcctttagcgagttagtgttcttatagcttctggtagttggctagttaattgcgacccgaggtttcattgtaaaccgttcggtgttggggcagggttcttcctttttctccataaaaatagcaaaatgagttaattggaaaattcccagaacagtacattttatataatccatgtctttgctgaagtcccattcaacaccccaattttctccggttatcttaaccaaactaatcgtacgttagggtttcacatattttgtgttttcactcttttttttttaatacttatcagtcccattcggtaaaggtttagtctttttactcttattacaatctcacaaactacatgcattctccaaaggaggaacagggtgagcctctaaaacgaagtttcagtgaggcgaactcagacccacctgattggatggttctagacgacaatgaaactgctaaggaagaagacccttcttcatcttcaaaacctaaggactttaaccccagagggtttgcccttttctctttttcgtttttgagtgtggttgttatttgtgtcattctgagtttttgattttatttttgtgttttgtaggtatcaattgcaggtatatgaggtggcaaagggaagaaacataatagcagtgttggatacaggtgtagggaagacaatgatagctgtgatgctcataaaagattttgttcaagctatcgagtctactgaaagtaaaaaattgattattttcttggctcccactgttcatctagtcaatcaggtttgctttttgatccgcgaaagtttgaattcctcctggtgaggtaattgtagttaaacattgacattgtgtgtatatatacatatatttgtatttgcagcaatttgaatatgtaaaagatcatactagtttggaagttgaacagtattatggagctaagggggttgatgaatggaccttggattgttgggagaaagaaacaaaggagcatgatgtaagtttgcttattatctagctttgataaggctactttttaagctaatgcactgagtcttataaatgttgagttggattccatttggttctagtactctcactttgagaatcctccgccttaatttttcgtagttcgtactaatgtttttcaatgcacttctagtaaagttggcatttggtgtttacttatctttgaagggcaccttgtaggcattattccttgatattctttgaaggcactatactttgtaaatgggtagcaaagcatgggacatactttttttcttctgcttctagcccctttagatcaacttgttactgatatgtatatctttatcattgatcttgtaggttctggttatgacaccccaaattctattggatgccttaaggaaggcattcttgagtctggagatggtgtccttaatgataatagacgagtgccaccgtgctactggcaaccatccatatgccaaaataatgaaggtcagtaatcctgaaatctttttgctagaatcttgatgactttttgttttttgacactaagaattttgatgactatttaaattatttggtccttttttctgattaaaaatgaaatgttgttgtgttctatattttggtgtaggaattttatcacaaatctaataacaagccaaagatttttggaatgacagcatcacctgtggttagcaaaggtaaggtatttgtattattgttttttcatatgatatttaagtgtttcctattcataaggtttatctagttgtttatatccccattttgctcaagctttgttcctattacagaagagatctaaaagtatggttgttttaaccattaaggatcagttttttaaagaaaatgatcttgaagctccttggtgttgcagaaatacttcaccttttttttcccccacaagcatattttgttgcatatatacagtagttcttatgcttttgactcaactttctgtaggtgtgttgtccagcaataattgcgatggtcaaatgtcagaacttgaatgtgttttggattccttggtatctttgtatttagtttttctggttacctatacgattgatttgctggaaaaatcatatgtcgatatgaacaacatcttgaatatgtgctgctgcagatatacactattgaagacaggacagagatggaagcgtgtgttccttctgctaaagaaagttgtagattttttgatccagcacaattttctagcttggatttgaaagcaaaggtagaagcctcttggttaaaggtatccacggactttcatgagtgattcacttgtgtgggaatgtgttatttactcttttcatatagagttgttgaaggccttttattttattttattttattctgggcagacagatgcgtcattgtcaaatttgcaaagctcactgcaaacttcttataaaggcatggatgataaacttaagaatctacggaagcgattatcaaatgaccatgctaaggttctgcattgccttgataatcttggtctcatatgtgcttatgaggtatgattgtgatgtaaatttcaattagagtaatgatctttaagaggaaaagtgtgttcatctcgtttttacatgccatataaaattcaagctactcttataacatacacagcttttgatttctattatttacttggatgcatttgttgtctaatttaactctaatagttacattaaaaaccaattaactgagtaatgtctgacaaaaaccctgtactttatacaatcaccatagtttaaataacaaataaggtttcgctgggctttatgttgtttctttctgctatgccttcctgtttgctgctgatgcgatgtgctttatgttacttctttcataggctgttaacatttgtctagagaacatccttgacaccacagaggaatctaaagcatatagagaaagtgtgttgcagtataaaaatttccttgaggaagtccaatgtagaattggggagtctcttcccctcggtatgatgtgatgtaccttttattgtagttcttttatctggtttaaaccgtgttttctagatgtttaagtttacatatctgaagatacatttgtctctcactaatattgttcgcttctcacctcttcaggtgataaaaattttctgaatactggatttgactatttgaaggcagtagatcttggctatatttctccaaaactgcatgaactacttcaactgttccaatcatttgggtaataggaaacttcagtggttagtatttggaatatactgacagtgttgacttaagtcttatttctgttgttgcagagaaactagacaagtattgtgcctgatttttgttgaaagaattattactgctaaagtaattgaaagatttgcgaagaaagtaagctgtttatcacatttcatggtttcatatatgactggaagtaatacatctgttgattccctggcaccaaaaatgcaaaaggaaaccttggagtcatttcgatctgggaaggtatctcatcttctatgtaatagcttataagcactgaaatttggatattttacagtcaatgattaaaagcttcgtgtaggtgaatctattgtttactactgatgtggttgaggagggaattcatgtaccaaattgctgttatgtgatacgtttcgacctgccaaagacagtccggagttatgtacaatctcgaggaagagctaggcagaacaattctgaattcattatgatgcttgagaggtagaactgtgttcttgtgtagcatgcatttgttgtttgcctgtagtacttttgtctgtcagaagatatttcgtcatgggtgcctctatttatgatataatggcatagtgtctaactgatgtgttgacaggggaaatgtgaaacaaagaaatcaactatatgatataatcaggagtgagtattcaatgacaaattcggcaattaaaagagatcccgattctgatccatgccttcttaaagatcatacatttgaagaaacaaatgtttttattgtggatgctactggagcttcagttactgcagattctgctgttagcctcatccataaatattgtgggaagctccccggtgataagtatgctgtttcttgttatatttttgttctttaatcttcacttttcactatgtttgggagtttgttgatgacatattaatgcacattttgtcctctgttcaatgtaggtattacacaccaaaaccaaatttccagttcacgtcttctgaaggattatataagtgtaaattaacattacctgttaatgcagccgttcaaacaatagttggtccactgtctaggaattctcatttagcaaagcagcttgtatgcttagaagcatgtaagcagcttcatcaaatgggtgccttggatgatcatctcactccatccattgaagagccttcagaaaatgcttgtatttctaaaggaaaagattcaggtgcaggtgcaggtgcaggtatatgcataaactttctaagtatgaaattcttgtttaatgattgattttgcaactctggtgtgagtgtgtaagaaaattttataacatccctcttcgtggtttttgataagtattgttgacctgagttcaaacttgaactgtattatttactaaatgtatagtactttctttcttgtgctcctggtcatcatctgcaaaaaagtgtgccttgctacttgcatcattaccattcaggctcttggtagcaataaaaaaatgaaaatattaataatagactacattttaatttccaagcatgtgcttctcaagttatggctagtagcgagcactaaaattcggttttgctttatggacatagtgctgctatgttacttgcattactggcacagaatttggccagcatttttgggatgtgaatttttgtttgggatattagttatgtctttgcttgtctttctatctaaaatcattgtttgcattttttagtcttgcagaaaataaaaaatggtttcatattgctgtttttccttctttctttttttgtggtacaaaggaactacaaaacggaaggagcttcatggaacaacttgcatacaggcattatgtggaagctggggagaaaaatctgatgatgctgttttctttgcctataaatttgacttcaaatgcaatatcattactgtggtttattctggatttgttcttctaattgaatcaaagcttgcggatgatgtggggaatactgaaatggatcttttcttgattggtaagatggttaaggctagcgtttcttcctgtgggcaagtgtatttgaatgcagaacaggtataaataaacctaatgttgtataattgttcttttttcctacatgaagtccttaatttcaattgcaatctcatgctcttctcttctctttgttttgtttttattttcttcactatagatggtgaaagcgaagcgctttcaggaatttttctttaatggcttgtttgggaagttatttgttggatctaaatcatctggagcaccaagagaatttctacttcgggataaaacaagctccttgtggagtccatcccacatgtatttgcttttgcccctcgaggataattcaactgatgaattgagaatacactggccagggataacagcttgcacattagctgcggaatttttaaataaaaattctttgttgggcactgagcaatctgatgatgatggaagcaatccatcattgaacagtactggttcacctgtgacatactgcaaagaaaccaatataatccgctttgctaacagttcagttgatgctaatagtcttagaaatacggtagtattggctattcacactggaagaatctactgcatcattgaagctgtgagtgataaaactgctgaaagttctttcgctgaaactgttgatacggtctcatcagagtttgctaccttctatgaatacttctacaaaaagtaagtgataggaatttccagctagtttttatgtatttctgcatcacaaagtggttcaaattacaacgttggctttgatcaggtacaatattgtgctgaaacatccaggacagcctttgatgctgttaaagcagagccataacccgcacaacttgcttgtgaattttaatgatgaaggtttgtaaatgttttagctacattacaattagggattatgtagatgcaatgcccccatcttgtagctctgtgatcattttatccagttcgttattcccaagacatttttctaggtgaaagtatcttacaggtccctcaattatagggacctcatcaaattagttcctttactattaaatggatcaatttagtcctactattgaaatgaatcaaataagcccaaattttaacggtgttaacatttactgtttaaaaaattgtcatttgtcatttactatttaacagagttaacatctttaaagctttacggttcttcaaatgaattattttgtttggagtaaaactgcgaatgaaaaaaaaatcatgtcattttttaaacagaaaatgttaaatatgttaaaatttgggcttatttgattcattttaataggactaaattgatccatttaatagtaaaggaactaatttgatgaggtccctataattgagggacctctcaggtgctttcacccattgttctacctccaatccaacaaaagtagaagttcttgattaccagttattgtggttttgattttcaatttctagctacttaaataaagtcttaaacctgaaataacactatgtaccttatgtccatgtgacttctaaatatttttccaatttctgagcaggtgtatcagctaaggcatcacaagctggcgtggttaatgaaaagcctcggtttcatgtccacatgccccctgagcttttacttgtccttgatgtcccagtgagtgttctaaaatcattgtacttactgccatcattgatgcatcggctggagtccttaatgttggccaaccaactcagagaagagataaacttttgttctagcaacattgatattccaagctcaatggttttttctctaaatctcctctaaactgtctgtttctgaaacgattcattactttaacaataatttgatatcttttttaaactaatagatcctggaagcattaacaacacttagatgctgtgaaagtttttcaatggaaaggctggaattgcttggggattcagttctgaagtatgctgttagctgccacctctttcttagatatcccaacaaacatgagggacaattatctgccaggcgttcgttggcagtttgtaattcaaccctgcataagttgggaactgaccacaaaatacaggtgctatttccttatattggctagaatccttgcgtaggctgagtcactgagatccatttttgatggatatatattctttgaggcaactgtttatgcttgttaataggatataatcattcttgctgttcattgtgcaccaatatctctatgtgtatctcctgtataatctgcctcctctaattgtataatttttaaagagatggtttctggctatgaatgatatgtttgctagtggaatattattgttctagcataacagagaacatgacacttgttgcttcgcaaaattatttaatgtttgtaccatgttgaaggatttataataatatattatgatcctttgtgctcaaaagcgggcaacattggtatttttgctttattgagttacatattgttttcaggttgtgtttaataagctggtttaaataagcagcagcggcaatgcatgggcttttcttttatcctttccaattcttgcattattgaaaactggagtctataatttaggcacagaagctgcccattctgctcgacttcttattgtttatgccagttttggcaaatatacaagtattacgaactgttgattgttacattggttttattttttatataacagggatacattagggacagtgcttttgatccccgtcgttgggtagctccaggacaacgagtgcttcgccctgttccttgcaagtgtggtgtggactctctagaagttcctttagataaaaaatttcagacagaagaccctaaagttaaggttggtaaatcctgtgatagaggccaccgatggttgtgttcaaaaaccatatcagattgtgttgaagctctcataggagcatactacttaagtggtggacttgttgctgcccttcatgtgatgaagtggctcgggattgatgccgaacttgatcccttggtggtagctgaggtcattaatcaggcatccttaagaacttatgtccccaattacgaaatccacatgatagagtcaaaagttggctacaatttttctgtcaagtttttcttgcaggaggcattgacacatgaatctttgcacgagtcctactgttaccaggtagttatggaggttctctatatatattcgagttctttatttttccttctttctctcagaaagtttaagtgatttggagtccaagaaggaaaagctcatacattgtgaataggatattgatgttaatcttttgttcctttttctccatgaagtggaataaaatagttttaatactaattatgaataatataaatacaactgtaaacagttgcttaggtcaatagatcccatgtgagctcacctttttacgtattgaaaattttctacagagacttgaatttcttggtgattctgtgttggacttgctgatcacccagtatctctacaaccatcacactgatatagatccgggtgagttgactgacctgcgctccgcttcggttaataatgaaaattttgctcaagttgccgtgcgccatgaccttcataagcatcttcaacattgttcaactttactatcaaaccaaataagtgaatatgtgcggtccttcactgaatctgataacaccaccagattagatcccagcataaaaggtcccaaggtattattaatcttttttatggtgcataattagaggtcttttatatggttctattgtactccgttactgttttcgatgcactttccatgttaccttatggctcattgaattgaggcgattattggccatggggatcagggatcttgacgatatataatctccactttctttgctacaggctcttggagacctggttgaaagtattgttggggcaattctgattgatacaaacctgaatcttgacaaagtctggagaattgttgaaccgttgttgtctccaattgtaaccccagataagcttgagctgcctccattccgggaactgaatgaattatgcgactctcttggatattttattaaggaaaaatgtaaaaataagggggaagtagtgcacgccgagcttctattgcagctagatcatgatttgttggtaggagaggggtttgatagaagtagaaaagtagcaaaaggaaaagccgcttcttgtctgttgaaggaccttgaggtacgcattcataaaagtttgtcaggacatgagaaaggagtgagtctggtcacatcagccatttaacttcacaattattcttcactccctgccttcctttgaccaatcagaagtttctttcatttcatataatataatattaaggttctacatttatgcttacaattggttatcatatgtgtgtctagtctttgtttctttaggtggatttgttgatttgtttgattcccttaggcttcggtcttttagatatgtagtcatgttcggtttaggctttagtcatttaggcatatagtcataaatccatcactgcatgttgagaactgattgtttgcgctaacattggcaatggtcctgatactccatgtcaacagaacagaggaatctccaggaagaaaaggaaacatgactgtgtggattcaagtcaaaccatggaagatgactcgttagaaccaacaatccctaagaggcaaaggagcgccgaaattcagttgcttgatgaatcaaagaaagcatgcagtgctacgcctgccaccccaggtatgtaaattgttggaggatattgactgcagtttaatgagccaactgaatgagctcaatggtaccatatactgaaccaaggcctggtactagaaataggaaaacatgtaaaatatcatccacagttaaacttgttatttgttttgttcttatagtaaatgagtgtactcatctagttcccttgtctttggatagttacatgatgtctttgtctaaaaaagaaataatatcagaggtaaattaattggctttaaacgtgaatatcttattggttccatcatgttaggaattaaaaccagattatgttttttttctgctttatgcaaacatgtctttgacattttcctctctttggtttctagttattgtaacagtaaaaacgaagaaaggagggccgaggaccactctttttgagctttgcaagaaactgctgtggcctatgcctagtatcaaagcaacagaacacaaatcaaggcatctctctttcatctcttgcaaatatttcatctgctgaagtttcatttcttgatctgctagtacattttcagtgttttgaagcatcactattactttcctttgcagtgctcccatggaaattggtgaaggtcccgagaggaaaaaagggtttatcagctttgtgtcgaaaatcatcttgaatgtcccaggatacgacattattgaatgcactggagatgcaaaagctgacaaaaaaagttcttcagactcagcagcactgtttatgctttatgagcttgaacagcgtgggaagctcatcatcgaggaaaccttataagtctactagcagttgaccatcaatggtgttcattaaaggtgatctgcaatatcctcactgtccagttattaacttttgactcttggtttaaaattgtaagcgatgactgtgagggctcgtaacaaaatatcaacgatatatcatgtatgtatatattgtccataatctaccaacaagccatgttaataaatctgcagttatttctgaattttatctatttgtcaatgttagggtgagtttggattggcgatgcgtttatttgcggttagtataaaaacagcagtagcggtgagattagatactttagcgtgagacaaaaagtaagctaaacataccgcactgcacccaatcgtccatccaaatctacccttattgttgtatatcaattgtagatttccaaagggaatgtcttttctgcaaattac

SEQ ID NO: 487 - DNA, 12386 bp, Gossypium raimondii
  source 1..12386: mol_type = genomic DNA
gatattttggaagctttgaggcatattatcgattagtaaatgtggatatttgaatcataaaactatggttttatattttactccatgagaactttacaatggtatatcatatgctcaaaatagttgagtgatgaatgagaaattgatactcaaagtaagtcacttgtgaattatgttgaggaaagtagaaagcttagtcccacatttgttagatatcaagagtgaaatatatttatatatgtgaaccaacttggtggttattgaatgactaaattaacactatctctcatgcgcaagggggcacaaattcaaacccattagggttgggggcacacccacacgacgtgggtaatgggaaatgtttgtattggttgggcatttttaagcccctatgaatatttaattagtaatctgacacggaagatacacacagtgatagacgaagccatcttattgttgtatcctcgatttttccagcaccaaaggagcggagcggctgaatctatcttccagtataatatttgaatttaatttaattttctattttccaaattatatattattgttcttatatataaatattttataatactgtcattttactaacatttttgtgcaacattaaaagcaaccacagtatcaaatccactctcattaatatttccaaatttttaagctcaccacacaagtaatcgcgggagaagggctcactccaagaagagagaccacactttgcttaagtgtaacctcaactccctcaaattatcacttcgagtatataacttaattattaaacaaagaatatgttaaaaaatgttgcaaaatcacaatatgcaacataacacaagtatgaactacgtcaactgtcgaactgttatcgtttccaactcataagccaaaccctcttaacgcgcattacatgtccaataaaagagggaggtttgcattgcgtgtccaataaacattgggctgtcattgcacattccccataacgcgcgataaccaaacagcttgggttcaaatcatcattgggctgtcattgcacactccccctaacgcgcgttaaccaaaacagcttgggtccaaatcatctgatagtttcaacctgtttcgctctgcagactcagcactgctactgttttcgagtttcaatgagtttaaataaaatctaacaaaaccccatcaccaaatttcattttatactggtatcatacattaagtgcctttagcgagttagtgttcttatagcttctggtagttggctagttaattgcgacccgaggtttcattgtaaaccgttcggtgttggggcagggttcttcctttttctccataaaaatagcaaaatgagttaattggaaaattcccagaacagtacattttatataatccatgtctttgctgaagtcccattcaacaccccaattttctccggttatcttaaccaaactaatcgtacgttagggtttcacatattttgtgttttcactcttttttttttaatacttatcagtcccattcggtaaaggtttagtctttttactcttattacaatctcacaaactacatgcattctccaaaggaggaacagggtgagcctctaaaacgaagtttcagtgaggcgaactcagacccacctgattggatggttctagacgacaatgaaactgctaaggaagaagacccttcttcatcttcaaaacctaaggactttaaccccagagggtttgcccttttctctttttcgtttttgagtgtggttgttatttgtgtcattctgagtttttgattttatttttgtgttttgtaggtatcaattgcaggtatatgaggtggcaaagggaagaaacataatagcagtgttggatacaggtgtagggaagacaatgatagctgtgatgctcataaaagattttgttcaagctatcgagtctactgaaagtaaaaaattgattattttcttggctcccactgttcatctagtcaatcaggtttgctttttgatccgcgaaagtttgaattcctcctggtgaggtaattgtagttaaacattgacattgtgtgtatatatacatatatttgtatttgcagcaatttgaatatgtaaaagatcatactagtttggaagttgaacagtattatggagctaagggggttgatgaatggaccttggattgttgggagaaagaaacaaaggagcatgatgtaagtttgcttattatctagctttgataaggctactttttaagctaatgcactgagtcttataaatgttgagttggattccatttggttctagtactctcactttgagaatcctccgccttaatttttcgtagttcgtactaatgtttttcaatgcacttctagtaaagttggcatttggtgtttacttatctttgaagggcaccttgtaggcattattccttgatattctttgaaggcactatactttgtaaatgggtagcaaagcatgggacatactttttttcttctgcttctagcccctttagatcaacttgttactgatatgtatatctttatcattgatcttgtaggttctggttatgacaccccaaattctattggatgccttaaggaaggcattcttgagtctggagatggtgtccttaatgataatagacgagtgccaccgtgctactggcaaccatccatatgccaaaataatgaaggtcagtaatcctgaaatctttttgctagaatcttgatgactttttgttttttgacactaagaattttgatgactatttaaattatttggtccttttttctgattaaaaatgaaatgttgttgtgttctatattttggtgtaggaattttatcacaaatctaataacaagccaaagatttttggaatgacagcatcacctgtggttagcaaaggtaaggtatttgtattattgttttttcatatgatatttaagtgtttcctattcataaggtttatctagttgtttatatccccattttgctcaagctttgttcctattacagaagagatctaaaagtatggttgttttaaccattaaggatcagttttttaaagaaaatgatcttgaagctccttggtgttgcagaaatacttcaccttttttttcccccacaagcatattttgttgcatatatacagtagttcttatgcttttgactcaactttctgtaggtgtgttgtccagcaataattgcgatggtcaaatgtcagaacttgaatgtgttttggattccttggtatctttgtatttagtttttctggttacctatacgattgatttgctggaaaaatcatatgtcgatatgaacaacatcttgaatatgtgctgctgcagatatacactattgaagacaggacagagatggaagcgtgtgttccttctgctaaagaaagttgtagattttttgatccagcacaattttctagcttggatttgaaagcaaaggtagaagcctcttggttaaaggtatccacggactttcatgagtgattcacttgtgtgggaatgtgttatttactcttttcatatagagttgttgaaggccttttattttattttattttattctgggcagacagatgcgtcattgtcaaatttgcaaagctcactgcaaacttcttataaaggcatggatgataaacttaagaatctacggaagcgattatcaaatgaccatgctaaggttctgcattgccttgataatcttggtctcatatgtgcttatgaggtatgattgtgatgtaaatttcaattagagtaatgatctttaagaggaaaagtgtgttcatctcgtttttacatgccatataaaattcaagctactcttataacatacacagcttttgatttctattatttacttggatgcatttgttgtctaatttaactctaatagttacattaaaaaccaattaactgagtaatgtctgacaaaaaccctgtactttatacaatcaccatagtttaaataacaaataaggtttcgctgggctttatgttgtttctttctgctatgccttcctgtttgctgctgatgcgatgtgctttatgttacttctttcataggctgttaacatttgtctagagaacatccttgacaccacagaggaatctaaagcatatagagaaagtgtgttgcagtataaaaatttccttgaggaagtccaatgtagaattggggagtctcttcccctcggtatgatgtgatgtaccttttattgtagttcttttatctggtttaaaccgtgttttctagatgtttaagtttacatatctgaagatacatttgtctctcactaatattgttcgcttctcacctcttcaggtgataaaaattttctgaatactggatttgactatttgaaggcagtagatcttggctatatttctccaaaactgcatgaactacttcaactgttccaatcatttgggtaataggaaacttcagtggttagtatttggaatatactgacagtgttgacttaagtcttatttctgttgttgcagagaaactagacaagtattgtgcctgatttttgttgaaagaattattactgctaaagtaattgaaagatttgcgaagaaagtaagctgtttatcacatttcatggtttcatatatgactggaagtaatacatctgttgattccctggcaccaaaaatgcaaaaggaaaccttggagtcatttcgatctgggaaggtatctcatcttctatgtaatagcttataagcactgaaatttggatattttacagtcaatgattaaaagcttcgtgtaggtgaatctattgtttactactgatgtggttgaggagggaattcatgtaccaaattgctgttatgtgatacgtttcgacctgccaaagacagtccggagttatgtacaatctcgaggaagagctaggcagaacaattctgaattcattatgatgcttgagaggtagaactgtgttcttgtgtagcatgcatttgttgtttgcctgtagtacttttgtctgtcagaagatatttcgtcatgggtgcctctatttatgatataatggcatagtgtctaactgatgtgttgacaggggaaatgtgaaacaaagaaatcaactatatgatataatcaggagtgagtattcaatgacaaattcggcaattaaaagagatcccgattctgatccatgccttcttaaagatcatacatttgaagaaacaaatgtttttattgtggatgctactggagcttcagttactgcagattctgctgttagcctcatccataaatattgtgggaagctccccggtgataagtatgctgtttcttgttatatttttgttctttaatcttcacttttcactatgtttgggagtttgttgatgacatattaatgcacattttgtcctctgttcaatgtaggtattacacaccaaaaccaaatttccagttcacgtcttctgaaggattatataagtgtaaattaacattacctgttaatgcagccgttcaaacaatagttggtccactgtctaggaattctcatttagcaaagcagcttgtatgcttagaagcatgtaagcagcttcatcaaatgggtgccttggatgatcatctcactccatccattgaagagccttcagaaaatgcttgtatttctaaaggaaaagattcaggtgcaggtgcaggtgcaggtatatgcataaactttctaagtatgaaattcttgtttaatgattgattttgcaactctggtgtgagtgtgtaagaaaattttataacatccctcttcgtggtttttgataagtattgttgacctgagttcaaacttgaactgtattatttactaaatgtatagtactttctttcttgtgctcctggtcatcatctgcaaaaaagtgtgccttgctacttgcatcattaccattcaggctcttggtagcaataaaaaaatgaaaatattaataatagactacattttaatttccaagcatgtgcttctcaagttatggctagtagcgagcactaaaattcggttttgctttatggacatagtgctgctatgttacttgcattactggcacagaatttggccagcatttttgggatgtgaatttttgtttgggatattagttatgtctttgcttgtctttctatctaaaatcattgtttgcattttttagtcttgcagaaaataaaaaatggtttcatattgctgtttttccttctttctttttttgtggtacaaaggaactacaaaacggaaggagcttcatggaacaacttgcatacaggcattatgtggaagctggggagaaaaatctgatgatgctgttttctttgcctataaatttgacttcaaatgcaatatcattactgtggtttattctggatttgttcttctaattgaatcaaagcttgcggatgatgtggggaatactgaaatggatcttttcttgattggtaagatggttaaggctagcgtttcttcctgtgggcaagtgtatttgaatgcagaacaggtataaataaacctaatgttgtataattgttcttttttcctacatgaagtccttaatttcaattgcaatctcatgctcttctcttctctttgttttgtttttattttcttcactatagatggtgaaagcgaagcgctttcaggaatttttctttaatggcttgtttgggaagttatttgttggatctaaatcatctggagcaccaagagaatttctacttcgggataaaacaagctccttgtggagtccatcccacatgtatttgcttttgcccctcgaggataattcaactgatgaattgagaatacactggccagggataacagcttgcacattagctgcggaatttttaaataaaaattctttgttgggcactgagcaatctgatgatgatggaagcaatccatcattgaacagtactggttcacctgtgacatactgcaaagaaaccaatataatccgctttgctaacagttcagttgatgctaatagtcttagaaatacggtagtattggctattcacactggaagaatctactgcatcattgaagctgtgagtgataaaactgctgaaagttctttcgctgaaactgttgatacggtctcatcagagtttgctaccttctatgaatacttctacaaaaagtaagtgataggaatttccagctagtttttatgtatttctgcatcacaaagtggttcaaattacaacgttggctttgatcaggtacaatattgtgctgaaacatccaggacagcctttgatgctgttaaagcagagccataacccgcacaacttgcttgtgaattttaatgatgaaggtttgtaaatgttttagctacattacaattagggattatgtagatgcaatgcccccatcttgtagctctgtgatcattttatccagttcgttattcccaagacatttttctaggtgaaagtatcttacaggtccctcaattatagggacctcatcaaattagttcctttactattaaatggatcaatttagtcctactattgaaatgaatcaaataagcccaaattttaacggtgttaacatttactgtttaaaaaattgtcatttgtcatttactatttaacagagttaacatctttaaagctttacggttcttcaaatgaattattttgtttggagtaaaactgcgaatgaaaaaaaaatcatgtcattttttaaacagaaaatgttaaatatgttaaaatttgggcttatttgattcattttaataggactaaattgatccatttaatagtaaaggaactaatttgatgaggtccctataattgagggacctctcaggtgctttcacccattgttctacctccaatccaacaaaagtagaagttcttgattaccagttattgtggttttgattttcaatttctagctacttaaataaagtcttaaacctgaaataacactatgtaccttatgtccatgtgacttctaaatatttttccaatttctgagcaggtgtatcagctaaggcatcacaagctggcgtggttaatgaaaagcctcggtttcatgtccacatgccccctgagcttttacttgtccttgatgtcccagtgagtgttctaaaatcattgtacttactgccatcattgatgcatcggctggagtccttaatgttggccaaccaactcagagaagagataaacttttgttctagcaacattgatattccaagctcaatggttttttctctaaatctcctctaaactgtctgtttctgaaacgattcattactttaacaataatttgatatcttttttaaactaatagatcctggaagcattaacaacacttagatgctgtgaaagtttttcaatggaaaggctggaattgcttggggattcagttctgaagtatgctgttagctgccacctctttcttagatatcccaacaaacatgagggacaattatctgccaggcgttcgttggcagtttgtaattcaaccctgcataagttgggaactgaccacaaaatacaggtgctatttccttatattggctagaatccttgcgtaggctgagtcactgagatccatttttgatggatatatattctttgaggcaactgtttatgcttgttaataggatataatcattcttgctgttcattgtgcaccaatatctctatgtgtatctcctgtataatctgcctcctctaattgtataatttttaaagagatggtttctggctatgaatgatatgtttgctagtggaatattattgttctagcataacagagaacatgacacttgttgcttcgcaaaattatttaatgtttgtaccatgttgaaggatttataataatatattatgatcctttgtgctcaaaagcgggcaacattggtatttttgctttattgagttacatattgttttcaggttgtgtttaataagctggtttaaataagcagcagcggcaatgcatgggcttttcttttatcctttccaattcttgcattattgaaaactggagtctataatttaggcacagaagctgcccattctgctcgacttcttattgtttatgccagttttggcaaatatacaagtattacgaactgttgattgttacattggttttattttttatataacagggatacattagggacagtgcttttgatccccgtcgttgggtagctccaggacaacgagtgcttcgccctgttccttgcaagtgtggtgtggactctctagaagttcctttagataaaaaatttcagacagaagaccctaaagttaaggttggtaaatcctgtgatagaggccaccgatggttgtgttcaaaaaccatatcagattgtgttgaagctctcataggagcatactacttaagtggtggacttgttgctgcccttcatgtgatgaagtggctcgggattgatgccgaacttgatcccttggtggtagctgaggtcattaatcaggcatccttaagaacttatgtccccaattacgaaatccacatgatagagtcaaaagttggctacaatttttctgtcaagtttttcttgcaggaggcattgacacatgaatctttgcacgagtcctactgttaccaggtagttatggaggttctctatatatattcgagttctttatttttccttctttctctcagaaagtttaagtgatttggagtccaagaaggaaaagctcatacattgtgaataggatattgatgttaatcttttgttcctttttctccatgaagtggaataaaatagttttaatactaattatgaataatataaatacaactgtaaacagttgcttaggtcaatagatcccatgtgagctcacctttttacgtattgaaaattttctacagagacttgaatttcttggtgattctgtgttggacttgctgatcacccagtatctctacaaccatcacactgatatagatccgggtgagttgactgacctgcgctccgcttcggttaataatgaaaattttgctcaagttgccgtgcgccatgaccttcataagcatcttcaacattgttcaactttactatcaaaccaaataagtgaatatgtgcggtccttcactgaatctgataacaccaccagattagatcccagcataaaaggtcccaaggtattattaatcttttttatggtgcataattagaggtcttttatatggttctattgtactccgttactgttttcgatgcactttccatgttaccttatggctcattgaattgaggcgattattggccatggggatcagggatcttgacgatatataatctccactttctttgctacaggctcttggagacctggttgaaagtattgttggggcaattctgattgatacaaacctgaatcttgacaaagtctggagaattgttgaaccgttgttgtctccaattgtaaccccagataagcttgagctgcctccattccgggaactgaatgaattatgcgactctcttggatattttattaaggaaaaatgtaaaaataagggggaagtagtgcacgccgagcttctattgcagctagatcatgatttgttggtaggagaggggtttgatagaagtagaaaagtagcaaaaggaaaagccgcttcttgtctgttgaaggaccttgaggtacgcattcataaaagtttgtcaggacatgagaaaggagtgagtctggtcacatcagccatttaacttcacaattattcttcactccctgccttcctttgaccaatcagaagtttctttcatttcatataatataatattaaggttctacatttatgcttacaattggttatcatatgtgtgtctagtctttgtttctttaggtggatttgttgatttgtttgattcccttaggcttcggtcttttagatatgtagtcatgttcggtttaggctttagtcatttaggcatatagtcataaatccatcactgcatgttgagaactgattgtttgcgctaacattggcaatggtcctgatactccatgtcaacagaacagaggaatctccaggaagaaaaggaaacatgactgtgtggattcaagtcaaaccatggaagatgactcgttagaaccaacaatccctaagaggcaaaggagcgccgaaattcagttgcttgatgaatcaaagaaagcatgcagtgctacgcctgccaccccaggtatgtaaattgttggaggatattgactgcagtttaatgagccaactgaatgagctcaatggtaccatatactgaaccaaggcctggtactagaaataggaaaacatgtaaaatatcatccacagttaaacttgttatttgttttgttcttatagtaaatgagtgtactcatctagttcccttgtctttggatagttacatgatgtctttgtctaaaaaagaaataatatcagaggtaaattaattggctttaaacgtgaatatcttattggttccatcatgttaggaattaaaaccagattatgttttttttctgctttatgcaaacatgtctttgacattttcctctctttggtttctagttattgtaacagtaaaaacgaagaaaggagggccgaggaccactctttttgagctttgcaagaaactgctgtggcctatgcctagtatcaaagcaacagaacacaaatcaaggcatctctctttcatctcttgcaaatatttcatctgctgaagtttcatttcttgatctgctagtacattttcagtgttttgaagcatcactattactttcctttgcagtgctcccatggaaattggtgaaggtcccgagaggaaaaaagggtttatcagctttgtgtcgaaaatcatcttgaatgtcccaggatacgacattattgaatgcactggagatgcaaaagctgacaaaaaaagttcttcagactcagcagcactgtttatgctttatgagcttgaacagcgtgggaagctcatcatcgaggaaaccttataagtctactagcagttgaccatcaatggtgttcattaaaggtgatctgcaatatcctcactgtccagttattaacttttgactcttggtttaaaattgtaagcgatgactgtgagggctcgtaacaaaatatcaacgatatatcatgtatgtatatattgtccataatctaccaacaagccatgttaataaatctgcagttatttctgaattttatctatttgtcaatgttagggtgagtttggattggcgatgcgtttatttgcggttagtataaaaacagcagtagcggtgagattagatactttagcgtgagacaaaaagtaagctaaacataccgcactgcacccaatcgtccatccaaatctacccttattgttgtatatca

SEQ ID NO: 488 - DNA, 12386 bp, Gossypium raimondii; identical to SEQ ID NO: 487
  source 1..12386: mol_type = genomic DNA

SEQ ID NO: 489 - DNA, 8894 bp, Gossypium raimondii
  source 1..8894: mol_type = genomic DNA
tttaaagtccgaaaaaaaaatcgaaaaaaaaagggttggtaaaaaaagaaaaaaagaacagaagtagcagaagtgtatgattaatgtttaaaaaggttagatgagaatagcaaatgcattttggtagagcatcaggggagggcgaggctgagtctagccgataacttgtttttctccgttttgttaattttgtatcttaaatttatactttgttaaattacttcttgaattacatcatgattgtatgattcatgaaaattaaactattgtgctaaatgctgaaaacttttcattattactttttaggtctatatagctgtatagtattcaagttcaagctcaactcgccattcaaagttcatcttgagcttggttgagtttcggttttaaaattcgagtttgatttaagataaaaaattatattacttttgagtctatttatttaatctgcttcatacgggattataaacttggttatttgtgtttgaacttaaattcgatttaaatccatcattagaacacttagaatttaatttatccaatagttcgagtttggcttcaataatagcaggtaaaattacactagaggtctttgtattaagaattagattatattgtattttttttttataaaatgagtaaattagtccttatactttagataaaaaagtaaattggtcattttattaaaaattttatctatttctactattaaaaactagttctcatacatcattttgaagtacatgtggcacactatgagttactgtctgattattttatcaatcatgttagtttttaatagtacaaatagataattttttttacaaaaataattaatttactctttaatctaatatataaaaatttaattatctattttttcagtaaaaaacaaaatgcaaaaccttcgtagttttacgataatagtttaaaatacatctgtttcactctatgcatagggcagtataacgtgtcaactcataattggggcgtttatgtgcttctcccgatggcgggtaaatcaaacaactttcgtccgaatcttttaaacagcttcgtctgaatatggaaattttttctttttatggtagtaaacctggaactttctaatacaacaaaaaataagttattatatttttcataaatttaaaatttaatttttgtatttttattttcaaaattttaatctctttatttttaaaattttaaaattcataaacactaataaaattatttaattaaattcaaagtttattacaagattaattttttaattgaattactactaaataaaaatggtgtgaatttaatggaatcaatgtcgttgcattgcacagtctgcttcgcacccccattttctcatttttctcactgaaatattcgttcttttagaacttcacgtatatggtaattttcatctttatcctttctagtcgttttcatttcaatgataaaattttaatgtttgtctttttgtataaatactcagcatccaacatgcattctcccatggaagaagagcagtgttaccctctaaaaacaaccttcagtgaaacacacttacacccatctcagattatggtttcaatcaatgacgatcatgctaagaaccaccacccttcttcatcttcaaatcctgatcactctagccctagagggtttgcccttttcttcctctttttctttctttttttcctttattttttcagtttttgttaatttttcctttttctgtgtgtgttgtaggcatcagctgcaggtgtatgaagttgcaaagagaagaaatatcatagcagtgttagatacaaaatgatagctgtaatgcttatcaaagattttgttcaacctatcaactccattgataaaaaaaagttgattattttcttggcccccactgttcatcttgttaatcaggtttacttctctttatttttcctggaaagtttaaaaatttcttctggtaatgcaaaaaaaaatgatcattttaagttatatatctatgtatatattgttcatattgtgtgttttgcagcaatttgaatatataaagttccatacaagtttggatgttgaacaatattatggagataaaggggttaatgaatggaactcagggtattgggagaaagacataaaggagcatgatgtaagttctctttttaagttatgctaattcacgaaatctcttatttatttgtttgctatgttaatccgaatccgaatctttatttttctcgaaatacatatatttaacagccgtatctaacatatatccggacattaaaatcttgaaaaggaaaaaaattgaacgtactcatgcccgactctcacatccaagtccgagtaacatgtttttacttaattgttcatatcaatgattttattatgttcttgatcttgtaggttcttgttatgacaccccaaattctgttggatgccttgtggaaagcattcttgagtttagagatggtgtccttaatgataatcgacgagtgccaccatgctaccggtaaccatccgtatgcgaaaataatgaaggtcgggaatccgaaccctgtttttgctagaacttgatgactattactttatttttgatattttcatctgtttgttttctgattaatagtggtgacattgttctgttcttatttcgggttaggaattctatcacaaatcgaacaacaaaccgaagattttcgggatgacggcatcgcccttagttagcaaaggtaagtttttgttgttacttttttctttccatcttatattgaattgatcttatgcttttaagggtttttggtaactcaactttgtgtaggtgcattatccaacaatgattgtgaggatcaactttcagaacttgaaaatgttatggattgcatggtattcattatttctgttcctttaaaatctttttcgttagatttaatcggtttgctcaaaaaatcgtatgttaatatgtgttgctacagatatatgcaattgaagacatgacagagatggaaacatatgttcctacagcaaaagaaagttgtaggtttttcgatccaacacgattttgtagttcgggtttgaaagcaatgatcgaagcctcgtggttaaaggtatcttttcacttaatataagtgatgcaaatgcaagtaggaatatactttgttaatgtgaatgtatcttgcaaatgtatatagatagatgcttcattatcaacgttgcaaggctcgattcaaacttcttatacagacatggatgataagtttaaggccctccataaacggtcatccaatgaccatgctaagattctgcattgtctcgacgatcttggtctcatatgtgcttatgaggtatgatcatgttatgctcttgtaacacaaacacggtttgttcaggctttacattgtttgtttcgtgttacttctttcataggctgttaaagtctgtcttgagaacatccctgatacaaaagaggagtgtgaagcatataaagaaggtgtattgcagtgcaaaaggttcctcaacgaagtgctacagataatcagggaatcccttcccctgggtatactatgctgtaactcttatcctacttcatttggttcgcaccgtatttagagaagttaactcatctcatctcttcaggtgatgaaaattttctgaattccgggtttgactacttaaaggcggtagattcgggctatatatctccgaaactgcatgaactaattgaatttttcttatcactcgggtaataggaagccttaatggttagtttctttgaatataataacaatgttggcttaatcttacttttcgaggttgcagagaacctagtcaagtattgtgcctcgtttttgttgaaagaattgttaccgctaaagtaattgaaagatttgtgaagaaagtaagttgtttatcgtgttttgtggtttcgtgtttgactggaagtaatacgtcagttgattccatggcaccaaagattcaaaaggaaactttggagtaatgtcaatccgggaaggtatgtgatctatatgatagcttacttgtatgcactgatgattagatattttatggtcaatgattgtggagtttgctcaggtgaatctactttttgctaccgatgtggtcgaggagggaattcatataccaaactgctcatatgtgatacgttttgacttgccgaaaacagtgttgagttatgtacaatctcgaggaagagctaggcagagtggttcccaattcatcatgattctagagaggtaaaatcgtgttcgttgctatgcatgcacgcatgcaatgctcgtccattataattccgactctatttagggtactacagcgtagaatctaactgatgcattgacaggggaaatgagaaacaaagagatcaactatacgatctaattcggagtgaacattcaatgacgaatacagctatgaatagagatcctgatctatctcttccggaaaaccgtacattggaagaaacaaatgtttctatcgtggctgctactggagcttccattgaagaaacttccaaaaatcgttgcgcttctaaaggaaaagatcccattttcgattcaggtgcatgtatatatatagataaactttcaaagtctaaaacttgtgtttaacgatagaatatggcatgaaataagtattgttgtcttgagttcaaaccggaaccatatggctcattactatgatcgatctccgtgttcgcttgcttaaattccgtatgtaaaactgtgtccaggtcgccttagttattgcttttgcttttcatagtaaattagcttcatattcctttcttttgtgtggttcaaaggaactacaagatggaaggagctgcacggaacaactcagattcgtgcattttccgggagctggggagaaaaagccgatgcttcagttttctttgcctataaaattgacttttcatgcaatgttgttagcgttgtttactctggatttgttcttctaattgaatcgaagtttactttggatttgttcttctaattgaatcgaagcttactgatgatgtggggaacatcgaagtagatctttacttgatcggaaagatagctaaggctcgtgtttctttttatgggaaagtacatttggatgctgtacaggtataaccatagtgttaacattgttcatgtttttaacccctgatgaagtacttacagttaatcttgttatatgtttttaattttcttcactctagattaccgcagcaaagcgttttcaggaaattttctttaatggcttgttcgggaggctgtttgttggatcatccagaacatcgagggaacttttatttcatagtaaaacgagcttgttgtggcatccatttaacatgtatttgcttctgcccctagaggatagtttgagtaatgaactgagaataaactggcctgggataacagcttgtacattagctgtagagtttttaactgctgacggtaacagaggtaatccgtcattgaaccaaactgattcatccgtgacagaacacaaggagaccaatgtaatccactttgctaacagatctatagatgttaacaatatcagtaacatcgtagtattggcaattcataccggaagaatctattccaccattgaattagttcatgatacatccgccaaaagttctttcaatgacattgttgatatgaactcattgaagttcgcgaccttctccgaatactacaacagaaagtaagtcattggtgattttagcaagtgttgttttatccacatggtttttacggttccactgacaacaatagctttgatcaggtactgcatcgtgctgaaacatccaggacaacctttattgctgttaaagcagagtcataacccgcacaacttgctggttgattttaacgatgaaggttggttcatttgctacctgtaatctgtcgaaaaatagtactaacttattataccttatgttctaatgatttctaatattttccctttactaagcagattttcagcacaagcattacaagcaagctcggttaatgaaaagtcatggaatactatccacatgccacccaagcttttgctcatccttgatgtcccggtctatgttctaaaagccttttacttactaccatcactgatgcaccggctcgagtccttaatgttggctagccaacttagggaagagatcgattttcgttcaagcaacttcgatataccgagctcaatggtttgctttattgctttcataactttgattgttttggaaacaagtctttcctttaataataatttgatatctttctatgctatagatcctggaagcgttaacaacgcttagatgttgtgaaagcttttcgatggagaggctggaatttctcggtgattcagttctgaagtatgctgtcagctaccacctctttcttagagatcccgagaaacacgaaggataattatcaatgatacgttcattggcactgagaaactcgacgctgcataagctgggaactgaccgcaaattacaggttcgtattttgttgtatctgtttgaacccttcttgctcattaccgggatatcatggtttttaatgctcattgtgcgtctaatatctcgacatattgtcgcctgtacaatatgtttacttcccgttgctattatcgaatattggagtctataactaggcaatgaagtatctgctaattggctacattgctttgatttcctatataatagggttacattagagacagtgctttcgacccccgacgttgggtagctccaggacaactacgtcttcggtcttttccttgtaactgcagggtggactctcgagaagttcctttagataaaaagtttcagactgaagatctggaaattaaggtcagtatatcttgtgatagaggccaccgatggatgtgttcgaaaaccatatcggattgtgttgaagctctcataggagcatactatgtaagtggtggactcattgctgctcttcatatgatgaaatggcttgggatcgatgccgaacttgatccctctttggtagctgaagccattaatcgtgcatccctacaatcttatgtccctaatgatgaaatccagattatagaatcgaaaattggatagaaattttctatgaagtttttcttacaggaggccttgacacatgcatcggcaaacgagttttactgttaccaggtagttatggaacttctctacttgtctttaaattgtcaaattggccgaataatataaatgcaagtgcatggttcgtatgtgaactcaccttcttttacttgtttaaaattatctatagaggcttgaatttcttggtgattccgtgttggacttgctgataacccgatatctctactgcaatcacaccgatatagattcaggagaactgactgacctccgatcggcttcagttagtaatgaaacttttgctcaagttgctgtccgtaatgaccttcataagcatcttcgacattgttcaactttactattggaccaaataagtgaatatgcacagtccctccctgaatcttgggacactacacgatcagtacccggcataaaaggtccaaagatatgttcaagtatcatcttttttatactaaagaattagagatagagtttccattttttatgcaacttccatgtctaccatgtggctactagaacatttatcagccattcgagattgtactttacggtctctactttctttgcaacaggctcttggagaccttattgaaagtatcgtcgcggcaatcttgatcgatacaaacctgaaccttgacgaagtttggagaattgttgagccattgttatctctgatcgtgactcccgataagctcgagttgcctccactttgagaactgaatgaattatgtgactctctcgggtatttcataagggaaaagtgcgttaatacgggagaaatggtgcatgccaagctttggttacagctggatgatattttgttggtcggagaggcattcaatcgaagcaaaaaggtagcaaaaggaaaagcagctttatatctattgaaggaactcgaggtatgtgcctattacgatttaaagctttccaagatacggaaaatgagtgagggtagtcatgttgagatcaacaattgatccataagtatttttcaggatagagggatctcccgaaagagaacgaaacaggatcatgccggttcgagtggaaccactgatgatgatttgttagagccaaaaatgtgcaagaagcagaggatagctgagattccttctccgactaacgactcttcaaggacagcatatggagctgagattccttctccggctaacgcttcttcaaggacagcatatggtttcagctccgacgccctagggatgcaacattaagttcagaatttggtattgaaaccgtatgattttctacttttcgtcatctcgaggatctgcattatgcaatctaccatcgtgaatttagaacataacgagtacatttctctctttccgtttttatagttattgcaaggataaacacaaataaaggacgaccgagggccactctttacgagatttgtcggaaacagttatggcctaggcctacattcgaaacaacagaaggaagatcacggtatgtccttttcgtttctttattttaaggttttggtttttgatttgctacagctttcccttgcagttctcctatggaaatcggcaaaggtgcagaccgaaaaatcgggtttaacagctttgtaacgaagatcaccttgaatggaccgagttcaggcattattgaatgcagcggagatgtaagagccgacaaaaagagctcttgtgactctgcagcaatccttatgctttacaggcttaaagagctagggaagctcatcatccgcgaatcctag

SEQ ID NO: 490 - DNA, 5957 bp, Gossypium raimondii
  source 1..5957: mol_type = genomic DNA
ttatattaaaaatgaaaaataattataaaatgtgcattcaccattataaaccttggttctcttttttctttaatggttttaagtttttggaaaatgttaaataactgcttaataatttttgtcttaaataaaaaaatcaaattaaatatttttttcctcaaataaataaacgctgatatcataagtattcaaaaaaaaattgttaaggtaatatttatatataaaaacattgaattactgacaagcagcggcggagtcaagatcttaaaatgaattttttttcatttagactatttataatttattaaaatttaaattagtaaaggtaaaaatacactttagccccttaaaaataataaaaatttgattgaattctttaaaaattataaagatatacattattaaaatgataaaatcgtactttttctatcgtaaaaatatacaatttaatttatataaaaacacaaattgatggaactcattttagatgcccaaacacggccaaattccattgacctttcttttattgcacgtctgatcaagttgttaatagaataagggctaagctaatctcacatgacatgaatatatacatattaattaatataatataattagtaaaaaataaaaaaatctttaaaagtaataaatactttttagaagatacatttatatatatttatataaaatttataaaataatttaaatctaaaaaagtgtcttaagagaaaccaactcattagttaaagatttaaaaattgttctcttgtaaaaggaacaaattttatcataattgtgatttttttccttttatcttttcataaattttataaaaataatttatgcccataccaattttattaacttatttttagtgattttattttattttattgattgttatattgataattttattgacataacataaagttgataatttatacctacaataaacgacttattaggtaaacgattaatatatatggagatatccaaacttattaatttataactagcttgatacatatgttttatttttttacttaattggtacctaaatttagaaaccaacttggtaaccgtgatagtcaaatatctttaaaaaaatactaaattgatttataattttcagatttaagtaccaattaagtctgaaaaatttaaatacaaagtaagtacaaattacgaaatttaatttagttaacttttaatatattaataaatttctaattttttttttgttttgcccatcaaaaagtctttctgcttaaatttcataatgattaatttaataaaaaccacaacgacagtagcagtagcacaaacggtccgtacaaccggctcagcgaaacgacaacaaaagatgcaaaattttactgcgtaaaagagttaacgtcaaaactcaaacaagaaaaaaccctcatcgaaccgacgcgtggcgggagatcttagtttaacctttttttttactcattatttattaagaaaagattcaaaaaaaaaaaaaaatccacggccatagccaaaaccttctactttgattcctccattttcgttccttgcatgcatcagcttttctcttcttcttctttttctgcaccgactattgtgaactgcactatcgacttaacggatttctttgagataatttcaggatcagattaacaattttgtctttgattcgttgatgtaaatttcccatcactgaacaaattgataaaatcattaattactgtttgttcccttgatttcgatagtttcaatgatggtttctcttttgctctttctgtttgtttccgagaaacgattttctttttcagctgtttagtcgttcgttttaattttacttgctcggcctcagtttattcagttaggaaatataagcgtcgaaaatttgcattgaatttttgcaatcagtttatctgtatttatatactaatcttgtttattctaatttttattttatttttttataaacgacttgatattgaataaaaattatttataactgcaatttatatttcctttttgtgaatctttattctttttcctaattttcctttgtttttttgacaggttgagaagcttttcttggcccatactacaagtcaaaagaatggtattattatttttgttgatttagttgtattattcgactgaccaaaagataagagaattgttatagcttaatataatgcatgctaacgctcatgtaatttctgtaggttgacaataattcgggtggagaagctgataattttgactgggatactgaagatgatctggaaatcgataattatgccatctcggccccttcgggtttgtctactccctgtggagaagctgttttgggttcggcagaggtacatgctcatgtgtaattagtttaaatagcattttggaaaggtacatgctcattgttaacttttactgcctcaaggcgggctcatctggaaattctcccaattccaagataattgatcattttgtcggaatggggttctcaagagaaatggttgccaaagtgattgaagaaaaaggttaagcttataggtttcttttacttagagcagaagtttccacctgagaattcgcttatagttctgctttgaatggtgtccaggagaggaaaactcagacttgatacttgaaaccctccttgagtactcggtgagttattgtgttgtgtatgctcttctaagatgcttctagttgcatgcgtcatgatgctagaaagttgcttcacatgctcttgtcagaattttactgctgactttttggtttttttagattacagatatcattactttattaattattgattcccctttttggtatgaaggcaagcacattacctagttcttccaattccaagttgatcgatcattttgtagggatgggattttctgaagaaatggttgtcaaagtggttcaggaaaatggtaatgaccctttctcatttccttggcagtcagttttcacctcaacaactttatatctgatcttgttctttatgtttccaggagagggaaatacagattccatattggagactctattgacatattcagtaagctatacacctgaaccttgtttcccttaatagtaatcttgataacgatgcaattgcaaaactacttgtttagtggcttaggtgatatttgccaatcctcctcaactagatttgtctgtgcaagttgttggagtacctcacaaagaattgtttattgtttctgtactttgatgaatgacctacttaaaatttgcaggcacttgaaacaactgctcccgttcagcaaaatcctgactctggtaactgctcatcagattatgaagggagtttgctgaatgatttctctgattttgatagtttttctgagaccgaggtatctaaacttgctttgattattttgtttgctcaattttctgacatttaaaaaaaaaattatcttttaccaatgaaaattttattcttgaggtggttttgcctttcttctttgtatctgcttggacaatataatgtgacctttagccatttgatttgtatttatgtagatgctacagttcggctactgatgattatgtatgttaacttgcagatgatttgagtatgtttttacatttatatttctttgttccaggaaattattagtcctagttctgaggaggggagaaaattgttacacttgacaaaaatggggtactcagaagcggaggcttcagtagccatggagagatgtggtttgtgttatcttattcatatttgcaatatattcttgttgatggttggtaggatgtcaaagtttcatttggacagtataaaggatcctagactcttcaattgttgtattgaaaatggtaaactttcatatctgtcatatatgattggcaatcaattttatcctaccgtagaagaatgttaagatcaattctcatttttactattctgtttataaaatactcaagttgcaagtctcagtagtccatagttgctttgggctttacagactaaaattgccccaacttccttttaaagaattctgagtgttcaactatgaaccttttaggtggcacccttgggcttctgtctttatagaaggtttttgcgatacttaggttttatccttggccatttttaagttgtaagagagtggtcttagttaagaattcaggttatatcttaacttcaaatgttgcaggtccagactccacaattgaggagttaacggactttatatgtgctgcacaaattgcaaaggctgctgatgcactttttccacttgaagacaaggtagtttcctttccttttttcgaacactccagacttgcaatactgtttctatatctttcatagtttgttcttttctatttactttttcaacttgttgcagatttcttcttactatttctgtaaaactttcaccaatgattttcaatctaattttgtagaagccattcagcaatggctctagtcacaagaagaggcgaaactggggttatgatttgttgttaaggaagaagaagcttaagcttgaaaagaggtttgatgaagatgatgatgtagttcatcttcctaatcctatgattggttttggggtccccaatgaaccagatcagatcactcatagagtacttccagaagcagctttagggcctccatacttctactacgagaatgtagcacttgctccaaaaggtgtttggaccaccatttcgcgcttcttatatgatgtggagcctgagtttgttgattcaaagttcttttgtgctgctgcaaggaagaggggctatgttcataatctgccaattgacaatagatttccccttcttccatttcctccacgaactattcatgaagcttttccactaacaaggaaatggtggccatcctgggacacgcgaacgaaattgaactgcttgcaaacctgtatagcaagtgcaagattgacggataagattcgcaaggcattagaagattctgatggtgaaccgctgttgggcatccaaaagtttgttctcgaacaatgcagaaagtggaatctggtttgggttggaaggaacaaggttgctccacttgaacctgatgaagtggaaatgcttttgggattccctagaaaccacacaagaggagggggaatcagtcggacagatagatacaaatcacttggtaactcatttcaggtgcgtgattcttcctatctttttcatgttctgttacttttttttttttacaaatactgattataacacaggaatgcaatgcaaagtatttagactatttcaagtgattacccaagttttgaaataattctttcatattgctgtccgatgtgcacaaattctcatggttgagatattgtgcttatagaagaattgatttcagattgacacagtggcgtatcacttttcggttttaaaagataagttccccggtggtatcaatctgttgtctcttttctctgggattggaggtgcggaggttgctctccaccgactcggtatccctttgaaaaatgtggtagcggtggaaatagctgaagtgaaccgaaatattcttaggagttggtgggaacaaacaaaccagagaggtactttgactgacatccaagatgttcaagaactaaacggggaccgtttggagcaactgattaaaaattttggaggatttgaccttgtggtgggagggagtccttgcaacaacctcactggcagcaatagatatcatcgagacggactcgaaggtaaagattctgccctcttctttgatttctgtcgaatactggatttggtgaaatgtattatgaatggcacgaaatcaatgattgtctgaagaagattgcatttgaaataatttccgaaactcctcttaatatcaaattaaaagggaaatgaagtgctgtttaagcaaatatatatttatcattccggcttactcgtcgtattagacactgttt

SEQ ID NO: 491 - DNA, 5957 bp, Gossypium raimondii; identical to SEQ ID NO: 490
  source 1..5957: mol_type = genomic DNA

SEQ ID NO: 492 - DNA, 5324 bp, Gossypium raimondii
  source 1..5324: mol_type = genomic DNA
tgacatgaatatatacatattaattaatataatataattagtaaaaaataaaaaaatctttaaaagtaataaatactttttagaagatacatttatatatatttatataaaatttataaaataatttaaatctaaaaaagtgtcttaagagaaaccaactcattagttaaagatttaaaaattgttctcttgtaaaaggaacaaattttatcataattgtgatttttttccttttatcttttcataaattttataaaaataatttatgcccataccaattttattaacttatttttagtgattttattttattttattgattgttatattgataattttattgacataacataaagttgataatttatacctacaataaacgacttattaggtaaacgattaatatatatggagatatccaaacttattaatttataactagcttgatacatatgttttatttttttacttaattggtacctaaatttagaaaccaacttggtaaccgtgatagtcaaatatctttaaaaaaatactaaattgatttataattttcagatttaagtaccaattaagtctgaaaaatttaaatacaaagtaagtacaaattacgaaatttaatttagttaacttttaatatattaataaatttctaattttttttttgttttgcccatcaaaaagtctttctgcttaaatttcataatgattaatttaataaaaaccacaacgacagtagcagtagcacaaacggtccgtacaaccggctcagcgaaacgacaacaaaagatgcaaaattttactgcgtaaaagagttaacgtcaaaactcaaacaagaaaaaaccctcatcgaaccgacgcgtggcgggagatcttagtttaacctttttttttactcattatttattaagaaaagattcaaaaaaaaaaaaaaatccacggccatagccaaaaccttctactttgattcctccattttcgttccttgcatgcatcagcttttctcttcttcttctttttctgcaccgactattgtgaactgcactatcgacttaacggatttctttgagataatttcaggatcagattaacaattttgtctttgattcgttgatgtaaatttcccatcactgaacaaattgataaaatcattaattactgtttgttcccttgatttcgatagtttcaatgatggtttctcttttgctctttctgtttgtttccgagaaacgattttctttttcagctgtttagtcgttcgttttaattttacttgctcggcctcagtttattcagttaggaaatataagcgtcgaaaatttgcattgaatttttgcaatcagtttatctgtatttatatactaatcttgtttattctaatttttattttatttttttataaacgacttgatattgaataaaaattatttataactgcaatttatatttcctttttgtgaatctttattctttttcctaattttcctttgtttttttgacaggttgagaagcttttcttggcccatactacaagtcaaaagaatggtattattatttttgttgatttagttgtattattcgactgaccaaaagataagagaattgttatagcttaatataatgcatgctaacgctcatgtaatttctgtaggttgacaataattcgggtggagaagctgataattttgactgggatactgaagatgatctggaaatcgataattatgccatctcggccccttcgggtttgtctactccctgtggagaagctgttttgggttcggcagaggtacatgctcatgtgtaattagtttaaatagcattttggaaaggtacatgctcattgttaacttttactgcctcaaggcgggctcatctggaaattctcccaattccaagataattgatcattttgtcggaatggggttctcaagagaaatggttgccaaagtgattgaagaaaaaggttaagcttataggtttcttttacttagagcagaagtttccacctgagaattcgcttatagttctgctttgaatggtgtccaggagaggaaaactcagacttgatacttgaaaccctccttgagtactcggtgagttattgtgttgtgtatgctcttctaagatgcttctagttgcatgcgtcatgatgctagaaagttgcttcacatgctcttgtcagaattttactgctgactttttggtttttttagattacagatatcattactttattaattattgattcccctttttggtatgaaggcaagcacattacctagttcttccaattccaagttgatcgatcattttgtagggatgggattttctgaagaaatggttgtcaaagtggttcaggaaaatggtaatgaccctttctcatttccttggcagtcagttttcacctcaacaactttatatctgatcttgttctttatgtttccaggagagggaaatacagattccatattggagactctattgacatattcagtaagctatacacctgaaccttgtttcccttaatagtaatcttgataacgatgcaattgcaaaactacttgtttagtggcttaggtgatatttgccaatcctcctcaactagatttgtctgtgcaagttgttggagtacctcacaaagaattgtttattgtttctgtactttgatgaatgacctacttaaaatttgcaggcacttgaaacaactgctcccgttcagcaaaatcctgactctggtaactgctcatcagattatgaagggagtttgctgaatgatttctctgattttgatagtttttctgagaccgaggtatctaaacttgctttgattattttgtttgctcaattttctgacatttaaaaaaaaaattatcttttaccaatgaaaattttattcttgaggtggttttgcctttcttctttgtatctgcttggacaatataatgtgacctttagccatttgatttgtatttatgtagatgctacagttcggctactgatgattatgtatgttaacttgcagatgatttgagtatgtttttacatttatatttctttgttccaggaaattattagtcctagttctgaggaggggagaaaattgttacacttgacaaaaatggggtactcagaagcggaggcttcagtagccatggagagatgtggtttgtgttatcttattcatatttgcaatatattcttgttgatggttggtaggatgtcaaagtttcatttggacagtataaaggatcctagactcttcaattgttgtattgaaaatggtaaactttcatatctgtcatatatgattggcaatcaattttatcctaccgtagaagaatgttaagatcaattctcatttttactattctgtttataaaatactcaagttgcaagtctcagtagtccatagttgctttgggctttacagactaaaattgccccaacttccttttaaagaattctgagtgttcaactatgaaccttttaggtggcacccttgggcttctgtctttatagaaggtttttgcgatacttaggttttatccttggccatttttaagttgtaagagagtggtcttagttaagaattcaggttatatcttaacttcaaatgttgcaggtccagactccacaattgaggagttaacggactttatatgtgctgcacaaattgcaaaggctgctgatgcactttttccacttgaagacaaggtagtttcctttccttttttcgaacactccagacttgcaatactgtttctatatctttcatagtttgttcttttctatttactttttcaacttgttgcagatttcttcttactatttctgtaaaactttcaccaatgattttcaatctaattttgtagaagccattcagcaatggctctagtcacaagaagaggcgaaactggggttatgatttgttgttaaggaagaagaagcttaagcttgaaaagaggtttgatgaagatgatgatgtagttcatcttcctaatcctatgattggttttggggtccccaatgaaccagatcagatcactcatagagtacttccagaagcagctttagggcctccatacttctactacgagaatgtagcacttgctccaaaaggtgtttggaccaccatttcgcgcttcttatatgatgtggagcctgagtttgttgattcaaagttcttttgtgctgctgcaaggaagaggggctatgttcataatctgccaattgacaatagatttccccttcttccatttcctccacgaactattcatgaagcttttccactaacaaggaaatggtggccatcctgggacacgcgaacgaaattgaactgcttgcaaacctgtatagcaagtgcaagattgacggataagattcgcaaggcattagaagattctgatggtgaaccgctgttgggcatccaaaagtttgttctcgaacaatgcagaaagtggaatctggtttgggttggaaggaacaaggttgctccacttgaacctgatgaagtggaaatgcttttgggattccctagaaaccacacaagaggagggggaatcagtcggacagatagatacaaatcacttggtaactcatttcaggtgcgtgattcttcctatctttttcatgttctgttacttttttttttttacaaatactgattataacacaggaatgcaatgcaaagtatttagactatttcaagtgattacccaagttttgaaataattctttcatattgctgtccgatgtgcacaaattctcatggttgagatattgtgcttatagaagaattgatttcagattgacacagtggcgtatcacttttcggttttaaaagataagttccccggtggtatcaatctgttgtctcttttctctgggattggaggtgcggaggttgctctccaccgactcggtatccctttgaaaaatgtggtagcggtggaaatagctgaagtgaaccgaaatattcttaggagttggtgggaacaaacaaaccagagaggtactttgactgacatccaagatgttcaagaactaaacggggaccgtttggagcaactgattaaaaattttggaggatttgaccttgtggtgggagggagtccttgcaacaacctcactggcagcaatagatatcatcgagacggactcgaaggtaaagattctgccctcttctttgatttctgtcgaatactggatttggtgaaatgtattatgaatggcacgaaatcaatgattgtctgaagaagattgcatttgaaataatttccgaaactcctcttaatatcaaattaaaagggaaatgaagtgct

SEQ ID NO: 493 - DNA, 6344 bp, Gossypium raimondii
  source 1..6344: mol_type = genomic DNA
tcaagttaaaattgtactttaatcctccctaaaaatgataaaaattctatttaatcattttaaaaatataaagatgtaatgtattcaaaagataaaattatatttttactatcgtaaaaattaaaatataatttcgacttccctataattttttttatgtctttgtctcccactaagggcttgtttagtagtacttaaaaaaaaacacttttagcttgaaaaacatttttgaaaaaaaaaaactatgctaaacaagttacctttgattgaaatttttgactttttaaaaaacacatttgaaaaacacttttgaagatgaaaagtatttttggtgcttaattattttttcacccctccaacaacatattacttttcctcctccttttttttcttggtacttaatttcacatatgttaaattcattaattaaaataaattctttttttaaaataatacaattgtgttaatattaaatggttttatttaaatattcacaatataatttatatattataattaaattttataaataattaatatttattgcttaaaaatatttaaaatttatatttcatatattaaaatattaaccacaagttataataaattattttttatattcttattaaaatataataatactaactaatttaaacattatttaaatgcatatctgctactcgataataccatatctaaaatagatattttatttctgaaaagtattttttaataacaatactaaaccaaaattttcaaaccatttctcaaaaacattttttaaaagcattattaaactagcattaaattaggacagttgtggaaaatttttatgtaaaacataaacaaataataagttttaagttaaaaaattggagtttttaaaaatcaaatagcgtccatggcgtccaataatttcaattcaacagccaaacaggcccgagattcgatactttcacttccatctatacggtctcgtcaactctcaactaaagtggggaaaagataatctcacatgcgtgtggatgaaaattaatatatattagataatttaattaatttgaattagaattagaattatcaatacaatttataaaaataaacttaaattttaatttattgattgggtgttcgcttttttaaaaaaaatttgaatttaaattgctataaaaaatttaaaacaacttaatttaattagaaggataaccagtttataactgaactccaacgacctcgcagtggcacgattattccatgctacctacagaggaaaacggaaaactgctgcaaattttaactgcgttagattttatttatttattaatctactttacttttcactgcccctcaagaattccgattccctttttatttataatataaaaagaaataatataatatttttataaataaagaattataacacttttttttctaattaaatatattatttttaacacgtaaataaattatgtcatattttttcaataaattattataaatatttataaataattacataggtgactttccaaacacaatcatagttatagaaaaaaattgaaaaaccctgtgaaaactgaacccacagctcctcgtttcctcttcttctccgttaccgccgttggggcttcccctatgtatattttatttctttttctccaccggtaacttctgtgtcagaactcgtcgacgatcgccgctgctgccgtgtatccttcttctttctttgtcctttcctccattctctttccttttcctccttctgttttttttcttctcttctcagttctcccgctgccgtgtccgtcggtttccgccggatctgatctcgtattcagtgtcggaaatccgtgtcggatcgtgtcgacactggtacggcacccctaattgccgagtccgggtaacggagttctgataagttttcattgtttcttttacaggttaagaaactgttcttgggctgtactatagctcaaggaaaatggtactctcaagttctattacttttttattccttaatgttatgtgtcgtcgtaatattcttcctgtatttttctaaaaattctcatttgtgcactaggctgtcagttggctaaaagaaatgaaaattctttagttatttaatcttatatatattgtatttgatattatgaatttgtgtgtggttttgtaatttttgtaggatcaaaatggttctggtggtgatgctgataattttgactgggataccgaagatgagctggaaattgataattatgcaatcgcctctcgctcaggagtgtcacttaccaatggggaagctgttttaggcacagcagaggtacttgcccatgcataattgcatcacatggcattctggaaattttaacatgcaaatcgttttaatgattatgaaaattatctacgatgaagttttctttcatttttaatttccaaagaaacattatagatattaattgatgagttcctatgggaattttctctggaggtcactgtagtttcgcatctccttttcatgcactgctttatttagttgatgacattactaatgtccctggcttaaatttcattgattagcctccatagcaatgaatatgtatgccaaaacgaactcacggttaacttttattgtctcaaggtgagctcgtctgcagattctccgaattccaagttaattgatcattttgttgggatggggttctcccaggaacttgttacgaaagcaattgaggaaaatggtaaagcttctaggtctttactacttagagcacaagtttccatcttaactcatttataatcctgctttcctattgtccaggagaggagaattcaaatttgatacttgaagctctccttcggtactctgtgagttgtacatcctatttaaagatgcttattagttacacaccccttgatgatagagagctgctgcggcttttgtggtggaactgttactgttaaattactgacgttttagtgtgcagatttcataataagttcttgatttctctttttcgcatgcaggcaagctcgttggctagttcttccaattccaagttgattgatcattttgttgggatgggattctctgaagaaatggttctcaaagcggttcaagaaaatggtaatagtcctttctcattttattagacatcacttttgacctctattgctttatctgtggtcatgtctatattttcaggagaggggaatacagataccatattggagactctattgacatattcggtaagctgtacacctgaaacctttgtttagttatttctgaagcatttattatttgtttgggaaagaaacctattgacgttacttggaatcttgatattgatgcaataacaagtcaacatattcagtggttcaggtcatattgacaatcctccccaaatagaatcatctttccgttgttgaactatctagcaaattagttgtttgctctctctgttatatcatgaatgattaatttaagattgcaggctcttgaaaagtctgctcctgtgcaacaacatgctgattctgatgacttctcgtcagattgtgaagggaattttttggatgatttcacagatattgatagttcttctgataccgaggtatctatcctttaatgttacatttgcacaatttgcggaaatttctaaaagttaccttttgtgaatacaatgagaaaatttaattttaaaagctgttgtgctttagttttctagccacatggataataaaatgtggcctatagtcattgatttgcctttttctttttatagattttataatttagttactgaatagttatgtattttatcgcattttacttgtagattatttatgtatgttgtttctttttgtatttctgtgctctaggaaataattaatactggttctgatgaggagagtaaactgttgtacttgacaaaaatggggtactcagaggctgaggcttcagtagccatggagagatgcggtgagtgtttttatttttttcagaggaagaacaacaaaacacaactttagatttggtgccatgttaagcatcctacacaacagattgattacatgcgaaggacatgacttgaatacaggaccacacgaaagcgaataattaatagatgtggaataacaccacttaacataaagtatcaaaattggaattcccaataacccattgcagacatgataaatttgctccaagggtctgtacttgtagggaaacccaagtgttttctttaacccaaggtttcagtaattaactttctctctctttggcttccatctttataggagaagattgtgatactttggaggttttatcctaagtcttttatgttgcaagaggggaatgtatttcttgcactaacattagctcttcaaatattgcaggtccagactcatcaattgcagagctgacagactttatatgtgctgctcaaatggctaaggctgctgatgcacttttccctgttgaagacagggtagtctcttccccctttccaagaattcacttattatacgctttctgaatattttgtactttattgtttcatgtttacattttaattaagagaatatgccaatttgctgtagtttctgtgtatgattttcggtaaaacttactcttgccatccaatctaacagaagccattctgcaatggctctaattacaataaaaggcgaaacttgggctatgatttgtggaaaaggaagaagcagatgaagcttgaaaagaagcttcttaatgaagatgatgatgcccttcatcttcctaatcctatgattggttttggggtcccaactgaaccagatctgataactcaaagaacacttccagaagctgctgttgggcctccttatttctactatgagaatgtggcacttgctccaaaaggcgtttggagcaccatttcacggttcttatatgatgtggaaccagagtttgttgattccaagtttttttgtgctgctgctcggaaaaggggctatattcataatctgccaattgagaacagatttccccttcttccatttcctccacgcaccatacatgaagcttttccgttgacaaggaaatggtggccttcctgggacccaagaacaaaattgaactgcatacaaacatgtacagcgagtgcgagattgacagaaaggatccgcaaggctcttgaagcttatgatggtgagccacctttgaatgtccagaaatacgttcttgatgagtgcagaaagtggaatctagtatgggttggaaggaataaggttgcgccacttgaagctgatgaggtggaaatgcttctgggtttccctaaaaaccatacacgaggaggaggaatgagtcggacagataggtataagtcacttggcaattcattccaggtgtgtgacttttactctttttctttcccataattgcttcattcctatattaatggttatgattcatgaatgtggactatgtttctgctattatttgattccttttgagtaattctttggtttcgagatacatgatccatgcttgcagtattgtgccttaaagaaaaagcttatttcaggtcgacacagtggcttatcatctttcagttttaaaagacatgttccctggtgggatcaatcttctgtctcttttctctgggattggtggtgccgaggttgccctccaccggcttgggatacccctgaagaatgttgtatcggtggaaatatcggaggtgaatagaaacatagtaaggggttggtgggagcaaacgaatcagcgggggactttgattgatatagcagatgtgcaagaactgaatggtgatcgattggagcaattgatgagtagatttggtggatttgaccttgttgtgggtggcagcccatgtaacaaccttgcgggtagcaacagacatcatcgagatggactcgagggtaaagaatcttctctcttcttcgattattgtcgtatattagacttggttagatgcatgcaaaggaaccaatgatttgatgtaaagggggctgatttgtggatacttgctccaaactgtatttatcttgcatcttcattattgcctgagcataacattgaaataatgactgacattctttgcaacttatgacaacttcaaattcttagggaaatgaaaattgatggaaaagttgttggttactgttttccccaagtttgtttgtcactgggaatctttccattttgcttgagtattaaacttatattatccgggtttaggagtgagtggtgtacattggatattttaaaataacaatgtacagattggatgatgaaattgataaggatatggatgaagttgatctgttacttcaatttt

SEQ ID NO: 494 - DNA, 6071 bp, Gossypium raimondii
  source 1..6071: mol_type = genomic DNA
aaatttttgactttttaaaaaacacatttgaaaaacacttttgaagatgaaaagtatttttggtgcttaattattttttcacccctccaacaacatattacttttcctcctccttttttttcttggtacttaatttcacatatgttaaattcattaattaaaataaattctttttttaaaataatacaattgtgttaatattaaatggttttatttaaatattcacaatataatttatatattataattaaattttataaataattaatatttattgcttaaaaatatttaaaatttatatttcatatattaaaatattaaccacaagttataataaattattttttatattcttattaaaatataataatactaactaatttaaacattatttaaatgcatatctgctactcgataataccatatctaaaatagatattttatttctgaaaagtattttttaataacaatactaaaccaaaattttcaaaccatttctcaaaaacattttttaaaagcattattaaactagcattaaattaggacagttgtggaaaatttttatgtaaaacataaacaaataataagttttaagttaaaaaattggagtttttaaaaatcaaatagcgtccatggcgtccaataatttcaattcaacagccaaacaggcccgagattcgatactttcacttccatctatacggtctcgtcaactctcaactaaagtggggaaaagataatctcacatgcgtgtggatgaaaattaatatatattagataatttaattaatttgaattagaattagaattatcaatacaatttataaaaataaacttaaattttaatttattgattgggtgttcgcttttttaaaaaaaatttgaatttaaattgctataaaaaatttaaaacaacttaatttaattagaaggataaccagtttataactgaactccaacgacctcgcagtggcacgattattccatgctacctacagaggaaaacggaaaactgctgcaaattttaactgcgttagattttatttatttattaatctactttacttttcactgcccctcaagaattccgattccctttttatttataatataaaaagaaataatataatatttttataaataaagaattataacacttttttttctaattaaatatattatttttaacacgtaaataaattatgtcatattttttcaataaattattataaatatttataaataattacataggtgactttccaaacacaatcatagttatagaaaaaaattgaaaaaccctgtgaaaactgaacccacagctcctcgtttcctcttcttctccgttaccgccgttggggcttcccctatgtatattttatttctttttctccaccggtaacttctgtgtcagaactcgtcgacgatcgccgctgctgccgtgtatccttcttctttctttgtcctttcctccattctctttccttttcctccttctgttttttttcttctcttctcagttctcccgctgccgtgtccgtcggtttccgccggatctgatctcgtattcagtgtcggaaatccgtgtcggatcgtgtcgacactggtacggcacccctaattgccgagtccgggtaacggagttctgataagttttcattgtttcttttacaggttaagaaactgttcttgggctgtactatagctcaaggaaaatggtactctcaagttctattacttttttattccttaatgttatgtgtcgtcgtaatattcttcctgtatttttctaaaaattctcatttgtgcactaggctgtcagttggctaaaagaaatgaaaattctttagttatttaatcttatatatattgtatttgatattatgaatttgtgtgtggttttgtaatttttgtaggatcaaaatggttctggtggtgatgctgataattttgactgggataccgaagatgagctggaaattgataattatgcaatcgcctctcgctcaggagtgtcacttaccaatggggaagctgttttaggcacagcagaggtacttgcccatgcataattgcatcacatggcattctggaaattttaacatgcaaatcgttttaatgattatgaaaattatctacgatgaagttttctttcatttttaatttccaaagaaacattatagatattaattgatgagttcctatgggaattttctctggaggtcactgtagtttcgcatctccttttcatgcactgctttatttagttgatgacattactaatgtccctggcttaaatttcattgattagcctccatagcaatgaatatgtatgccaaaacgaactcacggttaacttttattgtctcaaggtgagctcgtctgcagattctccgaattccaagttaattgatcattttgttgggatggggttctcccaggaacttgttacgaaagcaattgaggaaaatggtaaagcttctaggtctttactacttagagcacaagtttccatcttaactcatttataatcctgctttcctattgtccaggagaggagaattcaaatttgatacttgaagctctccttcggtactctgtgagttgtacatcctatttaaagatgcttattagttacacaccccttgatgatagagagctgctgcggcttttgtggtggaactgttactgttaaattactgacgttttagtgtgcagatttcataataagttcttgatttctctttttcgcatgcaggcaagctcgttggctagttcttccaattccaagttgattgatcattttgttgggatgggattctctgaagaaatggttctcaaagcggttcaagaaaatggtaatagtcctttctcattttattagacatcacttttgacctctattgctttatctgtggtcatgtctatattttcaggagaggggaatacagataccatattggagactctattgacatattcggtaagctgtacacctgaaacctttgtttagttatttctgaagcatttattatttgtttgggaaagaaacctattgacgttacttggaatcttgatattgatgcaataacaagtcaacatattcagtggttcaggtcatattgacaatcctccccaaatagaatcatctttccgttgttgaactatctagcaaattagttgtttgctctctctgttatatcatgaatgattaatttaagattgcaggctcttgaaaagtctgctcctgtgcaacaacatgctgattctgatgacttctcgtcagattgtgaagggaattttttggatgatttcacagatattgatagttcttctgataccgaggtatctatcctttaatgttacatttgcacaatttgcggaaatttctaaaagttaccttttgtgaatacaatgagaaaatttaattttaaaagctgttgtgctttagttttctagccacatggataataaaatgtggcctatagtcattgatttgcctttttctttttatagattttataatttagttactgaatagttatgtattttatcgcattttacttgtagattatttatgtatgttgtttctttttgtatttctgtgctctaggaaataattaatactggttctgatgaggagagtaaactgttgtacttgacaaaaatggggtactcagaggctgaggcttcagtagccatggagagatgcggtgagtgtttttatttttttcagaggaagaacaacaaaacacaactttagatttggtgccatgttaagcatcctacacaacagattgattacatgcgaaggacatgacttgaatacaggaccacacgaaagcgaataattaatagatgtggaataacaccacttaacataaagtatcaaaattggaattcccaataacccattgcagacatgataaatttgctccaagggtctgtacttgtagggaaacccaagtgttttctttaacccaaggtttcagtaattaactttctctctctttggcttccatctttataggagaagattgtgatactttggaggttttatcctaagtcttttatgttgcaagaggggaatgtatttcttgcactaacattagctcttcaaatattgcaggtccagactcatcaattgcagagctgacagactttatatgtgctgctcaaatggctaaggctgctgatgcacttttccctgttgaagacagggtagtctcttccccctttccaagaattcacttattatacgctttctgaatattttgtactttattgtttcatgtttacattttaattaagagaatatgccaatttgctgtagtttctgtgtatgattttcggtaaaacttactcttgccatccaatctaacagaagccattctgcaatggctctaattacaataaaaggcgaaacttgggctatgatttgtggaaaaggaagaagcagatgaagcttgaaaagaagcttcttaatgaagatgatgatgcccttcatcttcctaatcctatgattggttttggggtcccaactgaaccagatctgataactcaaagaacacttccagaagctgctgttgggcctccttatttctactatgagaatgtggcacttgctccaaaaggcgtttggagcaccatttcacggttcttatatgatgtggaaccagagtttgttgattccaagtttttttgtgctgctgctcggaaaaggggctatattcataatctgccaattgagaacagatttccccttcttccatttcctccacgcaccatacatgaagcttttccgttgacaaggaaatggtggccttcctgggacccaagaacaaaattgaactgcatacaaacatgtacagcgagtgcgagattgacagaaaggatccgcaaggctcttgaagcttatgatggtgagccacctttgaatgtccagaaatacgttcttgatgagtgcagaaagtggaatctagtatgggttggaaggaataaggttgcgccacttgaagctgatgaggtggaaatgcttctgggtttccctaaaaaccatacacgaggaggaggaatgagtcggacagataggtataagtcacttggcaattcattccaggtgtgtgacttttactctttttctttcccataattgcttcattcctatattaatggttatgattcatgaatgtggactatgtttctgctattatttgattccttttgagtaattctttggtttcgagatacatgatccatgcttgcagtattgtgccttaaagaaaaagcttatttcaggtcgacacagtggcttatcatctttcagttttaaaagacatgttccctggtgggatcaatcttctgtctcttttctctgggattggtggtgccgaggttgccctccaccggcttgggatacccctgaagaatgttgtatcggtggaaatatcggaggtgaatagaaacatagtaaggggttggtgggagcaaacgaatcagcgggggactttgattgatatagcagatgtgcaagaactgaatggtgatcgattggagcaattgatgagtagatttggtggatttgaccttgttgtgggtggcagcccatgtaacaaccttgcgggtagcaacagacatcatcgagatggactcgagggtaaagaatcttctctcttcttcgattattgtcgtatattagacttggttagatgcatgcaaaggaaccaatgatttgatgtaaagggggctgatttgtggatacttgctccaaactgtatttatcttgcatcttcattattgcctgagcataacattgaaataatgactgacattctttgcaacttatgacaacttcaaattcttagggaaatgaaaattgatggaaaagttgttggttactgttttccccaagtttgtttgtcactgggaatctttccattttgcttgagtattaaacttatattatccgggtttaggagtgagtggtgtacattggatattttaaaataacaatgtacagattggatgatgaaattgataaggatatggatgaagttgatctgttacttcaa

SEQ ID NO: 495 - DNA, 6168 bp, Gossypium raimondii
  source 1..6168: mol_type = genomic DNA
gaatagaaaacaacatcacaagcaataaatttatgtagaaaagaaaatggaagaccaaaatgtaaatttaaacaaaaattatcaatttttttttataatctatattaatagtagtattacatgaggataaaagggtttatgggtcgagccaaggctagattagaaaaaaaagaagaagctcaaacatgacttaattcaatcttagaattttaaattgaaacctgatttatatatttcaatttagataattttctttgtatttgattgggtggaaaagtggagagacagaaagggaaagtgaaaagtggaaataaaataaaatttgagtgtaaaaaaagaagaagagatagtcgttttctattctaatgtataaaaataatatttttgaattgaattgatgagaagagagaaaatgtcaaagggggataggagcatctgtcgacaaaagaatcaccctaagatgatcatctcatggctatcgagaatgaatcaaattagttggttctatttctcaatctttctgacttgctcctacggaaccaaggccgaaaagattaagaaaaatcatgcattcacaaccattgatgaaggattccacaaaaagttaaagattagtaatccgttttagaatcgagtgggttcgatcttatacgtacacaaggaaggtaataaaaaaatagaaagaatataagttattatttacttttataacttaggagctgtgcaatatgaaagtctcatgcatggctttgaatgggagaaagaaatggcagtcagagaccgattctcattagagcgtagggcccttggcctcccaaattttttttaaaaaattttagttataccctcaaaatttttgaagattttaattaaaccctctaaagtttttgaaatatattattaaacctttgaaaatttttaaaaatttcaattaggctcttcaaaattttttttttgttgtaaatattcacaaaacctctaaaatttttgtaaggaaacaaaaaatcctccacattgatgatttcacgaaatacctcccaatctccatattccacgctttcgtacggatcccgccgtaccatcccaactaaccaaccgcattacactcgcccttaaagccacttgattaaaaatcaaagcccttatttgtatctaaatcgcgagtacatggttttaacatactctcgagaagccgtcggacccaggagaaattgaaacgaccaatttgttgccaaccgcatattggcatttgaaagtcgtactgttcttcacttattctggtaagcaaagcgcagacaattttttctcaattaaaaaaaaaaagattttcatcgcattgttttttttgttgtaactctaggtttttcaaggttttcagtgttccacggcggtgattttgcgacgacggtgatctgttttcaagcttcttgccaaagtttcgtcaacgaatcatcgtctttgtaaggtaagtcattactgtttgttgcgttttttttttttgaatagtgcctttttgcttaacgtattgtatatctgtgtgtgtgtgtgtttactctgtttggctttaacgagatagtgaaggaaaaggagaaggaaaatgtcgatacatgatatatatgtgcttgctctgtttggctttgacgaaagtgaaggaaaatgttaatgtataacttcatttttttgttatgaacactgacgtttctgtttaccataggttggattcacttgctatttagtttagcaatttaatcattgagtttatcaattatcatgttattcatcatatatgtgaagtttcaaatggatgcaatatttctattatattaatggacaatcgaaaatcacatattcaccgaatgaaagttttttttatatcaaaccaataattagacatttttaatctatttaaaattctacatgtgtcttccactttaggaagatgaagtttgacactagtgaaagtttaccctcttgtatatatttgctctgttcattgaaaagtcctctagtttacttaatttggctgttgaatgcttgttagaaatgaaatgacaattgaatttaagtttgtagctgcttcatatgtctcaatttttgcattttctttactatgctctgcttgtatatgattttatttgctgaagatgtggctttttgtcatgtatatatatagtttctaagaagctgaggcctcgtaatggtttcaaaagtttcttttatgctttgcttttattataatcagacacttcactttcttcagaagggtaaacttttgaaatctgttaatgcatttaaggaattttcaaaagtttactaaagatgtgtaatgctttaattttgaatataggatttcatggaattattagactttgagctaggtacttgtgttttgaataaggactatctttagtgaatggtcattggttcgtgcacttatgggtggcaaattttgagatgctatggaatccacttgtcacatttagtcattatactgcatcatatctgcatatactttctagttgtttacaaacttaaagatgtgtctatttttatttcgtgatgaccagatgtttgttcatccatggaagggcatcattgccaatattccaacaacattgcaagatggaaaacatgtaggggaaagtggaaggaaactgagggaggatttggcaaaaaagggattcaatccattgaaggttcaacctctttggaaccgacacggtcactcaggatacgccatagtagagttcaataaagaatgggatggttttaacaatgccatcatgtttgaaaagagttttgaattggaccattatggaaagaaggattactactcatctcggaggaaaaaagacaaattgtatgcatgggttgctcgtgaagacgactactactctggtggactgattggtgaatatcttcgtaggaacggagacttgaagaccgtttcgagcaaagaagccgaagatcgaaggaagacctcaaagctattgacaacactaaacaataccttggagaccaagaatcaacgccttcaggaaatgcagaacaaattcaatgaagtgagtagctcaatgagtacattgatgtggcaaaaagatgacatgatcagagcttataatgaaggtatgctacaatcctagtttctaaaagggatttaaattcaatttatactattctaattgttaacgggttatagtttataatgtgtagagtgtaaaaagatgcaggagaatgctcataatcatttcaagcagatttctttagaacatgagaggaatgcaaaatgtattctagaccagaaaagagaattagagcagcgtgagaaggaattgttgcaacgggaggcccaaaatgaaaatgagaccaaaaaacttcagcacgagaagatgatagtatgttgaacatatttaaaatagtgtatcaaaattttaaacacatgtaccgatattttttgataccttagatacaagttgtccaatatagtaggtatagcaattagcccttttatctaaaccataataacaaaaattgatttagtgaacctatcatattacttcctatctatacaaatcaaaatattcataaattgttttggcagaacgagagagcagccttggaacaaaagaaggctgatgaaactatgttcaaactggctgaagagcacaaggtatatctttggtcttcatattgtgtgctattttcaatttctagaatctcttcatttaccatttatttattttcctatgtcagagagataaagagaaacttcacagagaaatcattaagctagaaaagcaacttgatactagacaaggattagaacttgagatacagcgtttgagaggggctttacaagtgatggagcacatgaatggtgatggggatgcagacacaaagaaaaggatggaggtaattcaagatgaactgaaagaaaaggaagaagaactggaagacttggaagatcttaatcaagctcttatcatcaaggaacgcaaaagcaatgatgagttgcaagatgcccgaaaagagctaatcactgtaagtatatgttatattccccttttttcttttcttagaaaacgtgtataagagctaaccactggcatgttatattacttgagatacgacctttcacatacatgtctgtgtctaacagtgacgttcaagcctctcgtaatataacttgcatgcaatacttaatttcaaaaataatagtaatgttgaacatcaaaaaatttctgagtttgtgttttgaagcgatggaaaaagggttagctatttaatatttattgtcctttaaaaaattctgaattttggttttgtcttttttgtttcagtcactttaaaacacgacaagttaatttttaacgttcaatctcactatagtgtttaaaattttaccttttttgcttcaaaatcacttttatagtaatggaattagtttagttagatgaagaacttacatgcatcaacttgcctttgcatattttgaagaaagatagaagcttaacaagtgctttctatatatatatatatatacggtgtccatgaattttgcaagagatttttgtgttacttgatttttgtttcacaggcatttaaagatgtttccaccagagctcatattggtgtcaagaaaatgggagaagtggacattaaacccttcttagttgctgccaaaagaaaatactcagctaaagaagctgatgtgaaatcagcagagctatgtacactgtggcaagactatcttagagatcctagctggcatccttttaaaatcctcaaagacaaggaaggaaattgcaaggtaattttttctctctatattttacacccattcaatttccccctctttaataactgttattgcttgactatctttatccttatttgtccttaaggtgtaacaatagggaaatgatcagtttatcctatctttcttattcggattcagataagtgtcaagacaggggcaaagttagaaattttattttgtgggtgtgagataaaattataaaattttggaggagccaaggttaacttttatgttaaaatgttcaaattacattattaatttttttgaggggctaaaaatgcaaaaaattcatttagtcaaaaacaaaaggacttaatttgcataatttatattatgggaggagctaaatgaatatttccccatttaacaaaagggtgtcagttgcgaatatgcttatttttcaaataaattcttatatattcgaaggataatatctttatacttgtatctaagtaacatactgaatttgttgccgtatgacgttggcttgtctttagacttgtttagtggccggattactttcttgagaggtctaacttgcttgggccgtgtttggagaaggtgtcagagtttgggcaattccctactcatactgccccgaatattaatataaaaatatgatctaaaaaattttcggacatccattatttaacttatcaagttgtcttgctcttatgacttaactttattctctctataggctaaaaaatagtgatttttcttttacaggaaatacttgatgaggaagatgaaaaattggtcgaactcaagacagagctcggcgacgaagcatacaatgctgtgacgatggcattgaaacagatgaacgagtacaatccgagcggcagatacgtagtaccggaactttggaatttcaatgaaggaaggaaggcaacattaactgatggagtgcaacatttactgaacaaatggaaactgcataagcgtaggagatactaaaatttcttcatcaattttctttcactgaaggatcattttgcaaatcttcgaaaaaaaggtaaacttatactgcaagacagagaaaatgtgttaattcttcccccaagtaaaccaagttgaacgtacttttttgttttaagaagtttgattaggtttttactagttcgagctccaacttaatatacttgaattagtcaatgattgagcttggattaaatttcaaactcttttttcgagtggaactgtatttagcttatttgaattttttttggagttgaatggtattagaggtaaaagttaggagtgtaaaagaattgttctcaagcaaacaaagctttgtttgcatttgtttgtttatttttaaagttgtttatgttcggttcgtattc

SEQ ID NO: 496 - DNA, 6318 bp, Gossypium raimondii
  source 1..6318: mol_type = genomic DNA
ttataaatttaacatgtattatttataattatataattttaaaaaataataattttgaagtcaatttttaatttttatatatcaaggctgctaagagatcctcatatattaaaataacttacactaattttttatttgaaaaataatttagaatagaaaacaacatcacaagcaataaatttatgtagaaaagaaaatggaagaccaaaatgtaaatttaaacaaaaattatcaatttttttttataatctatattaatagtagtattacatgaggataaaagggtttatgggtcgagccaaggctagattagaaaaaaaagaagaagctcaaacatgacttaattcaatcttagaattttaaattgaaacctgatttatatatttcaatttagataattttctttgtatttgattgggtggaaaagtggagagacagaaagggaaagtgaaaagtggaaataaaataaaatttgagtgtaaaaaaagaagaagagatagtcgttttctattctaatgtataaaaataatatttttgaattgaattgatgagaagagagaaaatgtcaaagggggataggagcatctgtcgacaaaagaatcaccctaagatgatcatctcatggctatcgagaatgaatcaaattagttggttctatttctcaatctttctgacttgctcctacggaaccaaggccgaaaagattaagaaaaatcatgcattcacaaccattgatgaaggattccacaaaaagttaaagattagtaatccgttttagaatcgagtgggttcgatcttatacgtacacaaggaaggtaataaaaaaatagaaagaatataagttattatttacttttataacttaggagctgtgcaatatgaaagtctcatgcatggctttgaatgggagaaagaaatggcagtcagagaccgattctcattagagcgtagggcccttggcctcccaaattttttttaaaaaattttagttataccctcaaaatttttgaagattttaattaaaccctctaaagtttttgaaatatattattaaacctttgaaaatttttaaaaatttcaattaggctcttcaaaattttttttttgttgtaaatattcacaaaacctctaaaatttttgtaaggaaacaaaaaatcctccacattgatgatttcacgaaatacctcccaatctccatattccacgctttcgtacggatcccgccgtaccatcccaactaaccaaccgcattacactcgcccttaaagccacttgattaaaaatcaaagcccttatttgtatctaaatcgcgagtacatggttttaacatactctcgagaagccgtcggacccaggagaaattgaaacgaccaatttgttgccaaccgcatattggcatttgaaagtcgtactgttcttcacttattctggtaagcaaagcgcagacaattttttctcaattaaaaaaaaaaagattttcatcgcattgttttttttgttgtaactctaggtttttcaaggttttcagtgttccacggcggtgattttgcgacgacggtgatctgttttcaagcttcttgccaaagtttcgtcaacgaatcatcgtctttgtaaggtaagtcattactgtttgttgcgttttttttttttgaatagtgcctttttgcttaacgtattgtatatctgtgtgtgtgtgtgtttactctgtttggctttaacgagatagtgaaggaaaaggagaaggaaaatgtcgatacatgatatatatgtgcttgctctgtttggctttgacgaaagtgaaggaaaatgttaatgtataacttcatttttttgttatgaacactgacgtttctgtttaccataggttggattcacttgctatttagtttagcaatttaatcattgagtttatcaattatcatgttattcatcatatatgtgaagtttcaaatggatgcaatatttctattatattaatggacaatcgaaaatcacatattcaccgaatgaaagttttttttatatcaaaccaataattagacatttttaatctatttaaaattctacatgtgtcttccactttaggaagatgaagtttgacactagtgaaagtttaccctcttgtatatatttgctctgttcattgaaaagtcctctagtttacttaatttggctgttgaatgcttgttagaaatgaaatgacaattgaatttaagtttgtagctgcttcatatgtctcaatttttgcattttctttactatgctctgcttgtatatgattttatttgctgaagatgtggctttttgtcatgtatatatatagtttctaagaagctgaggcctcgtaatggtttcaaaagtttcttttatgctttgcttttattataatcagacacttcactttcttcagaagggtaaacttttgaaatctgttaatgcatttaaggaattttcaaaagtttactaaagatgtgtaatgctttaattttgaatataggatttcatggaattattagactttgagctaggtacttgtgttttgaataaggactatctttagtgaatggtcattggttcgtgcacttatgggtggcaaattttgagatgctatggaatccacttgtcacatttagtcattatactgcatcatatctgcatatactttctagttgtttacaaacttaaagatgtgtctatttttatttcgtgatgaccagatgtttgttcatccatggaagggcatcattgccaatattccaacaacattgcaagatggaaaacatgtaggggaaagtggaaggaaactgagggaggatttggcaaaaaagggattcaatccattgaaggttcaacctctttggaaccgacacggtcactcaggatacgccatagtagagttcaataaagaatgggatggttttaacaatgccatcatgtttgaaaagagttttgaattggaccattatggaaagaaggattactactcatctcggaggaaaaaagacaaattgtatgcatgggttgctcgtgaagacgactactactctggtggactgattggtgaatatcttcgtaggaacggagacttgaagaccgtttcgagcaaagaagccgaagatcgaaggaagacctcaaagctattgacaacactaaacaataccttggagaccaagaatcaacgccttcaggaaatgcagaacaaattcaatgaagtgagtagctcaatgagtacattgatgtggcaaaaagatgacatgatcagagcttataatgaaggtatgctacaatcctagtttctaaaagggatttaaattcaatttatactattctaattgttaacgggttatagtttataatgtgtagagtgtaaaaagatgcaggagaatgctcataatcatttcaagcagatttctttagaacatgagaggaatgcaaaatgtattctagaccagaaaagagaattagagcagcgtgagaaggaattgttgcaacgggaggcccaaaatgaaaatgagaccaaaaaacttcagcacgagaagatgatagtatgttgaacatatttaaaatagtgtatcaaaattttaaacacatgtaccgatattttttgataccttagatacaagttgtccaatatagtaggtatagcaattagcccttttatctaaaccataataacaaaaattgatttagtgaacctatcatattacttcctatctatacaaatcaaaatattcataaattgttttggcagaacgagagagcagccttggaacaaaagaaggctgatgaaactatgttcaaactggctgaagagcacaaggtatatctttggtcttcatattgtgtgctattttcaatttctagaatctcttcatttaccatttatttattttcctatgtcagagagataaagagaaacttcacagagaaatcattaagctagaaaagcaacttgatactagacaaggattagaacttgagatacagcgtttgagaggggctttacaagtgatggagcacatgaatggtgatggggatgcagacacaaagaaaaggatggaggtaattcaagatgaactgaaagaaaaggaagaagaactggaagacttggaagatcttaatcaagctcttatcatcaaggaacgcaaaagcaatgatgagttgcaagatgcccgaaaagagctaatcactgtaagtatatgttatattccccttttttcttttcttagaaaacgtgtataagagctaaccactggcatgttatattacttgagatacgacctttcacatacatgtctgtgtctaacagtgacgttcaagcctctcgtaatataacttgcatgcaatacttaatttcaaaaataatagtaatgttgaacatcaaaaaatttctgagtttgtgttttgaagcgatggaaaaagggttagctatttaatatttattgtcctttaaaaaattctgaattttggttttgtcttttttgtttcagtcactttaaaacacgacaagttaatttttaacgttcaatctcactatagtgtttaaaattttaccttttttgcttcaaaatcacttttatagtaatggaattagtttagttagatgaagaacttacatgcatcaacttgcctttgcatattttgaagaaagatagaagcttaacaagtgctttctatatatatatatatatacggtgtccatgaattttgcaagagatttttgtgttacttgatttttgtttcacaggcatttaaagatgtttccaccagagctcatattggtgtcaagaaaatgggagaagtggacattaaacccttcttagttgctgccaaaagaaaatactcagctaaagaagctgatgtgaaatcagcagagctatgtacactgtggcaagactatcttagagatcctagctggcatccttttaaaatcctcaaagacaaggaaggaaattgcaaggtaattttttctctctatattttacacccattcaatttccccctctttaataactgttattgcttgactatctttatccttatttgtccttaaggtgtaacaatagggaaatgatcagtttatcctatctttcttattcggattcagataagtgtcaagacaggggcaaagttagaaattttattttgtgggtgtgagataaaattataaaattttggaggagccaaggttaacttttatgttaaaatgttcaaattacattattaatttttttgaggggctaaaaatgcaaaaaattcatttagtcaaaaacaaaaggacttaatttgcataatttatattatgggaggagctaaatgaatatttccccatttaacaaaagggtgtcagttgcgaatatgcttatttttcaaataaattcttatatattcgaaggataatatctttatacttgtatctaagtaacatactgaatttgttgccgtatgacgttggcttgtctttagacttgtttagtggccggattactttcttgagaggtctaacttgcttgggccgtgtttggagaaggtgtcagagtttgggcaattccctactcatactgccccgaatattaatataaaaatatgatctaaaaaattttcggacatccattatttaacttatcaagttgtcttgctcttatgacttaactttattctctctataggctaaaaaatagtgatttttcttttacaggaaatacttgatgaggaagatgaaaaattggtcgaactcaagacagagctcggcgacgaagcatacaatgctgtgacgatggcattgaaacagatgaacgagtacaatccgagcggcagatacgtagtaccggaactttggaatttcaatgaaggaaggaaggcaacattaactgatggagtgcaacatttactgaacaaatggaaactgcataagcgtaggagatactaaaatttcttcatcaattttctttcactgaaggatcattttgcaaatcttcgaaaaaaaggtaaacttatactgcaagacagagaaaatgtgttaattcttcccccaagtaaaccaagttgaacgtacttttttgttttaagaagtttgattaggtttttactagttcgagctccaacttaatatacttgaattagtcaatgattgagcttggattaaatttcaaactcttttttcgagtggaactgtatttagcttatttgaattttttttggagttgaatggtattagaggtaaaagttaggagtgtaaaagaattgttctcaagcaaacaaagctttgtttgcatttgtttgtttatttttaaagttgtttatgttcggttcgtattc

SEQ ID NO: 497 - DNA, 9056 bp, Gossypium raimondii
  source 1..9056: mol_type = genomic DNA
tatttttttcgttttgagcaatttaatttttcttttatgttcttttaactttttttttcattctcccttttttttttcctttgttaaaatttttttatatttatgaaaaaagagaagcagaaagctgaaaccaaaataaaacttcgcatattctcaccccacaattacaaaccctcatcgtctatcatcgctttaacaaaccaatttggatctttcaatgacctagtttgcaagcttgcctcactcgaagacctcgccagtcgtgacttttggtagtccaccctcaacaaagtttctcgagcccgttcctttaacctcctaaccaacccctacaaccaccttatctatgttacctacaacattctcgccctctcaaaactacgttgtttcacggattcctcaaatgagctctacattctcaaagactaaaacgaccatcattcgaaacttatcgtcaactttatccaaaccagtttggatccatactctctttctttcttcagtttatccatgctcagttttcaatcaagcttgtttgggaatatccaaaaaagtttagatcaattttatagtttcttaattttacttgttagaaaataaaataaaagagaatgaataatatacacaattccgtagaagtttgaaatggaaaaaaaaatattttggatataaagatttcaatttatctttagatttgattaattatatgatttttttatattaattagttagatccagttttactttcaaaattaggttataatcaaattgagatttgattaagaatgattgatattcgattttgagtgaaattcaaattaagaatcatgtgaaaaaaacaaggacttggtttatttggtgggcaaagattatatttttgtagtggagaatacgagaagagagaaaaataaaggagaaggagaaaagggaaataaataaataaaaagaaaaagttaaattgctcaaaacgaaaaaaaatatagggaccaattgtataatttaacctaaaatttttatttgaaatgatgatttaacatgccatgtcagcttaccgttacaccattaatgaaaattaacacttagtgattgaaatgttacaacacgatatcgtaaatgactaaatcgtaacatttcaaacataagtgactaaaatgtaacttgatacaaataaaagtgactatttagtagtttagcctaacaaatacaactaactttttttatcttccgcaagccggagcgcgcagtgatgtcagattccacgcttttaccattttcctgtttttgaaagacggttacacttgtaagtgaggtttccattgtagttgtttttggtcaatgtaaatgacaaaataacattgcttctttattctacttatagattgctttgattatcagctgctatctttctgggtgggtttttcaaatgttttacaagtgaatgatgagcgcttttttagtggtagtttcatttgtgtggattcttgttcatgggttatgcagagccaaagcttcaagtcaaagtgagaagctgcattttactaacattacgcacatgctcaatcttgctctacattgtgtgttcctcacattttaaatttttttcttctggcgtcattgttaatgcaattttgattgcttttctttcttctgcggcagtggaaataaagatgctaaaatcatgaatattgatagaatcaatggaatgggcttaaggagatctccaagattgagttcagccccgcctgaaaccaaagattgctcttcaaaaactatctttaaatcctctgagaatggttcctactctgaaacaagaccttctggaacggataaagaagctgttctttcaaagcgcaatgacccaaacttttctgatgaaaagcagaggagaaagtctcctagatttgttgcagggactgaacattgtggcggtaatgggtctttgagaaaatttcaagatcttaactcaggctttccattgaagcagttaagaagatctctgaaaattagccaggctactaaaaatgtttgccctgatgtctctattacaagattggatatggatgaaaggggctcttctggagagaagcggttgggaatatctcccagttccgtgcacgcaacagaaaatggtgacagtaatgcatcttttagagaacataggagggaaatgtctgttgaaaagcagttgaaaacaccttcctcactttctacattattggctgaaggtgatagtgctgaagtaaactcttcttccaatagattatccaattcatgtgatgaacagccttccaagaaatttaagatctcatcagcagaatcagatatgtgaacctcagatgaaacattctcaaagaaagccaagggctcgtctctttcaggaaagaagaagagtcaatccaagactgatgccatatttataggcaatccaatccctgatggtaaagctcaagaaaggtggcgatggcgatatgaaatgaaggtgattgatatgagctaaactggcaaatgctaattctttgattgattaggctgattgaaacagtgaccaatgaccattcttctaccaatcgtttccaatgttgattgatatccctttattttgcttgaactttaactggcaagcattatgacatcttttagttttcaacattgatacaatggttagtaactacacatttaagttttgctcctttggagtctggactatcagtgcatgtaattttctgttataatgtttgtaagcagttagttttactgagaatggttggggaatgaactggaaataatagtaaatggcacccactttatatttttcaatgctgattgcgaatatcttgtacttttgcagaatataaaatctaacagaaaagacatatcattggagtaagtaacctttatgagatccctctgtttagtggtttttgttatcttgatttagcattgatctcaaattctttcttgggcttctaaccccagttcctattgtgatagtgatgatgatgatgatgaagacaagatagtttggaatgtggaatgccattatgctcaagctgaaattgatggatgtaccataaatcttggggattgtgtttatattaaggtaaatgtgatcaacacatggtgtgttttaaaatttgtatatatacatttaggttctcttaattaatgttgggcaaatcaagtttacgtggtctctcttctaatccttttcttcttgtctgcctatggcacttctacatttcaataatatggcaattgaagcaagcaaattctcatgggataaggattttttgcagggtgaagaagcaaaacaccacattggcaggatattagaattttttagaacaacagatggagaaaattattttagagtccagtggttttatagagctgaagatacagtaagtacggaaagtaatatttattttaggccatccaatatttcttatcctgacctttgttgcttctgttctgcgcatcatgcaaaggttatgaaacaagaggctactcttcatggcgaaagtcgtctattttattcaaccatagtgaatgataatctcatagattgcattatttcaaaagttagtgttactcaaatatcacctaaggtatgcttcttgcaatcttaatttactcctgtttttttttcctttttactattctaactgtttatgaatagcgtttataaattttctttatattttttccggttcatttgatctttatcagaactatgttgttggaaattttggatttatttattgttattctataattcgttgaagtttggttcaaagtcaaattctcttccccaatctgatttctattttgacatggagtattgtgtggattattcaacattctgcaccttgccaactggtaagcttctttttgtgatggtaatggagtttaacttccggattaactctgtttgtgtttcttgagagaggaaagggtggtgatcgtggaaacataatctggttagagaaaggttaaatattctgataaatgataatcataatgccagtaactctctctttatatatatatagatatattttcagataattctttcaagagccacagttcctcaaagtgctacgaggaggttttccctacgactcctgccttttcagcaaatattcctagttttggaacttacaaggcacaactcacaaaactagatctttactctggttgtggtggaatgtcaactggtttatgccttggtgcaaaagcttcgtgcaatgatctagtggcggtatttcatccagtcactggtaacctcgtatttgatgattcattcagtaataaaattattttatcatgtaccttacattctgcattttagaaatgggcagttgacagcgataagtcgccatgtgaaagcttgaaattaaatcatccagagacacatgtgagcatcgttgccttacaacttcatttggcatgcccccaaatctttagtggcagataatactatctttttgctttcgttatataggtcaggaatgaagctgctgatgattttcttcaactactgaaggaatgggaaaagctttgcaaacaatatagagttaaaaatttagaaagaacatatccatcaagatcgagaatctccgaaactgtctggaataatgccagttctgcaaaagattctggtactcctgatgaacatgaagtttccagtctcgttgatatttgttatggagatccctgcgacacaggcaaccgtggtctaaagtttaaggtggtctatttgatctatatgatgtgatggtagttcctttcatgccttttgtgagtttttgtttgtaatctaattgatttttgtttgtgtcaatctattctactggtattcagtcattttttgtttcatgtcatagtttagtggagattggctcgtgctaatatctcttttgttaggtctgctggaagggttattctgcaagtgatgatacatgggaaccaattgaaagcttaaggtatagtaattgctgccatcattccattcttgaattaggctattatttacttattcaaatctctcaggaattgccaagaatgtattcaggaatttgtaacaaatggattcaggtccaaaatcttgcccctccgtgtaagttttctttaatcagatgtgctggtggatgcttaatctagagtattgtaatagttggaatatttgttatgaatgattcctctttattgaattaatttaatcagggggatgttgatgttatttgtggtggccctccatgccaagggataagtggttataatcgccatagaaatgttgattctccactggatgatgaaaaaaatcgtcaaattgtggtcttcgtggacatagtggaatatttaaaacctaagtttgttttaatggaaaatgtggttgatattatgagacttgtcaaggcttcacttggaagatatgctttaagtcggttggtacttatgaaataccaagcaaggcttggaatagttgcagctggttgttatggtcttcctcaatttcggttgcgtgtttttttgtttggagcacattctagtgaggttactactctcaagtttttgcataaaattgaattacagcactccttgactgtccctgactttggagtagtgctattatcacctgtagatttaatgattttggtcttgctggtgatctaactgcccctggtttactcttttttccccctatttgggtgggggggtgtttgtggtaatttggtgtctgcagaaacttccacagtttccacttcctactcatgatgttattatcagatatgggtatcctgctgagtttgaggttgctgttttctcccttagaatgcttgaaccagtaatgttccatccatataattctgtttgtcttgtgcagcgtaatacagttgcatatgatgaaggccaaccacgtcagctggaagatgctcttgttcttcgtgattccttttctgatcttccacctgtagtaatcatatttttgttttactgattcaacctcttcttagatttagcagtattctgttctacttaataagttaactgctttgcaggttgcaaataatgaagcccgcgaaaaaatgacatatgaaaagcctcctgaaactgactttcaaagatatataagatcaagtgaatatagtaattgttttttttttaaatttcatttacccttgggatcatctcatatttcaatgactaaatttcttgttgtataactggcttttttttcctcgtatgtatatctgagtattttgtggcagttctctaaggccaaaataattggccatttgatggagtcttaaaagattttatgcccgatgatctctcttatatgtctgttctagattaataaatgtgtactttatttctttttctttttctttcttttggtaaaagtgaagggtcttttgatggaaatttttattggtaatataactgatttgggccttaatgtctgcttctgaatgtggtgcctaatatgaagttgccaagaaatgtggtataatatgtaggaaatccagtgtgttacaggtttttgcttgtttattggaataattctgatccatgtctatcagaacgaaatgaaataattatggtatagttgcttatattgtggaaaaatctgataataggtacttaggttctcaagtgttcctttttctgtatatggagatgtaagcttgcatcaactggtaggcgaagtggttggatgttgtaggatcaacaactggtggccattaagttgcattctttgccagttaagttgaaaatagcagctcataatttcaatgtgaaacaaggaccttttactgtcagtgggctgtaatcaaactgctttctgaccaaaactcaattttggcaagaagaactaacagaacaagcataggaaaagtcattggattgtggaactaggttaggtataattttcaccaataaccatcccaaaacaagtgtctgtaattgtaagacacaaggaagttgcaaaagtagagaggaaaactttattggagcctagaactaaaagcaagtaaattttgctacttatgtgcagtctcatgtctggtaatctataggttttagtaggtatgctggttagttaatttcttgacaacctgtacaatatttgttggtgggagtgaaaaattttgcactgaagtctcaggatgaaaaattatgtacaagcatgcatcatggatcttgggtctagaatttggaatgcttcgaacatatgcaaattcatgatgtagcattttggtcagcatctcaaatgctaattcaagtaagcatggccatagagttggacatatgcagcatatctagtaaaccggtatttgtttctgtttaaatgttgctcctgttcttcctgttgtgaaccaaagaatattagtcacatcacccatttgttgtatatcacagaagagagggaggacagagcccagcacagatcctctttattgttacctctaattgtcattcatttacatttttccttttttcctggctttgcagagatgactggttctgaattaaatggtgccaaaagaataacgaacctgttgtatgaccatcggccttctccgttatctgaggatgattatattagagtttgtctgaatccaaagagaaaggttttgtaactccaattgacattgccacttttttcccttctgatctttttcccctaatttagatgtgtttatagggggcaaattttcgagatctccctggtgtaattgttggaacagacaatgtggcttggaggggtcgaacacaggaacagcagtttttaccatctggaaagccattggtgagtgtcttcttttcccatccgagcaacagagcttccacttctttgttcatcaatgtactggatattcatatgtaagcacatgcttctttgggttttgcctggatggcttttttatctttgttctttgtgaatgcatctcaacgcttgggacattttctttagtggcgtttctttatcatctttcattgtctctttgcaaacttgatgaaacagctatttattctaggttctctctttactaggaaagcacaaaaatgaatctagtgcagaaagggaatgaaacaagaattcattttcccaacactgtaatatactatgcctaaatggaaaaacagattgctgatgttggttctctttcatttgtgtaggtaccagattatgtctttaccttgaaacaaggaaaatctaaaaggttaggcttttttggcagcctgtctcatttcaacaacccctcatcctccaaaatagatacatacatatatatatatatatatatagagagagagagagagagagagagagagaggaaactagaggaactaatgttgttgatatatgtgcagaccatttgcaagattatggtgggatgagacaatgccgactgttctaactgcacctttttgtcacagccaggtttcactttgcactagtttagtatgtaagattacacatttactagtcctttggatttgcttgtgagttttaggagttgtgtaggcaatattacatccagagcaagactggcttctcacagcccgggaatgggcaagactgcaaggttttcctgactattatagattccgcgggacaattaaagagaggtatgatagctttgttctaaatattattttggtaagctttttacatttgctgaaatcggaaaaaattaactgtaatgatcttttaagattatacagctatttgaaaagaagagaataagctcttatagctgcgtattgaacagagaaattcggccttaaaaaagcaagggaactttatgaacattttgatttagcaagttatacaaatataatctttgtttctatgtttctatattgataggtattgtcaaattgggaatgctgttgctgttccagttggtcgagccttaggatacacaatggggatggcatttcagaaagggagcgggaatgaaccactgatgatcctccctcctaaagttttctctttccaccaatatccagttagcaaaatcattgtcccaaaacactga

SEQ ID NO: 498 - DNA, 8971 bp, Gossypium raimondii
  source 1..8971: mol_type = genomic DNA
acgtgtattaactccacagtatggctgatactatcattttatatagagattggatttttgtgagtgttttttggcaagagctctttaggagggcatgaaccaaactcctactgtccatagcctatcaccctcaaaatgatggccaaattaaagttttaaactactgcattgacagttacctcaggtgtataataggggaaaggcttgttgattgggtgagttgattacctttggctaaatggtggtacaatttgacattctattcagccattcaacttacctcctataaggccttatatgggtagacaccattacaacatttgtcgtaccttgctgggatttcacttgtggccagtgtggattgaagcttgcaggctcaagaagctacaaggaaaatattgtaatttcatctaaaacaagcacaatcgaggatgaagcagttagctgacagacacaggattgatagataattccaaatgggagaattactttacttgaagttgcagccatataggaaataatcaattagcatggctcttaaccataaattatctcccaaatattttagcccttttcctatcatggccaaggttggacaagtggcttataggctatagttacctccaggatcacacatccattctacattacatgtttctcagctgaagaaacatgttggagcagcaccagtctaatcttaattgccattattggatgcacatgaggccttgcttaaggagccagtcagaatttgtgagcacaaaaatggttaagaaaaattaatcaactggtcattgaggtgcttgtggaatgggcagacactttcccttaagatgctacctaagaaccactgcaacagctgtgtgtcacctttcctcattttaatcatcgaggacaaggatctgttttggcaggtagtacttgttacgaggtaaaacttgaattagaaaaataaagataagttaagtaaacagggtgtaaaacaaggtgttttgttttagttaaacggtgcagataagaatttaatgaaagcggtacgcataaagggaagacaacggcctgagctattaataggccaactaacttttcaaacggctaattactttccttttaagcataccattatcgttgagcagtttcaatatttcttccttctcgattttcttctcttcctttttacttatgaattttctttcttgaattttctaattgcgtcataaaaatatataattttttttaagttaaacaatgaggactcaatacatttgaagtaaagttggagtttaagccttgtaaaaaataaaataatactaagagaatttatattagctcgaatttaaattttattaagagcaaatgtaattaaaggggcgaaaaatatccaatctcacttataaacgaaatagcaacgggtagggtatttgacttggtccatatggttgatgtgactttatacaatacaagtggacagcattgtcatagtttagggcggaaaacgggaaagaagtttcgattttttttgtgtgtttttggcgtttggggaaaaaaacttgtaaaaaagttaaaaatggtagaaaattttcttttttggaggaatggcgccaacatttttttccaaaatcagtgttcccgcctttctttgcttttccccttcatttatttataatgttcagtgtttcttccctttctattcatcttcactaaacactgttctcactgaacgaagccaaacatcaaagaaacagtgagtttagagctaaggttttcgtctcttctccaagtcatgggatctgtcgcgcttttggattctaattccccttcaggttttcctttttttattttattttaatctcttaaactgaattattgattccatatattcattcccgattgttgatttttgatttgctgctcaccgaagaaaagaaaaaaaggggggggggggctgggcccatgtctatattaatgtatattatcattttttacgcatttaattttatgtataagagagacgaaactgtagacttactgtttaagacaggtcatctagtctgagctaagccaatcaggtgatggcagtttgttttaattacatgttcaacaaaaatccctttttgttttggttttgtgattttcattgcaattatcgaaggttgcagcttgaatatgaaaatccaagtttagttgttattcagatggggtcttttgattattttctaggattttcttgtttctgcatgttgatcccttgtgctttaaccttcatgcactttgttttattttaatggggctagtcccgtttgagtttcttctgtgtccttttttttctggtggatttgatctttgggacctgttctttttttctataaaacctttggtttgataaacttgttacactagatttgcatttgtatttccctgtgagtttatgctaaacatctctaggttctacttacatttggctttgcaaaatgttttagcaaaacaagattgtgtgtgtctgtgtgtggacttgatctttgggacctgttctttttttttctataaaacctttggtttgatcaacttgtttgattagatttgcatttgtatttccctgtgagtttgtgctaaacatttcaaggttctgcttacatttgacttatcaaaatgttttagcaaaacaagattgcgtgtgtgcgtgaagaatcttgttaatacatttctttacaaagtaaaaattacctagtcttatgctttactgcaagatcttttttgtcttttcttttttttgcttagccgtttcagttatctgtgtgatcgtgctagcatattattttcttatatttttgtttatttatttttcatcatgcagtgatatagaagaggcatgttgtgtttatgctataccatttatttatatttttgtttctgatggttttttaaagtgcctaaactcaagttcacaagatctttttttggcatttaggaatgaagaagaataagaaaggcaagaataaatctgctaaatcttccaccaagaaagagatggaaactgataaaaaagtacagaagcgtaatagtgctcaggaaaatggggagccagtcccttcaaaaaggccaaagagagctgctgcctgcactgattttaaggagaaagcagtttgcatatctgaaaaggattcagttgttgagacaaagaaggatatggtagtagaagatgaaatcctagctgtagcgctgacttgtgaaaaagatgatggccggcctaataggaggctaactgattttgtattgcataattcagaaggtcttccacaaccctttgagatgttggaagtcattgacatgttcataactggtttgatattgccgcttgaagaaaatactgacaaggaaaaagtaaaggagaagagtgttagatgtgaaggatttggacatgttgagtcttgggacatctctggttatgaagatggttgtccagtgatatggctttcaactgatgtagctgattacacctgctgtaagccaagtggcagctataaaaaatattatgaacatttctttgaaaaagctcgagcttgtgtagaggtttataaaaaactttcaaagccttctggtggaaatcctgacttaagtcttgatgaattgcttgctggtgttgttcggtccatgagtggaagcaagagcttctctcgtggggcatcaattcgggattttgttatttcccagggagaatttatttataatcaactgattggtttggatgcaacttcgagggtaaatgaccaggtatttgctggattgcctgttcttactgccctcaaagatgagagcaggaagcgtgaaaatatagggctagacatagcactgttttctggtggtgctctgactattggtaaaaaaggagagggggaaagtaaattggatgagacatattcatctacttttacagctgaggaagatgaggatgcaaagttggcaaaactgttgcaagaggaagaatactggaaatctatgaaacagaagaggaaccaaggctcagcttctatgtcaaacaaattctatatcaaaatcaatgaagatgagattgcaaatgattatcctcttccagcatactacaagaattctaatgaagaaactgatgaacttgtagtttttgaaagtgactttgatgtgtgtgatcctgaggaactccctcgaagcgtgctccacaactggtcattttacaattcagactcaaggctgatttccttggagctgcttcctatgaaaccatgtgctgacattgatgttaccatttttggttctggggttatgactgctgatgatggaatcggattctgtcttgacaatgaccttagtcagtctacttcaggttcttcgagtgtgctgaatgctgatggaattccaatttttttgagtgctattaaggaatggatgattgaatttggatcatcaatgatattcatctcaatcaggacagacatggcctggtattgtctcatgtttcttgattaggattctgttgctataatatttttgctaactcatgtttgatctacaatgcctgcagaaaagtttctaaaaagtaaaaaaaaaaaaaaaaccatagttctttgcaattatctactaatatgcaaaacaaccagattttcctattcattaaataattagttttaactgtgacaagtttttattttctctccatttttcaggtatagacttggcaaaccatcaaagcaatatcttccatggtatgaaccagtactcaaaacagcaagggttgcaataagcattattacattgttgaaggagcaaacacgagtatcacgcctctctttcaatgatgtaattaagagggtgtctgagttcaagaaggataatcgtgcttttatatcttctgatccagcagctgttgagagatatattgttgtgcatggacagataatactacaactctttgcagagtttcctgatgaaaagattaaaaagtgtgcatttgtggttggccttgcaaataaaatggaagagagacaccatacaaaatggttagtcaagaagaagaaagttgtacacaagaatgaaccaaatttaaatcctcgagcagcaatgatgcctatagcttctataagaaaggctatgcaggcgaccacaacaaggctaatcaataggatttggggggaatactattcaaactactctccagaagattcaaaggaggaaactaattgtgaggtgaaagatgaagatgaaaatgaggaacaagaagaaaatgaagatgatgatggtgatgctaatgctgaagctgaagctgaagctgaagctgaagctgaagctgaagctgatgctaatgctaatgctgaagataaaccgattccaatggagactcagaagtctccttcagtatcaaagcaacctagacagtgttctactgaggaagtaagctgggatggagagcctgtaagccaaacaagctctgataagcctctttataaacgagccattgtacatggagaagtagttgtggtcggaagtgctgtttctgttgaagttgatttgtatgaacttcctgcaatctattttgtggagtacatgtttgaaacttcaaagggaagaaaaatgtttcatggacgaatgatgcagagaggatctgaaactgtacttggcaatgcagctaatgagagagaggtgttcctaacaaataactgtggagattttgaattggaggatgtgaaacagactgtggtggtagatattcgattaagaccttggggatatcagcataggaaagataatgccaacatggacaaacttgatagagcagaagcagaggagaggaagagaaaaggacttccaatggagtattattgtaaaagcttgtattggcctgagaggggtgccttctatacgctccccattgattctttgggtttgggttctggttgctgccattcttgccaagttaaggatgctgggagggccaaagaagtgttcaaagtgaattcatcaaatacaggctttgtatacaagggaactgagtactctctccatgattatgtctatgtcagtccacatcaatttacagtagaaagggctgagactgaaaactttaaagctgggaggaatataggcttgaagccttatgttgtgtgccaagtgctagagattattatcccaaaggggcagaaaaaagtttgtgaagagtccacccaagttaaagtcaggagatttttccgaccagaggacatttcagctgaaaaggcttacagttctgatataagagaggtaggtgctatcctaaaatacgatgacagttataaacttcatattgtcatagttttagttatacttttctatggtaaatttatatgtttttttttaaatttaaattttcaggtctattatagtgaagaaacagacattttgtttgttgaggcaatagaaggcaaatgtgaagtcagaaagaagaacgaccttccagcatgcaattctccagtaatatttcatcatgtcttcttttgcgatcgcatatatgacccttccaatggatctctcaagcaggtgattcccttttgcttcctttgctgtagtgcttgttgggaatgatacttccataatcattttcatggtaatttttgtttgcatttataatttgtcctttggaggataactaacttcccccttttttggttggcaaacagttaccagctcaagtaaaactaaggtactcaactggaattgtggataatgaaattgcataccaaaagaaaaagggtaagggtaaacaggaagaaagtgaattagaagttgagaaacagcaagaagcatatcaggagaaccgcttggctacgttagacatatttgcaggttgtggaggtctgtcagaggggttgcaccaatctggtactgtctacctttctgtctatttcatcaatttttatgtgcttagccatatttatttcttaggcactttatgtccaaccatcttttgttattactggtgtaggtgtatcattaactaaatgggcaattgaatatgaagagcctgctggagatgcattcaaactcaatcatcctgagtcattggtcttcattaaaaactgcaatgtcattcttaggtccgtatgacaagtttgctctcctctattcctgtttaaattgctaataactaaaagcaagttataatacagggctattatggagaagtgtggggatgtagatgactgcatctccacttctgaggcagctgaattagcggcatcacttgatgagaaagagattaatgatttgccattaccggggcaagtagatttcatcaatggaggccctccatgccaggtattatatattatagttttcctttgttatctaatctctggagtaattaataaatgattcattaagacaaagctgttttactttgcagggtttctctggaatgaatagatttaaccatagtacatggagtaaagtacaatgtgagatgattttagctttcttatcatttgctgattacttccggccaaggtatttcctcttagagaatgtgaggaacttcgtgtctttcaataaaggacagacgtttaagttaactctggcttcacttcttgaaatgggttatcaggtagatattcctttcacctaactgcaatttctgtaatatacttgttataagaatacaaatataagtacatgtgtggttgtgtatgatattctggttttgcccgtttaggtgaggtttggtattttggaagctggagcctatggagtttctcagtcaagaaaacgagcattcatatgggcagcctcccctgaagagactcttcctgaatggccagagccaatgcatgtctttgctgttccagagttgaaagttacattatcacataatttgcagtatgcagctgtgaggagtactgcaagtggagcccctttccgtgcaattactgtgcgagatacaattggtgatctaccagctgtaggaaatggggcctcaaagacgaatctggaggtaactacattgaaattatttccaaaattgcttcattctataaaaggttgtaagagcatattcaatttacaatgatttgtttccacagtatcaaagtgaagccgtctcatggtttcagaagaaaattcgaggaaacatggctgtccttactgatcatatatcaaaggaaatgaatgagcttaacctgattcggtgtcaaaagattccaaagcgaccaggcgcagattggcatgatcttccagacgagaaggtacataattggcttctgttctttgcatctgtttttaaatctgatcagaatgaaattgttgagctgctgggttgtttgtttccttaaaaattgcaggttaaactctctactggacaattggtagatttaataccctggtgtctgccaaatacagccaaaaggcacaatcaatggaaagggctatttggaaggctggattgggaagggaacttcccaacttccatcactgaccctcaaccaatgggcaaggttggaatgtgctttcatccagaacaggacaggattctgacggttcgggaatgtgctcggtctcaagtaagtcgttaaacttactgaacattcattgctatttggtttgtgaaagcttgggtagaatgaagtagaaaacattggtataagctcaatggatattgtttgtctgccaaaacagggtttcccagacatctacaagtttgctggtaacattcaacacaagcaccggcagataggaaatgcggttccacctccattggcatttgcattgggaaggaaactaaaggaagcattagacagtaaaaagtgaatgtaatttgaatttttagttgatgggattttgttaaagactcctccattttaccttagacaaaaggcccttaattcatttataaaaatttgttgtctggcttttttaaaaaaatctttttttgcgctctctcccttcctatatatatattgattacaattgatca

SEQ ID NO: 499 - DNA, 8874 bp, Gossypium raimondii
  source 1..8874: mol_type = genomic DNA
ttatatagagattggatttttgtgagtgttttttggcaagagctctttaggagggcatgaaccaaactcctactgtccatagcctatcaccctcaaaatgatggccaaattaaagttttaaactactgcattgacagttacctcaggtgtataataggggaaaggcttgttgattgggtgagttgattacctttggctaaatggtggtacaatttgacattctattcagccattcaacttacctcctataaggccttatatgggtagacaccattacaacatttgtcgtaccttgctgggatttcacttgtggccagtgtggattgaagcttgcaggctcaagaagctacaaggaaaatattgtaatttcatctaaaacaagcacaatcgaggatgaagcagttagctgacagacacaggattgatagataattccaaatgggagaattactttacttgaagttgcagccatataggaaataatcaattagcatggctcttaaccataaattatctcccaaatattttagcccttttcctatcatggccaaggttggacaagtggcttataggctatagttacctccaggatcacacatccattctacattacatgtttctcagctgaagaaacatgttggagcagcaccagtctaatcttaattgccattattggatgcacatgaggccttgcttaaggagccagtcagaatttgtgagcacaaaaatggttaagaaaaattaatcaactggtcattgaggtgcttgtggaatgggcagacactttcccttaagatgctacctaagaaccactgcaacagctgtgtgtcacctttcctcattttaatcatcgaggacaaggatctgttttggcaggtagtacttgttacgaggtaaaacttgaattagaaaaataaagataagttaagtaaacagggtgtaaaacaaggtgttttgttttagttaaacggtgcagataagaatttaatgaaagcggtacgcataaagggaagacaacggcctgagctattaataggccaactaacttttcaaacggctaattactttccttttaagcataccattatcgttgagcagtttcaatatttcttccttctcgattttcttctcttcctttttacttatgaattttctttcttgaattttctaattgcgtcataaaaatatataattttttttaagttaaacaatgaggactcaatacatttgaagtaaagttggagtttaagccttgtaaaaaataaaataatactaagagaatttatattagctcgaatttaaattttattaagagcaaatgtaattaaaggggcgaaaaatatccaatctcacttataaacgaaatagcaacgggtagggtatttgacttggtccatatggttgatgtgactttatacaatacaagtggacagcattgtcatagtttagggcggaaaacgggaaagaagtttcgattttttttgtgtgtttttggcgtttggggaaaaaaacttgtaaaaaagttaaaaatggtagaaaattttcttttttggaggaatggcgccaacatttttttccaaaatcagtgttcccgcctttctttgcttttccccttcatttatttataatgttcagtgtttcttccctttctattcatcttcactaaacactgttctcactgaacgaagccaaacatcaaagaaacagtgagtttagagctaaggttttcgtctcttctccaagtcatgggatctgtcgcgcttttggattctaattccccttcaggttttcctttttttattttattttaatctcttaaactgaattattgattccatatattcattcccgattgttgatttttgatttgctgctcaccgaagaaaagaaaaaaaggggggggggggctgggcccatgtctatattaatgtatattatcattttttacgcatttaattttatgtataagagagacgaaactgtagacttactgtttaagacaggtcatctagtctgagctaagccaatcaggtgatggcagtttgttttaattacatgttcaacaaaaatccctttttgttttggttttgtgattttcattgcaattatcgaaggttgcagcttgaatatgaaaatccaagtttagttgttattcagatggggtcttttgattattttctaggattttcttgtttctgcatgttgatcccttgtgctttaaccttcatgcactttgttttattttaatggggctagtcccgtttgagtttcttctgtgtccttttttttctggtggatttgatctttgggacctgttctttttttctataaaacctttggtttgataaacttgttacactagatttgcatttgtatttccctgtgagtttatgctaaacatctctaggttctacttacatttggctttgcaaaatgttttagcaaaacaagattgtgtgtgtctgtgtgtggacttgatctttgggacctgttctttttttttctataaaacctttggtttgatcaacttgtttgattagatttgcatttgtatttccctgtgagtttgtgctaaacatttcaaggttctgcttacatttgacttatcaaaatgttttagcaaaacaagattgcgtgtgtgcgtgaagaatcttgttaatacatttctttacaaagtaaaaattacctagtcttatgctttactgcaagatcttttttgtcttttcttttttttgcttagccgtttcagttatctgtgtgatcgtgctagcatattattttcttatatttttgtttatttatttttcatcatgcagtgatatagaagaggcatgttgtgtttatgctataccatttatttatatttttgtttctgatggttttttaaagtgcctaaactcaagttcacaagatctttttttggcatttaggaatgaagaagaataagaaaggcaagaataaatctgctaaatcttccaccaagaaagagatggaaactgataaaaaagtacagaagcgtaatagtgctcaggaaaatggggagccagtcccttcaaaaaggccaaagagagctgctgcctgcactgattttaaggagaaagcagtttgcatatctgaaaaggattcagttgttgagacaaagaaggatatggtagtagaagatgaaatcctagctgtagcgctgacttgtgaaaaagatgatggccggcctaataggaggctaactgattttgtattgcataattcagaaggtcttccacaaccctttgagatgttggaagtcattgacatgttcataactggtttgatattgccgcttgaagaaaatactgacaaggaaaaagtaaaggagaagagtgttagatgtgaaggatttggacatgttgagtcttgggacatctctggttatgaagatggttgtccagtgatatggctttcaactgatgtagctgattacacctgctgtaagccaagtggcagctataaaaaatattatgaacatttctttgaaaaagctcgagcttgtgtagaggtttataaaaaactttcaaagccttctggtggaaatcctgacttaagtcttgatgaattgcttgctggtgttgttcggtccatgagtggaagcaagagcttctctcgtggggcatcaattcgggattttgttatttcccagggagaatttatttataatcaactgattggtttggatgcaacttcgagggtaaatgaccaggtatttgctggattgcctgttcttactgccctcaaagatgagagcaggaagcgtgaaaatatagggctagacatagcactgttttctggtggtgctctgactattggtaaaaaaggagagggggaaagtaaattggatgagacatattcatctacttttacagctgaggaagatgaggatgcaaagttggcaaaactgttgcaagaggaagaatactggaaatctatgaaacagaagaggaaccaaggctcagcttctatgtcaaacaaattctatatcaaaatcaatgaagatgagattgcaaatgattatcctcttccagcatactacaagaattctaatgaagaaactgatgaacttgtagtttttgaaagtgactttgatgtgtgtgatcctgaggaactccctcgaagcgtgctccacaactggtcattttacaattcagactcaaggctgatttccttggagctgcttcctatgaaaccatgtgctgacattgatgttaccatttttggttctggggttatgactgctgatgatggaatcggattctgtcttgacaatgaccttagtcagtctacttcaggttcttcgagtgtgctgaatgctgatggaattccaatttttttgagtgctattaaggaatggatgattgaatttggatcatcaatgatattcatctcaatcaggacagacatggcctggtattgtctcatgtttcttgattaggattctgttgctataatatttttgctaactcatgtttgatctacaatgcctgcagaaaagtttctaaaaagtaaaaaaaaaaaaaaaaccatagttctttgcaattatctactaatatgcaaaacaaccagattttcctattcattaaataattagttttaactgtgacaagtttttattttctctccatttttcaggtatagacttggcaaaccatcaaagcaatatcttccatggtatgaaccagtactcaaaacagcaagggttgcaataagcattattacattgttgaaggagcaaacacgagtatcacgcctctctttcaatgatgtaattaagagggtgtctgagttcaagaaggataatcgtgcttttatatcttctgatccagcagctgttgagagatatattgttgtgcatggacagataatactacaactctttgcagagtttcctgatgaaaagattaaaaagtgtgcatttgtggttggccttgcaaataaaatggaagagagacaccatacaaaatggttagtcaagaagaagaaagttgtacacaagaatgaaccaaatttaaatcctcgagcagcaatgatgcctatagcttctataagaaaggctatgcaggcgaccacaacaaggctaatcaataggatttggggggaatactattcaaactactctccagaagattcaaaggaggaaactaattgtgaggtgaaagatgaagatgaaaatgaggaacaagaagaaaatgaagatgatgatggtgatgctaatgctgaagctgaagctgaagctgaagctgaagctgaagctgaagctgatgctaatgctaatgctgaagataaaccgattccaatggagactcagaagtctccttcagtatcaaagcaacctagacagtgttctactgaggaagtaagctgggatggagagcctgtaagccaaacaagctctgataagcctctttataaacgagccattgtacatggagaagtagttgtggtcggaagtgctgtttctgttgaagttgatttgtatgaacttcctgcaatctattttgtggagtacatgtttgaaacttcaaagggaagaaaaatgtttcatggacgaatgatgcagagaggatctgaaactgtacttggcaatgcagctaatgagagagaggtgttcctaacaaataactgtggagattttgaattggaggatgtgaaacagactgtggtggtagatattcgattaagaccttggggatatcagcataggaaagataatgccaacatggacaaacttgatagagcagaagcagaggagaggaagagaaaaggacttccaatggagtattattgtaaaagcttgtattggcctgagaggggtgccttctatacgctccccattgattctttgggtttgggttctggttgctgccattcttgccaagttaaggatgctgggagggccaaagaagtgttcaaagtgaattcatcaaatacaggctttgtatacaagggaactgagtactctctccatgattatgtctatgtcagtccacatcaatttacagtagaaagggctgagactgaaaactttaaagctgggaggaatataggcttgaagccttatgttgtgtgccaagtgctagagattattatcccaaaggggcagaaaaaagtttgtgaagagtccacccaagttaaagtcaggagatttttccgaccagaggacatttcagctgaaaaggcttacagttctgatataagagaggtaggtgctatcctaaaatacgatgacagttataaacttcatattgtcatagttttagttatacttttctatggtaaatttatatgtttttttttaaatttaaattttcaggtctattatagtgaagaaacagacattttgtttgttgaggcaatagaaggcaaatgtgaagtcagaaagaagaacgaccttccagcatgcaattctccagtaatatttcatcatgtcttcttttgcgatcgcatatatgacccttccaatggatctctcaagcaggtgattcccttttgcttcctttgctgtagtgcttgttgggaatgatacttccataatcattttcatggtaatttttgtttgcatttataatttgtcctttggaggataactaacttcccccttttttggttggcaaacagttaccagctcaagtaaaactaaggtactcaactggaattgtggataatgaaattgcataccaaaagaaaaagggtaagggtaaacaggaagaaagtgaattagaagttgagaaacagcaagaagcatatcaggagaaccgcttggctacgttagacatatttgcaggttgtggaggtctgtcagaggggttgcaccaatctggtactgtctacctttctgtctatttcatcaatttttatgtgcttagccatatttatttcttaggcactttatgtccaaccatcttttgttattactggtgtaggtgtatcattaactaaatgggcaattgaatatgaagagcctgctggagatgcattcaaactcaatcatcctgagtcattggtcttcattaaaaactgcaatgtcattcttaggtccgtatgacaagtttgctctcctctattcctgtttaaattgctaataactaaaagcaagttataatacagggctattatggagaagtgtggggatgtagatgactgcatctccacttctgaggcagctgaattagcggcatcacttgatgagaaagagattaatgatttgccattaccggggcaagtagatttcatcaatggaggccctccatgccaggtattatatattatagttttcctttgttatctaatctctggagtaattaataaatgattcattaagacaaagctgttttactttgcagggtttctctggaatgaatagatttaaccatagtacatggagtaaagtacaatgtgagatgattttagctttcttatcatttgctgattacttccggccaaggtatttcctcttagagaatgtgaggaacttcgtgtctttcaataaaggacagacgtttaagttaactctggcttcacttcttgaaatgggttatcaggtagatattcctttcacctaactgcaatttctgtaatatacttgttataagaatacaaatataagtacatgtgtggttgtgtatgatattctggttttgcccgtttaggtgaggtttggtattttggaagctggagcctatggagtttctcagtcaagaaaacgagcattcatatgggcagcctcccctgaagagactcttcctgaatggccagagccaatgcatgtctttgctgttccagagttgaaagttacattatcacataatttgcagtatgcagctgtgaggagtactgcaagtggagcccctttccgtgcaattactgtgcgagatacaattggtgatctaccagctgtaggaaatggggcctcaaagacgaatctggaggtaactacattgaaattatttccaaaattgcttcattctataaaaggttgtaagagcatattcaatttacaatgatttgtttccacagtatcaaagtgaagccgtctcatggtttcagaagaaaattcgaggaaacatggctgtccttactgatcatatatcaaaggaaatgaatgagcttaacctgattcggtgtcaaaagattccaaagcgaccaggcgcagattggcatgatcttccagacgagaaggtacataattggcttctgttctttgcatctgtttttaaatctgatcagaatgaaattgttgagctgctgggttgtttgtttccttaaaaattgcaggttaaactctctactggacaattggtagatttaataccctggtgtctgccaaatacagccaaaaggcacaatcaatggaaagggctatttggaaggctggattgggaagggaacttcccaacttccatcactgaccctcaaccaatgggcaaggttggaatgtgctttcatccagaacaggacaggattctgacggttcgggaatgtgctcggtctcaagtaagtcgttaaacttactgaacattcattgctatttggtttgtgaaagcttgggtagaatgaagtagaaaacattggtataagctcaatggatattgtttgtctgccaaaacagggtttcccagacatctacaagtttgctggtaacattcaacacaagcaccggcagataggaaatgcggttccacctccattggcatttgcattgggaaggaaactaaaggaagcattagacagtaaaaagtgaatgtaatttgaatttttagttgatgggattttgttaaagactcctccattttaccttagacaaaaggcccttaattcatttataaaaatttgttgtctggctttttt

SEQ ID NO: 500 - DNA, 8311 bp, Gossypium raimondii
  source 1..8311: mol_type = genomic DNA
ggcttataggctatagttacctccaggatcacacatccattctacattacatgtttctcagctgaagaaacatgttggagcagcaccagtctaatcttaattgccattattggatgcacatgaggccttgcttaaggagccagtcagaatttgtgagcacaaaaatggttaagaaaaattaatcaactggtcattgaggtgcttgtggaatgggcagacactttcccttaagatgctacctaagaaccactgcaacagctgtgtgtcacctttcctcattttaatcatcgaggacaaggatctgttttggcaggtagtacttgttacgaggtaaaacttgaattagaaaaataaagataagttaagtaaacagggtgtaaaacaaggtgttttgttttagttaaacggtgcagataagaatttaatgaaagcggtacgcataaagggaagacaacggcctgagctattaataggccaactaacttttcaaacggctaattactttccttttaagcataccattatcgttgagcagtttcaatatttcttccttctcgattttcttctcttcctttttacttatgaattttctttcttgaattttctaattgcgtcataaaaatatataattttttttaagttaaacaatgaggactcaatacatttgaagtaaagttggagtttaagccttgtaaaaaataaaataatactaagagaatttatattagctcgaatttaaattttattaagagcaaatgtaattaaaggggcgaaaaatatccaatctcacttataaacgaaatagcaacgggtagggtatttgacttggtccatatggttgatgtgactttatacaatacaagtggacagcattgtcatagtttagggcggaaaacgggaaagaagtttcgattttttttgtgtgtttttggcgtttggggaaaaaaacttgtaaaaaagttaaaaatggtagaaaattttcttttttggaggaatggcgccaacatttttttccaaaatcagtgttcccgcctttctttgcttttccccttcatttatttataatgttcagtgtttcttccctttctattcatcttcactaaacactgttctcactgaacgaagccaaacatcaaagaaacagtgagtttagagctaaggttttcgtctcttctccaagtcatgggatctgtcgcgcttttggattctaattccccttcaggttttcctttttttattttattttaatctcttaaactgaattattgattccatatattcattcccgattgttgatttttgatttgctgctcaccgaagaaaagaaaaaaaggggggggggggctgggcccatgtctatattaatgtatattatcattttttacgcatttaattttatgtataagagagacgaaactgtagacttactgtttaagacaggtcatctagtctgagctaagccaatcaggtgatggcagtttgttttaattacatgttcaacaaaaatccctttttgttttggttttgtgattttcattgcaattatcgaaggttgcagcttgaatatgaaaatccaagtttagttgttattcagatggggtcttttgattattttctaggattttcttgtttctgcatgttgatcccttgtgctttaaccttcatgcactttgttttattttaatggggctagtcccgtttgagtttcttctgtgtccttttttttctggtggatttgatctttgggacctgttctttttttctataaaacctttggtttgataaacttgttacactagatttgcatttgtatttccctgtgagtttatgctaaacatctctaggttctacttacatttggctttgcaaaatgttttagcaaaacaagattgtgtgtgtctgtgtgtggacttgatctttgggacctgttctttttttttctataaaacctttggtttgatcaacttgtttgattagatttgcatttgtatttccctgtgagtttgtgctaaacatttcaaggttctgcttacatttgacttatcaaaatgttttagcaaaacaagattgcgtgtgtgcgtgaagaatcttgttaatacatttctttacaaagtaaaaattacctagtcttatgctttactgcaagatcttttttgtcttttcttttttttgcttagccgtttcagttatctgtgtgatcgtgctagcatattattttcttatatttttgtttatttatttttcatcatgcagtgatatagaagaggcatgttgtgtttatgctataccatttatttatatttttgtttctgatggttttttaaagtgcctaaactcaagttcacaagatctttttttggcatttaggaatgaagaagaataagaaaggcaagaataaatctgctaaatcttccaccaagaaagagatggaaactgataaaaaagtacagaagcgtaatagtgctcaggaaaatggggagccagtcccttcaaaaaggccaaagagagctgctgcctgcactgattttaaggagaaagcagtttgcatatctgaaaaggattcagttgttgagacaaagaaggatatggtagtagaagatgaaatcctagctgtagcgctgacttgtgaaaaagatgatggccggcctaataggaggctaactgattttgtattgcataattcagaaggtcttccacaaccctttgagatgttggaagtcattgacatgttcataactggtttgatattgccgcttgaagaaaatactgacaaggaaaaagtaaaggagaagagtgttagatgtgaaggatttggacatgttgagtcttgggacatctctggttatgaagatggttgtccagtgatatggctttcaactgatgtagctgattacacctgctgtaagccaagtggcagctataaaaaatattatgaacatttctttgaaaaagctcgagcttgtgtagaggtttataaaaaactttcaaagccttctggtggaaatcctgacttaagtcttgatgaattgcttgctggtgttgttcggtccatgagtggaagcaagagcttctctcgtggggcatcaattcgggattttgttatttcccagggagaatttatttataatcaactgattggtttggatgcaacttcgagggtaaatgaccaggtatttgctggattgcctgttcttactgccctcaaagatgagagcaggaagcgtgaaaatatagggctagacatagcactgttttctggtggtgctctgactattggtaaaaaaggagagggggaaagtaaattggatgagacatattcatctacttttacagctgaggaagatgaggatgcaaagttggcaaaactgttgcaagaggaagaatactggaaatctatgaaacagaagaggaaccaaggctcagcttctatgtcaaacaaattctatatcaaaatcaatgaagatgagattgcaaatgattatcctcttccagcatactacaagaattctaatgaagaaactgatgaacttgtagtttttgaaagtgactttgatgtgtgtgatcctgaggaactccctcgaagcgtgctccacaactggtcattttacaattcagactcaaggctgatttccttggagctgcttcctatgaaaccatgtgctgacattgatgttaccatttttggttctggggttatgactgctgatgatggaatcggattctgtcttgacaatgaccttagtcagtctacttcaggttcttcgagtgtgctgaatgctgatggaattccaatttttttgagtgctattaaggaatggatgattgaatttggatcatcaatgatattcatctcaatcaggacagacatggcctggtattgtctcatgtttcttgattaggattctgttgctataatatttttgctaactcatgtttgatctacaatgcctgcagaaaagtttctaaaaagtaaaaaaaaaaaaaaaaccatagttctttgcaattatctactaatatgcaaaacaaccagattttcctattcattaaataattagttttaactgtgacaagtttttattttctctccatttttcaggtatagacttggcaaaccatcaaagcaatatcttccatggtatgaaccagtactcaaaacagcaagggttgcaataagcattattacattgttgaaggagcaaacacgagtatcacgcctctctttcaatgatgtaattaagagggtgtctgagttcaagaaggataatcgtgcttttatatcttctgatccagcagctgttgagagatatattgttgtgcatggacagataatactacaactctttgcagagtttcctgatgaaaagattaaaaagtgtgcatttgtggttggccttgcaaataaaatggaagagagacaccatacaaaatggttagtcaagaagaagaaagttgtacacaagaatgaaccaaatttaaatcctcgagcagcaatgatgcctatagcttctataagaaaggctatgcaggcgaccacaacaaggctaatcaataggatttggggggaatactattcaaactactctccagaagattcaaaggaggaaactaattgtgaggtgaaagatgaagatgaaaatgaggaacaagaagaaaatgaagatgatgatggtgatgctaatgctgaagctgaagctgaagctgaagctgaagctgaagctgaagctgatgctaatgctaatgctgaagataaaccgattccaatggagactcagaagtctccttcagtatcaaagcaacctagacagtgttctactgaggaagtaagctgggatggagagcctgtaagccaaacaagctctgataagcctctttataaacgagccattgtacatggagaagtagttgtggtcggaagtgctgtttctgttgaagttgatttgtatgaacttcctgcaatctattttgtggagtacatgtttgaaacttcaaagggaagaaaaatgtttcatggacgaatgatgcagagaggatctgaaactgtacttggcaatgcagctaatgagagagaggtgttcctaacaaataactgtggagattttgaattggaggatgtgaaacagactgtggtggtagatattcgattaagaccttggggatatcagcataggaaagataatgccaacatggacaaacttgatagagcagaagcagaggagaggaagagaaaaggacttccaatggagtattattgtaaaagcttgtattggcctgagaggggtgccttctatacgctccccattgattctttgggtttgggttctggttgctgccattcttgccaagttaaggatgctgggagggccaaagaagtgttcaaagtgaattcatcaaatacaggctttgtatacaagggaactgagtactctctccatgattatgtctatgtcagtccacatcaatttacagtagaaagggctgagactgaaaactttaaagctgggaggaatataggcttgaagccttatgttgtgtgccaagtgctagagattattatcccaaaggggcagaaaaaagtttgtgaagagtccacccaagttaaagtcaggagatttttccgaccagaggacatttcagctgaaaaggcttacagttctgatataagagaggtaggtgctatcctaaaatacgatgacagttataaacttcatattgtcatagttttagttatacttttctatggtaaatttatatgtttttttttaaatttaaattttcaggtctattatagtgaagaaacagacattttgtttgttgaggcaatagaaggcaaatgtgaagtcagaaagaagaacgaccttccagcatgcaattctccagtaatatttcatcatgtcttcttttgcgatcgcatatatgacccttccaatggatctctcaagcaggtgattcccttttgcttcctttgctgtagtgcttgttgggaatgatacttccataatcattttcatggtaatttttgtttgcatttataatttgtcctttggaggataactaacttcccccttttttggttggcaaacagttaccagctcaagtaaaactaaggtactcaactggaattgtggataatgaaattgcataccaaaagaaaaagggtaagggtaaacaggaagaaagtgaattagaagttgagaaacagcaagaagcatatcaggagaaccgcttggctacgttagacatatttgcaggttgtggaggtctgtcagaggggttgcaccaatctggtactgtctacctttctgtctatttcatcaatttttatgtgcttagccatatttatttcttaggcactttatgtccaaccatcttttgttattactggtgtaggtgtatcattaactaaatgggcaattgaatatgaagagcctgctggagatgcattcaaactcaatcatcctgagtcattggtcttcattaaaaactgcaatgtcattcttaggtccgtatgacaagtttgctctcctctattcctgtttaaattgctaataactaaaagcaagttataatacagggctattatggagaagtgtggggatgtagatgactgcatctccacttctgaggcagctgaattagcggcatcacttgatgagaaagagattaatgatttgccattaccggggcaagtagatttcatcaatggaggccctccatgccaggtattatatattatagttttcctttgttatctaatctctggagtaattaataaatgattcattaagacaaagctgttttactttgcagggtttctctggaatgaatagatttaaccatagtacatggagtaaagtacaatgtgagatgattttagctttcttatcatttgctgattacttccggccaaggtatttcctcttagagaatgtgaggaacttcgtgtctttcaataaaggacagacgtttaagttaactctggcttcacttcttgaaatgggttatcaggtagatattcctttcacctaactgcaatttctgtaatatacttgttataagaatacaaatataagtacatgtgtggttgtgtatgatattctggttttgcccgtttaggtgaggtttggtattttggaagctggagcctatggagtttctcagtcaagaaaacgagcattcatatgggcagcctcccctgaagagactcttcctgaatggccagagccaatgcatgtctttgctgttccagagttgaaagttacattatcacataatttgcagtatgcagctgtgaggagtactgcaagtggagcccctttccgtgcaattactgtgcgagatacaattggtgatctaccagctgtaggaaatggggcctcaaagacgaatctggaggtaactacattgaaattatttccaaaattgcttcattctataaaaggttgtaagagcatattcaatttacaatgatttgtttccacagtatcaaagtgaagccgtctcatggtttcagaagaaaattcgaggaaacatggctgtccttactgatcatatatcaaaggaaatgaatgagcttaacctgattcggtgtcaaaagattccaaagcgaccaggcgcagattggcatgatcttccagacgagaaggtacataattggcttctgttctttgcatctgtttttaaatctgatcagaatgaaattgttgagctgctgggttgtttgtttccttaaaaattgcaggttaaactctctactggacaattggtagatttaataccctggtgtctgccaaatacagccaaaaggcacaatcaatggaaagggctatttggaaggctggattgggaagggaacttcccaacttccatcactgaccctcaaccaatgggcaaggttggaatgtgctttcatccagaacaggacaggattctgacggttcgggaatgtgctcggtctcaagtaagtcgttaaacttactgaacattcattgctatttggtttgtgaaagcttgggtagaatgaagtagaaaacattggtataagctcaatggatattgtttgtctgccaaaacagggtttcccagacatctacaagtttgctggtaacattcaacacaagcaccggcagataggaaatgcggttccacctccattggcatttgcattgggaaggaaactaaaggaagcattagacagtaaaaagtgaatgtaatttgaatttttagttgatgggattttgttaaagactcctccattttaccttagacaaaaggcccttaattcatttataaaaatttgttgtctggctttttt

SEQ ID NO: 501 - DNA, 7567 bp, Gossypium raimondii
  source 1..7567: mol_type = genomic DNA
attaagagcaaatgtaattaaaggggcgaaaaatatccaatctcacttataaacgaaatagcaacgggtagggtatttgacttggtccatatggttgatgtgactttatacaatacaagtggacagcattgtcatagtttagggcggaaaacgggaaagaagtttcgattttttttgtgtgtttttggcgtttggggaaaaaaacttgtaaaaaagttaaaaatggtagaaaattttcttttttggaggaatggcgccaacatttttttccaaaatcagtgttcccgcctttctttgcttttccccttcatttatttataatgttcagtgtttcttccctttctattcatcttcactaaacactgttctcactgaacgaagccaaacatcaaagaaacagtgagtttagagctaaggttttcgtctcttctccaagtcatgggatctgtcgcgcttttggattctaattccccttcaggttttcctttttttattttattttaatctcttaaactgaattattgattccatatattcattcccgattgttgatttttgatttgctgctcaccgaagaaaagaaaaaaaggggggggggggctgggcccatgtctatattaatgtatattatcattttttacgcatttaattttatgtataagagagacgaaactgtagacttactgtttaagacaggtcatctagtctgagctaagccaatcaggtgatggcagtttgttttaattacatgttcaacaaaaatccctttttgttttggttttgtgattttcattgcaattatcgaaggttgcagcttgaatatgaaaatccaagtttagttgttattcagatggggtcttttgattattttctaggattttcttgtttctgcatgttgatcccttgtgctttaaccttcatgcactttgttttattttaatggggctagtcccgtttgagtttcttctgtgtccttttttttctggtggatttgatctttgggacctgttctttttttctataaaacctttggtttgataaacttgttacactagatttgcatttgtatttccctgtgagtttatgctaaacatctctaggttctacttacatttggctttgcaaaatgttttagcaaaacaagattgtgtgtgtctgtgtgtggacttgatctttgggacctgttctttttttttctataaaacctttggtttgatcaacttgtttgattagatttgcatttgtatttccctgtgagtttgtgctaaacatttcaaggttctgcttacatttgacttatcaaaatgttttagcaaaacaagattgcgtgtgtgcgtgaagaatcttgttaatacatttctttacaaagtaaaaattacctagtcttatgctttactgcaagatcttttttgtcttttcttttttttgcttagccgtttcagttatctgtgtgatcgtgctagcatattattttcttatatttttgtttatttatttttcatcatgcagtgatatagaagaggcatgttgtgtttatgctataccatttatttatatttttgtttctgatggttttttaaagtgcctaaactcaagttcacaagatctttttttggcatttaggaatgaagaagaataagaaaggcaagaataaatctgctaaatcttccaccaagaaagagatggaaactgataaaaaagtacagaagcgtaatagtgctcaggaaaatggggagccagtcccttcaaaaaggccaaagagagctgctgcctgcactgattttaaggagaaagcagtttgcatatctgaaaaggattcagttgttgagacaaagaaggatatggtagtagaagatgaaatcctagctgtagcgctgacttgtgaaaaagatgatggccggcctaataggaggctaactgattttgtattgcataattcagaaggtcttccacaaccctttgagatgttggaagtcattgacatgttcataactggtttgatattgccgcttgaagaaaatactgacaaggaaaaagtaaaggagaagagtgttagatgtgaaggatttggacatgttgagtcttgggacatctctggttatgaagatggttgtccagtgatatggctttcaactgatgtagctgattacacctgctgtaagccaagtggcagctataaaaaatattatgaacatttctttgaaaaagctcgagcttgtgtagaggtttataaaaaactttcaaagccttctggtggaaatcctgacttaagtcttgatgaattgcttgctggtgttgttcggtccatgagtggaagcaagagcttctctcgtggggcatcaattcgggattttgttatttcccagggagaatttatttataatcaactgattggtttggatgcaacttcgagggtaaatgaccaggtatttgctggattgcctgttcttactgccctcaaagatgagagcaggaagcgtgaaaatatagggctagacatagcactgttttctggtggtgctctgactattggtaaaaaaggagagggggaaagtaaattggatgagacatattcatctacttttacagctgaggaagatgaggatgcaaagttggcaaaactgttgcaagaggaagaatactggaaatctatgaaacagaagaggaaccaaggctcagcttctatgtcaaacaaattctatatcaaaatcaatgaagatgagattgcaaatgattatcctcttccagcatactacaagaattctaatgaagaaactgatgaacttgtagtttttgaaagtgactttgatgtgtgtgatcctgaggaactccctcgaagcgtgctccacaactggtcattttacaattcagactcaaggctgatttccttggagctgcttcctatgaaaccatgtgctgacattgatgttaccatttttggttctggggttatgactgctgatgatggaatcggattctgtcttgacaatgaccttagtcagtctacttcaggttcttcgagtgtgctgaatgctgatggaattccaatttttttgagtgctattaaggaatggatgattgaatttggatcatcaatgatattcatctcaatcaggacagacatggcctggtattgtctcatgtttcttgattaggattctgttgctataatatttttgctaactcatgtttgatctacaatgcctgcagaaaagtttctaaaaagtaaaaaaaaaaaaaaaaccatagttctttgcaattatctactaatatgcaaaacaaccagattttcctattcattaaataattagttttaactgtgacaagtttttattttctctccatttttcaggtatagacttggcaaaccatcaaagcaatatcttccatggtatgaaccagtactcaaaacagcaagggttgcaataagcattattacattgttgaaggagcaaacacgagtatcacgcctctctttcaatgatgtaattaagagggtgtctgagttcaagaaggataatcgtgcttttatatcttctgatccagcagctgttgagagatatattgttgtgcatggacagataatactacaactctttgcagagtttcctgatgaaaagattaaaaagtgtgcatttgtggttggccttgcaaataaaatggaagagagacaccatacaaaatggttagtcaagaagaagaaagttgtacacaagaatgaaccaaatttaaatcctcgagcagcaatgatgcctatagcttctataagaaaggctatgcaggcgaccacaacaaggctaatcaataggatttggggggaatactattcaaactactctccagaagattcaaaggaggaaactaattgtgaggtgaaagatgaagatgaaaatgaggaacaagaagaaaatgaagatgatgatggtgatgctaatgctgaagctgaagctgaagctgaagctgaagctgaagctgaagctgatgctaatgctaatgctgaagataaaccgattccaatggagactcagaagtctccttcagtatcaaagcaacctagacagtgttctactgaggaagtaagctgggatggagagcctgtaagccaaacaagctctgataagcctctttataaacgagccattgtacatggagaagtagttgtggtcggaagtgctgtttctgttgaagttgatttgtatgaacttcctgcaatctattttgtggagtacatgtttgaaacttcaaagggaagaaaaatgtttcatggacgaatgatgcagagaggatctgaaactgtacttggcaatgcagctaatgagagagaggtgttcctaacaaataactgtggagattttgaattggaggatgtgaaacagactgtggtggtagatattcgattaagaccttggggatatcagcataggaaagataatgccaacatggacaaacttgatagagcagaagcagaggagaggaagagaaaaggacttccaatggagtattattgtaaaagcttgtattggcctgagaggggtgccttctatacgctccccattgattctttgggtttgggttctggttgctgccattcttgccaagttaaggatgctgggagggccaaagaagtgttcaaagtgaattcatcaaatacaggctttgtatacaagggaactgagtactctctccatgattatgtctatgtcagtccacatcaatttacagtagaaagggctgagactgaaaactttaaagctgggaggaatataggcttgaagccttatgttgtgtgccaagtgctagagattattatcccaaaggggcagaaaaaagtttgtgaagagtccacccaagttaaagtcaggagatttttccgaccagaggacatttcagctgaaaaggcttacagttctgatataagagaggtaggtgctatcctaaaatacgatgacagttataaacttcatattgtcatagttttagttatacttttctatggtaaatttatatgtttttttttaaatttaaattttcaggtctattatagtgaagaaacagacattttgtttgttgaggcaatagaaggcaaatgtgaagtcagaaagaagaacgaccttccagcatgcaattctccagtaatatttcatcatgtcttcttttgcgatcgcatatatgacccttccaatggatctctcaagcaggtgattcccttttgcttcctttgctgtagtgcttgttgggaatgatacttccataatcattttcatggtaatttttgtttgcatttataatttgtcctttggaggataactaacttcccccttttttggttggcaaacagttaccagctcaagtaaaactaaggtactcaactggaattgtggataatgaaattgcataccaaaagaaaaagggtaagggtaaacaggaagaaagtgaattagaagttgagaaacagcaagaagcatatcaggagaaccgcttggctacgttagacatatttgcaggttgtggaggtctgtcagaggggttgcaccaatctggtactgtctacctttctgtctatttcatcaatttttatgtgcttagccatatttatttcttaggcactttatgtccaaccatcttttgttattactggtgtaggtgtatcattaactaaatgggcaattgaatatgaagagcctgctggagatgcattcaaactcaatcatcctgagtcattggtcttcattaaaaactgcaatgtcattcttaggtccgtatgacaagtttgctctcctctattcctgtttaaattgctaataactaaaagcaagttataatacagggctattatggagaagtgtggggatgtagatgactgcatctccacttctgaggcagctgaattagcggcatcacttgatgagaaagagattaatgatttgccattaccggggcaagtagatttcatcaatggaggccctccatgccaggtattatatattatagttttcctttgttatctaatctctggagtaattaataaatgattcattaagacaaagctgttttactttgcagggtttctctggaatgaatagatttaaccatagtacatggagtaaagtacaatgtgagatgattttagctttcttatcatttgctgattacttccggccaaggtatttcctcttagagaatgtgaggaacttcgtgtctttcaataaaggacagacgtttaagttaactctggcttcacttcttgaaatgggttatcaggtagatattcctttcacctaactgcaatttctgtaatatacttgttataagaatacaaatataagtacatgtgtggttgtgtatgatattctggttttgcccgtttaggtgaggtttggtattttggaagctggagcctatggagtttctcagtcaagaaaacgagcattcatatgggcagcctcccctgaagagactcttcctgaatggccagagccaatgcatgtctttgctgttccagagttgaaagttacattatcacataatttgcagtatgcagctgtgaggagtactgcaagtggagcccctttccgtgcaattactgtgcgagatacaattggtgatctaccagctgtaggaaatggggcctcaaagacgaatctggaggtaactacattgaaattatttccaaaattgcttcattctataaaaggttgtaagagcatattcaatttacaatgatttgtttccacagtatcaaagtgaagccgtctcatggtttcagaagaaaattcgaggaaacatggctgtccttactgatcatatatcaaaggaaatgaatgagcttaacctgattcggtgtcaaaagattccaaagcgaccaggcgcagattggcatgatcttccagacgagaaggtacataattggcttctgttctttgcatctgtttttaaatctgatcagaatgaaattgttgagctgctgggttgtttgtttccttaaaaattgcaggttaaactctctactggacaattggtagatttaataccctggtgtctgccaaatacagccaaaaggcacaatcaatggaaagggctatttggaaggctggattgggaagggaacttcccaacttccatcactgaccctcaaccaatgggcaaggttggaatgtgctttcatccagaacaggacaggattctgacggttcgggaatgtgctcggtctcaagtaagtcgttaaacttactgaacattcattgctatttggtttgtgaaagcttgggtagaatgaagtagaaaacattggtataagctcaatggatattgtttgtctgccaaaacagggtttcccagacatctacaagtttgctggtaacattcaacacaagcaccggcagataggaaatgcggttccacctccattggcatttgcattgggaaggaaactaaaggaagcattagacagtaaaaagtgaatgtaatttgaatttttagttgatgggattttgttaaagactcctccattttaccttagacaaaaggcccttaattcatttataaaaatttgttgtctggctttttt

SEQ ID NO: 502 - DNA, 13373 bp, Gossypium raimondii
  source 1..13373: mol_type = genomic DNA
gtgccttggaggagttattaaagaatcatcacttgagttaaggatgacttaggcgagtttggacgaacggatcgcctaaggccgcacggctcgagagacgaaaactctagccccgtgacactttcttatagtcatccttagtttgaaatttcacaaaaaaaaaaaaccaatttccacatctataagttgaaaaaacatagagggttgccataaacttggcactttattttggaaggcaacacatcctatgctctgccccaatagtttaaccactaccgtggtctctatgtcctttaacaggtaatgctaaacctgattggaaaaattagttgcaggcatttcgttcacagtggtccttgtgaagtcttcttccatggattcaaaatctttcccacaacctccaccagtacccactgacgaattgttggttttccctagaagcaagtccttccaagacaacgttggatccgacatcggatctacgaatccatttctttttccttaaatcatacttttttggtattacgaacatcagacgaacaagcaccgtcatcctctttgttgccaaaagttaacgccattccaaaaccttaattttttttagttacaaaattcaatcaaaggttaacctagacaatggcaactatttaactaaataaaatattgtagccgattttaatgtccgcctataagcagctaagttgctctctaacccatctttatttgaggcattagaaaaaacagtagcagaaatgtttgaagcagccaaatgttcacctggaaaagagggatgaaattcttagaagtgatgtctaaacggaagcctaagatgcatctaacgaaaaacagcaaatataatattttaattcagcttaaattgaagtaagtggcaattagaattgaatgtagagagaaatgagtacaaaattagggtggattgtggacatcgaattgaaaaggcaaagcctctgagtcgagttactgacagatatgagatgacagggaaagcaactttattacatacgttaaagtttcacaatagtgggcattgttgtccagtaaccaaaaaaaaaaaaagaatctttaatttatgtcatcattacctttgtttttctttcagctccttttgcaatttcccttccaaataggaaattttagaaataattatgtgtttcctacctaacaaagacacactaatcccattttttaaaattgatcacatattttagatttcagaatggagtaggtgaatcataatatagtgtaattaataaaaaagtgacgctagaaaaagaaacccaaataatttcacgaaattacaagaataacccactttttatacatgtagatgaaaatttccatctgcccttatcagtaatttaactgggaagtgaaaacctagaaaaacacggtaacctaacaagttcacaataaagataattaaaaaaagaaaaaggtgatgccagaatcgtaaataaggtggagaatagggataatttgatccgacagcaagaggaaaaaaaaaagtaatatattttaagtcatcggcattggtcttctaatttcttgaactgggtggaattatatttgtcttcggtacaaaccggcggcgtctttatctctctatttctcgctcggttttttttctttcttaattttcaattttcgggattttacaaaaaatcaatttcgaggttgttgatttgaccctagttctttcttttatttataattttgccctctacacacttcaacatggtttcactgtacagagtcataatgatggtccgtctctcataatccatcctctctttcactctctctctctctctgttttcatttactcattgagaggccgggagtgtgtcgtttcagtggaaaaagtacattgcctttttatcaacagtgagtaaagtttttatctttaagtgttttcatgtatatttttttggggttatgggtgttgatcaatgctgcatgtttatttgttttgattggcgatcaatgttttcttccatttcttttctgcgtctttttacaatatggatttttgggtttttggctgattgtgatgatcttgtttgttttgacacttgattatggtttttgggtctttttgtagttactaaggaggttttcttgttctgcatggtggtctcggttaatgctattttcttttgttgtttgcggtatagtactattgatttagttttaaaacatgatgcattaaacaatgtgcttggaactatcatgtatactgatgaacttgatcgttttatatcagtagtagttgcataaacgtttgagctaaagcagggattctgtttttgttttgtgactgattcagcaatgagaacagtggtggtttatatattgcctcttgtgtattcgtttcttaaggtttatgttttacttcctgtcaatgatactgttctattctgtcggcagttaatgttgattgacctaattatgaacttgggattatccatatattttagttttaatggtttgctattatccactgtgctccttttttttcttcaagtgatgatggccatgactcgtgcatttttcctatgatcaattgatatagtgggtacatgtcttggaatttttatcaatgatgatgtagacttattaattgcgggcaggttataactgctataaatggcagcttgaattctaaatcgaggcttatttcgaaaatagcagttcattaactccgcatgtttgttctccttatgggttaagtaaagatgaatgaaacatagctcttatattcctagaggtatatggagggtttatggccgaatgcataccttctggctggacatgtcaacttggtttatttaaatgtggtgatagcttgtttgttgttgctgacctccagactatttatagctattgtttttttgcttctaaacatgattcctatattttgggactgaatttaaagttctatgtacttaaattttcttgcgccattgttgattttgattatgttgctttgggctagcaaaataagagaactaatctttaaacgtttgagtcaatcaattgaattctttgactgagaaggtggtaatgaaaactaaatgtttgtcgtctttactgctttcattctttacactaggaagctatgtacaaaaacatgtttaaggtttatttcagaatactgctgttggacctccgtccgattctttattatggagcaacttttttcatccatccggttctcatgggcagctggcctgagatattgcacgggctttagattaagatgcatttaacaaattttgacgagcagtttctctctctggaatacctcttggacttccataaatgatttattagttatttatattactgtggatgttgtgctcgtaggctttcatgtgttgagacatctttggtgtatgttattattccttggaaattcactttttgaactaaatatagttttaattgtaattcttgtgatccaatgtttaatcatcttatctctgtctttgtaattttatattaaactttatttgagttcttgccggcatgctatattgattgcttgttggtcatcagaagtcaaaagtcaatggcctccatggaaagtgactcatctgaagagcaagaaaattcaactgcctttctgactggcataaaatttcatgtctcgaacgacgctgataatgtaagtatatttcagtactgttttatctctttgtttatttccatgctggaattgataatactggaatgagttgagtgatttggatcactcaatccacacccaccttgtggtaatctaaaacacagtccaatctgtgtgatatatgtttatattgtcattggggcatctccccctatctccatatagatccttaaatttggcttggttctgttttagtttatgatgttcctttccatgaagccattcatgttatctattttttcctgccactggccttctttctttatagtttagtcactgattcatgctttttctgttttcaaggacaattattgcttcacggttattgtatgcttttcttcttaactttatgcttcagattgttttggacatggaaacgaacaatcatgtagtcttttaattatgtccatatttcaattccttgtagcaatttgagcacttatgattcttttctgatactgtgacaggagaacatgtctatcttggaaattactgcacccagtgaggtgtctgatcctaggttggggtttccgaatttttctaatcattgcaccacttgtgatgccagagatatgaaacaatgcgaaggtggatatcgaattagaaaaacttaaatgatattttgcatctgttaacttttttgtttctttatgtagctatcagtaacatactgatttctttccattcatctttgtaggccattttggggttattaaatttccatacacaatactccatccattttttctttcagaagttgtacatatattaaataagatttgcccaggatgtaaatcgatccggaaagatctatggatgaaggtcgggtacctctcaccttcatcaactgaggatcatcatactgttataatttttcctttttcttccattataacatattattgttattccttcttgtcatcctaaagaaaggaaaaaggataaaatagaaattaaaataatatttgaagaatttaaagttcaaaacaaagcctgtatcccttttggcacaatttaattttctgcaagttatgacttttacctgtttttaactatgctgattttagaagtgagagtaccctctaggatccgattttctggtagtatgtttactttcttttttgagcaaactatgtcctggtgtaggcaattttgatgtttttttttcttgcatgtaccagggtgctaattctatagccagattacttgaaaccaaggggtgtaaatattgtgttgtaagtttgtctggcttcttgttttcttaatcctcttttttttttttttcccttttttgtactaatgatttctggaaacaggggaattcaatagagtggtatccacccatgagattcaagataacctcgaaagagcttttcagaaaaagtgcaatcatggtagaggtaagtgaaaactctttaatgaaggtccggaagagaggaaggcaagcattacctgcagattactgggactttattccaaaagatcaacaacaagaagaaggttttgtgaaaccaggtagaagagtcctatcacatgcccaggtatcatgttcttttccaattcacatgaaaaaattatatttctttgttgtctctaatgtcatctcatatgatttatttatgggaatgcaatccactaaatctggtacatactaattaaaaactttttgttgatatatgttttgcagtgaattttttattcatttcctactttattttgtctgcattgatatttaccaacattgaatttttaactatgaagggaaaaaaaaaactcaattatttgattcttaacaatgtctggtggtagtttttggaaggtggaagagagtgagttggttgtttccataaaatgcaaacattccggttggcaaatgcgaattggttttggaatcttgtcatacaataatatcgttttaaccaaaacttaaaactgttagtgatttgaaaactatcatgggtttatatgggattttgctttctatagaactattatgatattataatagatatggctctaattcagctttcttggcaaggaaaattgttgttacttgcatgtgaagaaggaaaaatgaaggaaaatatctcctaatttgtttcatgtgttaatatataatatatcctagttgctatattactggaagagtattttggttttggaaactattattcaagtctcaaatattcttttaaagtgtagagcagaatcaagcattggagtggcctaccccttccccttatatatatatcagaccttccttcactactttgatgagtgcataatgcttattggttttcaggttcgacatttgttgaaggacgttaatccagagttcattaaaaagtttatttcagaagcagactctattttcctcaatttttttcctgtgacacccaatagtcaccgagtgacagaaatcatgcatacatcttctaatgcgcagcgattgatctttgtaagagtctttactttgaacatcctcatttacatgcttccaaggttgtggttgatatggatggtttatcttattatatgcattacatttgttttcttttcagttttactgaattttctggttaatatggttttgttgtaggatgaaagaaccagggtttacaagaaactggttgacttcagagggctagcaaatgaattgagctctcatgtattggaatgcctaaaaatttctaaggcaagttatacctttcttcctttttaattaaaatttggtccaactttcatggaaccttatgctctctttctttgattgcattcaacgtgcagctgcatgtggagaagccatcaactgaagattctgcactcattgctgctctgaaaaagaataaagattctgcttccaacatgtcaggtttaagatatatgaaagatgttattcttgggaagagaaacgaccattgcttccgcatggttcttactggaaacccaaatcttaaactgtctgaaattggtatcccatgtcatgttgccgagaaattgcaaatcgctgagcaactgaacaggtggaatgaggagagattgaaaacttgttgtaatctgcgtattcttgagaagggtgagattcgcattaggagagaaggtaaattagttagaattcgtcataatgaaaaggtccaagtaggggacactatctataggcccctaaatgatggggatacagtacttataaatagacctccttctatacatcagcactctctcattgcgctatctgttaaagttctacctgtcaattcagttgtttcgataaacccactaatatgttccccttttcgtggagattttgatggtgattgccttcatggttatgttcctcagtccattaacacaagagttgagctcagtgagcttgtttctttggataggcagctaattaatggccaaagtggtcgaaatctgctttcactcagtcatgatagtttaacggctgcttatttggtcaaggaggacggggtactattgaacctgttccagatgcaacagctggaaatgttctgtcctaatcattcgccattgccagccattgtcaaagctcctttgctaagtaatcctgtttggactggaaagcagttatttagcatgctctttcctcccgaatttgattatgtttttgcaccaagtggtgttgtaatccacaatggggatctcatatgttcttctgaagggtcttcttggctacgagatgctgacggcaacctttttcaaagtcttattaagcattaccaaggaaaggtccttgactttttgcatgctgctcaggaagttctttgtgagtggttgtcaatgaggggtttgagtgtttcactcttggacctatatctatctcctgacacagattcacaaaagaacatgatggatgaaatcttctatggtctgcaagaagcagagcagacatgtaacttcaagcagttaatggttgattcttgtcaagatttccttgctggaaacgatgaagaaactaataggttcatggttttggatgttgagcagatgtgctatgagaaacaaagatctgctgcacttagccaagcttctgttgattcatttaagcaagttttccgtgatattcagaatttactctacaagtatgcaaataaagacaattcattattcaccatgttcaaagcagggagcaagggtaacttgctgaagttagtacagcatagtatgtgtcttggattgcaacattcacttgtccctttatcattcagatttcctcatcagctctcatgtgctgcatggaataatcaaaagtctcacatcttaacccaaaaggttgatgatactgatgagtctgctaagaaatatatcccctatgctgtggtcgaaagttcgtttgtgaagggtctgaatccattagaatgttttgttcattcagtgactactcgagacacatctttcagtgacaatgctgaccttcctgggacgctgtcacgaaggttgatgttcttcatgcgtgatctatgcgcagcatatgatggaactgtgaggaatgcatatggagatcaggttgttcagttctgttataatatcgataagggtacatttagtccaactagttgccctgacaaattagtaagtcagggcagtagtcttcctgatggaattggtggacaacctgttggttcattatctgcctgtgccatttctgaggctgcatatagtgcattggatcagccaattagtctacttgaatcttctccattgctgaacttgaaggtgctctctctatctcctcacctccacctcctcctccctctccccctcccatcctcgatggtgttttgaagaattaaaaaacttgtcaaagaatttctttccctccaacctgatgaggaaatgggtgaccttttcatctaaaggaaatttgaaggatacaaaattactgtgctgaaacctacctaatagagttgataaggaccttgacactgttgagaacaaaagcaaatgatctttacgtgttcatggtcaactacaatacatgctgcttcgtaatgtaccttctaatagattaagtggcatatgatttctttttatgttcatgcaccaccatgattcagtccaccaaaattattttacatattattgcagatggtaggatgctaacatattattctgattaaattgctcagagggtccttgagtgtggttctaaaagaagcaatgctgaccagactatgtcactatttttatctggtaaacttgtaaggagaaggcacggtcaggagtatggagccttagaagtcaagaatcatttggagaggctgatctttaaagatattgtgtctactgtctcaataatgtgagtttaagttcctttctcattgtcttgtcctttctcgttttgtgatttatttttcccattactttgatgcttttttatttgagatttattaatgtgttatatggcactagcttctctccacagatgtctagtgaaaaccgtttcagtccttgggtttgccattttcatgtgtttaaggtactgtgatacgcaagtggtgtatctatgttgataagatttccacttcaaagtttcacatcaaaattatttactttccaggatattgtgacaaggaggcggctaacagtgcattctattattgatgctcttcacatgcactgcaccaatgccaaaagactatggaaaatcaatttgcccgacatgcaagttacaagcaagtaagtttgcccctttttagcatgtgtagatgttgcaaaaaggaggcactggtaatatgtattgctcttttccctctagtccctgttgaaagaaatcttgaagaccccaaatttgtgctttttctgtcaatattaagatcatgacctatatctttgtacatgtattatcactttctgatgcagaaatagggcttcaatcttttgttttcatggcttgcacccaagtttatgccttgatttttgtggtccttgtcaatctaatctcagcctgtctcaaagttgtatggttagatgcatgaaaaactataatcagcataaattcaatttaattatttcatttgagggcttcaaattttcaataatatgcttccagatggtagttgttccaatgcatttgaattctgaagggtggaaaatggtcgctgtaattgaatctgctagcattattgtttacttcctagagctttattttgcttcttatttgtttgattgaatgacagggcctgttctgttattgacatggaaaatgaagatgatacgttttgtatcactgtcacaattgttgaatgtaaaacttctcgtatagaactggatgtgattcaagacatggtgataccttcccttctggaagcagtggtaaaaggtatgtacttgcatccaaattgactagtattttttttttgaaggagcaaattgactagtgttaggaatcccatttgagggctgatttggtgaaatggcttagacctttattatgggtctttgaacaactaccgtcaagattgagaatatagtgttggaatctaaatttgccatgtgaattgctggtagactatttctatcactctgtttttgaaaatattgaaggttacgccttccctcagtgtgcatttcttatcttttacctataactgttaattccctattttgattacgtctgtttattggaggaagttctgatatttgaacttgtatcattgtatgaccaaatttctggtaggaaaagcagaatctttagtagggtctggtcaaatgtaaaaggcaatatttaaaccaccagaaatatcaaatggcctaaaagatgtgacatgcatctttgtagatatgcattacaagttgattacaagttggtaatattcatctgtttctgccttcaaatttttgaaattttctttaggattcccggagatcaagaaggtggaaattctatggaatgaggatttcagagtcccaaattctcataaacctgctcctggtgaactttacttgagggtttctgtatctggcgattttggtataacgaaactctggagtgtgcttatgaatgattgcctccaactaatggatataatcgattggacacggagccatccagataacattaatcagttttgcttggcattcggaatagatgctggatggagattctttctcaatgtttgttatccttgttataatttattccctgttttctacttgcacaaaagcttaagggtaactgcatatattaacctgctcatgcgtttctctatgcagaatatgaagagtgcaatatcagatactggcaagtctatactaaatgaacatctacaccttgctgccaattgtctgtcagctaccggggagtttgttggtttaaattcaaaaggcttgaaacaacaaagagaacatgcatttgtctcttctcctttcatgcaagcatgcttttcagttagttcttgtcattgtttcccctttgatgctcttaatataaaatgtttaagtagctgtcatttttatagtcaacttagctttatacaatttgtggcagaaccctagtgcttgctttgtcaaagctgcaaagactggagttgcggataatcttcaagggaccattgacctattggcttggggaagggttcctcgtattgggactggtggacagtttgatatagtctattctatgaaggtattttatgcagatcttgctgttgttttaaatatgtagcattgtggattagactttcactatagttgcatttaactgattggaaattgttgggtgttgaatatttaagcatctccccctattttttggttcaaaagaagagagaggcaaacaatgggtgagacataagataccattaaagttattttatgaataatgcattccggaagtgatatggagttacggatttgggcttgttaccaactgatgctgaataggatagtggaaataggttctcttcagaatgtaattggtttttgagagggaccaagtcagcaataaagaaactcgagcgaaatatgtatagaagagaatgcatcttgatggtaaatgtttctcaactaagagagtaacacttgtgaaggatcctattgtcgtatcactgacttggaaatttctgagtcaaagagctcaatttcgtatctcaagggcaggactatcctgtgcatgaggtacattttgatgcttatagtacagattcacttgttctcaatctggtcaaggtataaaaatgagctacgctactttcttagctgtatttgagatggagctgtatataagtttaatagtgcttcaaattaatcaagttttacatttttaatcattgttattttatactctcgaggtttagatccaaattccttagtagtctactggttcttcctttagtttccttcttaaaaaaaaagaagagatttttggctagtaactgtcattatatccatccatccatcccattactatttttcaggatgaagagcttgcagaaccggttgatgtgtataagctgctaggagattctattaattccaagaagcaggatatagagtttgaagtacctaaagtttttaaccctacatctgagaaacatagttctccgttcaagggagctcttcgtgactctgtctttgatgagtggaagaagattgaaacgaaaacaaggtcactcttgagaggacgtctaaccttgaatgacgttcagaggcttgagcgtaatttaaagaatattttgcgcaagtaagctttcctccagttgttggttatgttctatgtttatagtgctcaagtttttcctccattgttggtattgtacacgggctttggtgctcttatattctaatagcttttgatatctgtcccaaattcctaatattctctgaactcatggttgtgccgactgcagatatcctattgatcaccgtgtaagtgaagctgactgggataccttgatgatggcgttgtactttcaccctcatagagttgagaagatcggatctggagccaaggaaataaaggtacgtgatactggaaaaataggaaaaagaaagcaaaaaatgagacaatgaaaaaagaaaacaaaggttgttttaatgcttcatttccatatcttttgcaggtagggcatcatcccgatcatgcagacagtcgttgtttctttttggttagaacagatgagacaactgtagatttctcatatcggaaatgtgttgtcggtgcactcgagatcattgctccttgtagggcacaatcctacaagtcaaaatggttacaacatggtagtttgtaaaccaaactccacaagcgctcacttttgcatgtaaatatagcaagatccataccttcctaaaactgtacatttctacagactactgagcacaagaggagtagtttgaacagtatttcatatccttttgttgactttttttttctttttctttttttaaaatttttaagagtgtatttcccagcctaatagaatagggtcgccgctttcctcagcttctttttgctccttctactggaacttgtttgcctttctttttaacatgagacagaaaagatccagtggaagcagcaacgaaaagcttgtaaagttcgaccccatttcgttttgtattttccataactacacgtgatagtgttattaagtagcctgtttcagctaatctcattattttctttagtttagacgct

SEQ ID NO: 503 - DNA, 11457 bp, Gossypium raimondii
  source 1..11457: mol_type = genomic DNA
ttggggttatgggtgttgatcaatgctgcatgtttatttgttttgattggcgatcaatgttttcttccatttcttttctgcgtctttttacaatatggatttttgggtttttggctgattgtgatgatcttgtttgttttgacacttgattatggtttttgggtctttttgtagttactaaggaggttttcttgttctgcatggtggtctcggttaatgctattttcttttgttgtttgcggtatagtactattgatttagttttaaaacatgatgcattaaacaatgtgcttggaactatcatgtatactgatgaacttgatcgttttatatcagtagtagttgcataaacgtttgagctaaagcagggattctgtttttgttttgtgactgattcagcaatgagaacagtggtggtttatatattgcctcttgtgtattcgtttcttaaggtttatgttttacttcctgtcaatgatactgttctattctgtcggcagttaatgttgattgacctaattatgaacttgggattatccatatattttagttttaatggtttgctattatccactgtgctccttttttttcttcaagtgatgatggccatgactcgtgcatttttcctatgatcaattgatatagtgggtacatgtcttggaatttttatcaatgatgatgtagacttattaattgcgggcaggttataactgctataaatggcagcttgaattctaaatcgaggcttatttcgaaaatagcagttcattaactccgcatgtttgttctccttatgggttaagtaaagatgaatgaaacatagctcttatattcctagaggtatatggagggtttatggccgaatgcataccttctggctggacatgtcaacttggtttatttaaatgtggtgatagcttgtttgttgttgctgacctccagactatttatagctattgtttttttgcttctaaacatgattcctatattttgggactgaatttaaagttctatgtacttaaattttcttgcgccattgttgattttgattatgttgctttgggctagcaaaataagagaactaatctttaaacgtttgagtcaatcaattgaattctttgactgagaaggtggtaatgaaaactaaatgtttgtcgtctttactgctttcattctttacactaggaagctatgtacaaaaacatgtttaaggtttatttcagaatactgctgttggacctccgtccgattctttattatggagcaacttttttcatccatccggttctcatgggcagctggcctgagatattgcacgggctttagattaagatgcatttaacaaattttgacgagcagtttctctctctggaatacctcttggacttccataaatgatttattagttatttatattactgtggatgttgtgctcgtaggctttcatgtgttgagacatctttggtgtatgttattattccttggaaattcactttttgaactaaatatagttttaattgtaattcttgtgatccaatgtttaatcatcttatctctgtctttgtaattttatattaaactttatttgagttcttgccggcatgctatattgattgcttgttggtcatcagaagtcaaaagtcaatggcctccatggaaagtgactcatctgaagagcaagaaaattcaactgcctttctgactggcataaaatttcatgtctcgaacgacgctgataatgtaagtatatttcagtactgttttatctctttgtttatttccatgctggaattgataatactggaatgagttgagtgatttggatcactcaatccacacccaccttgtggtaatctaaaacacagtccaatctgtgtgatatatgtttatattgtcattggggcatctccccctatctccatatagatccttaaatttggcttggttctgttttagtttatgatgttcctttccatgaagccattcatgttatctattttttcctgccactggccttctttctttatagtttagtcactgattcatgctttttctgttttcaaggacaattattgcttcacggttattgtatgcttttcttcttaactttatgcttcagattgttttggacatggaaacgaacaatcatgtagtcttttaattatgtccatatttcaattccttgtagcaatttgagcacttatgattcttttctgatactgtgacaggagaacatgtctatcttggaaattactgcacccagtgaggtgtctgatcctaggttggggtttccgaatttttctaatcattgcaccacttgtgatgccagagatatgaaacaatgcgaaggtggatatcgaattagaaaaacttaaatgatattttgcatctgttaacttttttgtttctttatgtagctatcagtaacatactgatttctttccattcatctttgtaggccattttggggttattaaatttccatacacaatactccatccattttttctttcagaagttgtacatatattaaataagatttgcccaggatgtaaatcgatccggaaagatctatggatgaaggtcgggtacctctcaccttcatcaactgaggatcatcatactgttataatttttcctttttcttccattataacatattattgttattccttcttgtcatcctaaagaaaggaaaaaggataaaatagaaattaaaataatatttgaagaatttaaagttcaaaacaaagcctgtatcccttttggcacaatttaattttctgcaagttatgacttttacctgtttttaactatgctgattttagaagtgagagtaccctctaggatccgattttctggtagtatgtttactttcttttttgagcaaactatgtcctggtgtaggcaattttgatgtttttttttcttgcatgtaccagggtgctaattctatagccagattacttgaaaccaaggggtgtaaatattgtgttgtaagtttgtctggcttcttgttttcttaatcctcttttttttttttttcccttttttgtactaatgatttctggaaacaggggaattcaatagagtggtatccacccatgagattcaagataacctcgaaagagcttttcagaaaaagtgcaatcatggtagaggtaagtgaaaactctttaatgaaggtccggaagagaggaaggcaagcattacctgcagattactgggactttattccaaaagatcaacaacaagaagaaggttttgtgaaaccaggtagaagagtcctatcacatgcccaggtatcatgttcttttccaattcacatgaaaaaattatatttctttgttgtctctaatgtcatctcatatgatttatttatgggaatgcaatccactaaatctggtacatactaattaaaaactttttgttgatatatgttttgcagtgaattttttattcatttcctactttattttgtctgcattgatatttaccaacattgaatttttaactatgaagggaaaaaaaaaactcaattatttgattcttaacaatgtctggtggtagtttttggaaggtggaagagagtgagttggttgtttccataaaatgcaaacattccggttggcaaatgcgaattggttttggaatcttgtcatacaataatatcgttttaaccaaaacttaaaactgttagtgatttgaaaactatcatgggtttatatgggattttgctttctatagaactattatgatattataatagatatggctctaattcagctttcttggcaaggaaaattgttgttacttgcatgtgaagaaggaaaaatgaaggaaaatatctcctaatttgtttcatgtgttaatatataatatatcctagttgctatattactggaagagtattttggttttggaaactattattcaagtctcaaatattcttttaaagtgtagagcagaatcaagcattggagtggcctaccccttccccttatatatatatcagaccttccttcactactttgatgagtgcataatgcttattggttttcaggttcgacatttgttgaaggacgttaatccagagttcattaaaaagtttatttcagaagcagactctattttcctcaatttttttcctgtgacacccaatagtcaccgagtgacagaaatcatgcatacatcttctaatgcgcagcgattgatctttgtaagagtctttactttgaacatcctcatttacatgcttccaaggttgtggttgatatggatggtttatcttattatatgcattacatttgttttcttttcagttttactgaattttctggttaatatggttttgttgtaggatgaaagaaccagggtttacaagaaactggttgacttcagagggctagcaaatgaattgagctctcatgtattggaatgcctaaaaatttctaaggcaagttatacctttcttcctttttaattaaaatttggtccaactttcatggaaccttatgctctctttctttgattgcattcaacgtgcagctgcatgtggagaagccatcaactgaagattctgcactcattgctgctctgaaaaagaataaagattctgcttccaacatgtcaggtttaagatatatgaaagatgttattcttgggaagagaaacgaccattgcttccgcatggttcttactggaaacccaaatcttaaactgtctgaaattggtatcccatgtcatgttgccgagaaattgcaaatcgctgagcaactgaacaggtggaatgaggagagattgaaaacttgttgtaatctgcgtattcttgagaagggtgagattcgcattaggagagaaggtaaattagttagaattcgtcataatgaaaaggtccaagtaggggacactatctataggcccctaaatgatggggatacagtacttataaatagacctccttctatacatcagcactctctcattgcgctatctgttaaagttctacctgtcaattcagttgtttcgataaacccactaatatgttccccttttcgtggagattttgatggtgattgccttcatggttatgttcctcagtccattaacacaagagttgagctcagtgagcttgtttctttggataggcagctaattaatggccaaagtggtcgaaatctgctttcactcagtcatgatagtttaacggctgcttatttggtcaaggaggacggggtactattgaacctgttccagatgcaacagctggaaatgttctgtcctaatcattcgccattgccagccattgtcaaagctcctttgctaagtaatcctgtttggactggaaagcagttatttagcatgctctttcctcccgaatttgattatgtttttgcaccaagtggtgttgtaatccacaatggggatctcatatgttcttctgaagggtcttcttggctacgagatgctgacggcaacctttttcaaagtcttattaagcattaccaaggaaaggtccttgactttttgcatgctgctcaggaagttctttgtgagtggttgtcaatgaggggtttgagtgtttcactcttggacctatatctatctcctgacacagattcacaaaagaacatgatggatgaaatcttctatggtctgcaagaagcagagcagacatgtaacttcaagcagttaatggttgattcttgtcaagatttccttgctggaaacgatgaagaaactaataggttcatggttttggatgttgagcagatgtgctatgagaaacaaagatctgctgcacttagccaagcttctgttgattcatttaagcaagttttccgtgatattcagaatttactctacaagtatgcaaataaagacaattcattattcaccatgttcaaagcagggagcaagggtaacttgctgaagttagtacagcatagtatgtgtcttggattgcaacattcacttgtccctttatcattcagatttcctcatcagctctcatgtgctgcatggaataatcaaaagtctcacatcttaacccaaaaggttgatgatactgatgagtctgctaagaaatatatcccctatgctgtggtcgaaagttcgtttgtgaagggtctgaatccattagaatgttttgttcattcagtgactactcgagacacatctttcagtgacaatgctgaccttcctgggacgctgtcacgaaggttgatgttcttcatgcgtgatctatgcgcagcatatgatggaactgtgaggaatgcatatggagatcaggttgttcagttctgttataatatcgataagggtacatttagtccaactagttgccctgacaaattagtaagtcagggcagtagtcttcctgatggaattggtggacaacctgttggttcattatctgcctgtgccatttctgaggctgcatatagtgcattggatcagccaattagtctacttgaatcttctccattgctgaacttgaaggtgctctctctatctcctcacctccacctcctcctccctctccccctcccatcctcgatggtgttttgaagaattaaaaaacttgtcaaagaatttctttccctccaacctgatgaggaaatgggtgaccttttcatctaaaggaaatttgaaggatacaaaattactgtgctgaaacctacctaatagagttgataaggaccttgacactgttgagaacaaaagcaaatgatctttacgtgttcatggtcaactacaatacatgctgcttcgtaatgtaccttctaatagattaagtggcatatgatttctttttatgttcatgcaccaccatgattcagtccaccaaaattattttacatattattgcagatggtaggatgctaacatattattctgattaaattgctcagagggtccttgagtgtggttctaaaagaagcaatgctgaccagactatgtcactatttttatctggtaaacttgtaaggagaaggcacggtcaggagtatggagccttagaagtcaagaatcatttggagaggctgatctttaaagatattgtgtctactgtctcaataatgtgagtttaagttcctttctcattgtcttgtcctttctcgttttgtgatttatttttcccattactttgatgcttttttatttgagatttattaatgtgttatatggcactagcttctctccacagatgtctagtgaaaaccgtttcagtccttgggtttgccattttcatgtgtttaaggtactgtgatacgcaagtggtgtatctatgttgataagatttccacttcaaagtttcacatcaaaattatttactttccaggatattgtgacaaggaggcggctaacagtgcattctattattgatgctcttcacatgcactgcaccaatgccaaaagactatggaaaatcaatttgcccgacatgcaagttacaagcaagtaagtttgcccctttttagcatgtgtagatgttgcaaaaaggaggcactggtaatatgtattgctcttttccctctagtccctgttgaaagaaatcttgaagaccccaaatttgtgctttttctgtcaatattaagatcatgacctatatctttgtacatgtattatcactttctgatgcagaaatagggcttcaatcttttgttttcatggcttgcacccaagtttatgccttgatttttgtggtccttgtcaatctaatctcagcctgtctcaaagttgtatggttagatgcatgaaaaactataatcagcataaattcaatttaattatttcatttgagggcttcaaattttcaataatatgcttccagatggtagttgttccaatgcatttgaattctgaagggtggaaaatggtcgctgtaattgaatctgctagcattattgtttacttcctagagctttattttgcttcttatttgtttgattgaatgacagggcctgttctgttattgacatggaaaatgaagatgatacgttttgtatcactgtcacaattgttgaatgtaaaacttctcgtatagaactggatgtgattcaagacatggtgataccttcccttctggaagcagtggtaaaaggtatgtacttgcatccaaattgactagtattttttttttgaaggagcaaattgactagtgttaggaatcccatttgagggctgatttggtgaaatggcttagacctttattatgggtctttgaacaactaccgtcaagattgagaatatagtgttggaatctaaatttgccatgtgaattgctggtagactatttctatcactctgtttttgaaaatattgaaggttacgccttccctcagtgtgcatttcttatcttttacctataactgttaattccctattttgattacgtctgtttattggaggaagttctgatatttgaacttgtatcattgtatgaccaaatttctggtaggaaaagcagaatctttagtagggtctggtcaaatgtaaaaggcaatatttaaaccaccagaaatatcaaatggcctaaaagatgtgacatgcatctttgtagatatgcattacaagttgattacaagttggtaatattcatctgtttctgccttcaaatttttgaaattttctttaggattcccggagatcaagaaggtggaaattctatggaatgaggatttcagagtcccaaattctcataaacctgctcctggtgaactttacttgagggtttctgtatctggcgattttggtataacgaaactctggagtgtgcttatgaatgattgcctccaactaatggatataatcgattggacacggagccatccagataacattaatcagttttgcttggcattcggaatagatgctggatggagattctttctcaatgtttgttatccttgttataatttattccctgttttctacttgcacaaaagcttaagggtaactgcatatattaacctgctcatgcgtttctctatgcagaatatgaagagtgcaatatcagatactggcaagtctatactaaatgaacatctacaccttgctgccaattgtctgtcagctaccggggagtttgttggtttaaattcaaaaggcttgaaacaacaaagagaacatgcatttgtctcttctcctttcatgcaagcatgcttttcagttagttcttgtcattgtttcccctttgatgctcttaatataaaatgtttaagtagctgtcatttttatagtcaacttagctttatacaatttgtggcagaaccctagtgcttgctttgtcaaagctgcaaagactggagttgcggataatcttcaagggaccattgacctattggcttggggaagggttcctcgtattgggactggtggacagtttgatatagtctattctatgaaggtattttatgcagatcttgctgttgttttaaatatgtagcattgtggattagactttcactatagttgcatttaactgattggaaattgttgggtgttgaatatttaagcatctccccctattttttggttcaaaagaagagagaggcaaacaatgggtgagacataagataccattaaagttattttatgaataatgcattccggaagtgatatggagttacggatttgggcttgttaccaactgatgctgaataggatagtggaaataggttctcttcagaatgtaattggtttttgagagggaccaagtcagcaataaagaaactcgagcgaaatatgtatagaagagaatgcatcttgatggtaaatgtttctcaactaagagagtaacacttgtgaaggatcctattgtcgtatcactgacttggaaatttctgagtcaaagagctcaatttcgtatctcaagggcaggactatcctgtgcatgaggtacattttgatgcttatagtacagattcacttgttctcaatctggtcaaggtataaaaatgagctacgctactttcttagctgtatttgagatggagctgtatataagtttaatagtgcttcaaattaatcaagttttacatttttaatcattgttattttatactctcgaggtttagatccaaattccttagtagtctactggttcttcctttagtttccttcttaaaaaaaaagaagagatttttggctagtaactgtcattatatccatccatccatcccattactatttttcaggatgaagagcttgcagaaccggttgatgtgtataagctgctaggagattctattaattccaagaagcaggatatagagtttgaagtacctaaagtttttaaccctacatctgagaaacatagttctccgttcaagggagctcttcgtgactctgtctttgatgagtggaagaagattgaaacgaaaacaaggtcactcttgagaggacgtctaaccttgaatgacgttcagaggcttgagcgtaatttaaagaatattttgcgcaagtaagctttcctccagttgttggttatgttctatgtttatagtgctcaagtttttcctccattgttggtattgtacacgggctttggtgctcttatattctaatagcttttgatatctgtcccaaattcctaatattctctgaactcatggttgtgccgactgcagatatcctattgatcaccgtgtaagtgaagctgactgggataccttgatgatggcgttgtactttcaccctcatagagttgagaagatcggatctggagccaaggaaataaaggtacgtgatactggaaaaataggaaaaagaaagcaaaaaatgagacaatgaaaaaagaaaacaaaggttgttttaatgcttcatttccatatcttttgcaggtagggcatcatcccgatcatgcagacagtcgttgtttctttttggttagaacagatgagacaactgtagatttctcatatcggaaatgtgttgtcggtgcactcgagatcattgctccttgtagggcacaatcctacaagtcaaaatggttacaacatggtagtttgtaaaccaaactccacaagcgctcacttttgcatgtaaatatagcaagatccataccttcctaaaactgtacatttctacagactactgagcacaagaggagtagtttgaacagtatttcatatccttttgttgactttttttttctttttctttttttaaaatttttaagagtgtatttcccagcctaatagaatagggtcgccgctttcctcagcttctttttgctccttctactggaacttgtttgcctttctttttaacatgagacagaaaagatccagtggaagcagcaacgaaaagcttgtaaagttcgaccccatttcgttttgtattttccataactacacgtgatagtgttattaagtagcctgtttcagctaatctcattattttctttagtttagacgcttgaatcttacattattttcttaaagatttaca

SEQ ID NO: 504 - DNA, 11272 bp, Gossypium raimondii
  source 1..11272: mol_type = genomic DNA
ggtttttgggtctttttgtagttactaaggaggttttcttgttctgcatggtggtctcggttaatgctattttcttttgttgtttgcggtatagtactattgatttagttttaaaacatgatgcattaaacaatgtgcttggaactatcatgtatactgatgaacttgatcgttttatatcagtagtagttgcataaacgtttgagctaaagcagggattctgtttttgttttgtgactgattcagcaatgagaacagtggtggtttatatattgcctcttgtgtattcgtttcttaaggtttatgttttacttcctgtcaatgatactgttctattctgtcggcagttaatgttgattgacctaattatgaacttgggattatccatatattttagttttaatggtttgctattatccactgtgctccttttttttcttcaagtgatgatggccatgactcgtgcatttttcctatgatcaattgatatagtgggtacatgtcttggaatttttatcaatgatgatgtagacttattaattgcgggcaggttataactgctataaatggcagcttgaattctaaatcgaggcttatttcgaaaatagcagttcattaactccgcatgtttgttctccttatgggttaagtaaagatgaatgaaacatagctcttatattcctagaggtatatggagggtttatggccgaatgcataccttctggctggacatgtcaacttggtttatttaaatgtggtgatagcttgtttgttgttgctgacctccagactatttatagctattgtttttttgcttctaaacatgattcctatattttgggactgaatttaaagttctatgtacttaaattttcttgcgccattgttgattttgattatgttgctttgggctagcaaaataagagaactaatctttaaacgtttgagtcaatcaattgaattctttgactgagaaggtggtaatgaaaactaaatgtttgtcgtctttactgctttcattctttacactaggaagctatgtacaaaaacatgtttaaggtttatttcagaatactgctgttggacctccgtccgattctttattatggagcaacttttttcatccatccggttctcatgggcagctggcctgagatattgcacgggctttagattaagatgcatttaacaaattttgacgagcagtttctctctctggaatacctcttggacttccataaatgatttattagttatttatattactgtggatgttgtgctcgtaggctttcatgtgttgagacatctttggtgtatgttattattccttggaaattcactttttgaactaaatatagttttaattgtaattcttgtgatccaatgtttaatcatcttatctctgtctttgtaattttatattaaactttatttgagttcttgccggcatgctatattgattgcttgttggtcatcagaagtcaaaagtcaatggcctccatggaaagtgactcatctgaagagcaagaaaattcaactgcctttctgactggcataaaatttcatgtctcgaacgacgctgataatgtaagtatatttcagtactgttttatctctttgtttatttccatgctggaattgataatactggaatgagttgagtgatttggatcactcaatccacacccaccttgtggtaatctaaaacacagtccaatctgtgtgatatatgtttatattgtcattggggcatctccccctatctccatatagatccttaaatttggcttggttctgttttagtttatgatgttcctttccatgaagccattcatgttatctattttttcctgccactggccttctttctttatagtttagtcactgattcatgctttttctgttttcaaggacaattattgcttcacggttattgtatgcttttcttcttaactttatgcttcagattgttttggacatggaaacgaacaatcatgtagtcttttaattatgtccatatttcaattccttgtagcaatttgagcacttatgattcttttctgatactgtgacaggagaacatgtctatcttggaaattactgcacccagtgaggtgtctgatcctaggttggggtttccgaatttttctaatcattgcaccacttgtgatgccagagatatgaaacaatgcgaaggtggatatcgaattagaaaaacttaaatgatattttgcatctgttaacttttttgtttctttatgtagctatcagtaacatactgatttctttccattcatctttgtaggccattttggggttattaaatttccatacacaatactccatccattttttctttcagaagttgtacatatattaaataagatttgcccaggatgtaaatcgatccggaaagatctatggatgaaggtcgggtacctctcaccttcatcaactgaggatcatcatactgttataatttttcctttttcttccattataacatattattgttattccttcttgtcatcctaaagaaaggaaaaaggataaaatagaaattaaaataatatttgaagaatttaaagttcaaaacaaagcctgtatcccttttggcacaatttaattttctgcaagttatgacttttacctgtttttaactatgctgattttagaagtgagagtaccctctaggatccgattttctggtagtatgtttactttcttttttgagcaaactatgtcctggtgtaggcaattttgatgtttttttttcttgcatgtaccagggtgctaattctatagccagattacttgaaaccaaggggtgtaaatattgtgttgtaagtttgtctggcttcttgttttcttaatcctcttttttttttttttcccttttttgtactaatgatttctggaaacaggggaattcaatagagtggtatccacccatgagattcaagataacctcgaaagagcttttcagaaaaagtgcaatcatggtagaggtaagtgaaaactctttaatgaaggtccggaagagaggaaggcaagcattacctgcagattactgggactttattccaaaagatcaacaacaagaagaaggttttgtgaaaccaggtagaagagtcctatcacatgcccaggtatcatgttcttttccaattcacatgaaaaaattatatttctttgttgtctctaatgtcatctcatatgatttatttatgggaatgcaatccactaaatctggtacatactaattaaaaactttttgttgatatatgttttgcagtgaattttttattcatttcctactttattttgtctgcattgatatttaccaacattgaatttttaactatgaagggaaaaaaaaaactcaattatttgattcttaacaatgtctggtggtagtttttggaaggtggaagagagtgagttggttgtttccataaaatgcaaacattccggttggcaaatgcgaattggttttggaatcttgtcatacaataatatcgttttaaccaaaacttaaaactgttagtgatttgaaaactatcatgggtttatatgggattttgctttctatagaactattatgatattataatagatatggctctaattcagctttcttggcaaggaaaattgttgttacttgcatgtgaagaaggaaaaatgaaggaaaatatctcctaatttgtttcatgtgttaatatataatatatcctagttgctatattactggaagagtattttggttttggaaactattattcaagtctcaaatattcttttaaagtgtagagcagaatcaagcattggagtggcctaccccttccccttatatatatatcagaccttccttcactactttgatgagtgcataatgcttattggttttcaggttcgacatttgttgaaggacgttaatccagagttcattaaaaagtttatttcagaagcagactctattttcctcaatttttttcctgtgacacccaatagtcaccgagtgacagaaatcatgcatacatcttctaatgcgcagcgattgatctttgtaagagtctttactttgaacatcctcatttacatgcttccaaggttgtggttgatatggatggtttatcttattatatgcattacatttgttttcttttcagttttactgaattttctggttaatatggttttgttgtaggatgaaagaaccagggtttacaagaaactggttgacttcagagggctagcaaatgaattgagctctcatgtattggaatgcctaaaaatttctaaggcaagttatacctttcttcctttttaattaaaatttggtccaactttcatggaaccttatgctctctttctttgattgcattcaacgtgcagctgcatgtggagaagccatcaactgaagattctgcactcattgctgctctgaaaaagaataaagattctgcttccaacatgtcaggtttaagatatatgaaagatgttattcttgggaagagaaacgaccattgcttccgcatggttcttactggaaacccaaatcttaaactgtctgaaattggtatcccatgtcatgttgccgagaaattgcaaatcgctgagcaactgaacaggtggaatgaggagagattgaaaacttgttgtaatctgcgtattcttgagaagggtgagattcgcattaggagagaaggtaaattagttagaattcgtcataatgaaaaggtccaagtaggggacactatctataggcccctaaatgatggggatacagtacttataaatagacctccttctatacatcagcactctctcattgcgctatctgttaaagttctacctgtcaattcagttgtttcgataaacccactaatatgttccccttttcgtggagattttgatggtgattgccttcatggttatgttcctcagtccattaacacaagagttgagctcagtgagcttgtttctttggataggcagctaattaatggccaaagtggtcgaaatctgctttcactcagtcatgatagtttaacggctgcttatttggtcaaggaggacggggtactattgaacctgttccagatgcaacagctggaaatgttctgtcctaatcattcgccattgccagccattgtcaaagctcctttgctaagtaatcctgtttggactggaaagcagttatttagcatgctctttcctcccgaatttgattatgtttttgcaccaagtggtgttgtaatccacaatggggatctcatatgttcttctgaagggtcttcttggctacgagatgctgacggcaacctttttcaaagtcttattaagcattaccaaggaaaggtccttgactttttgcatgctgctcaggaagttctttgtgagtggttgtcaatgaggggtttgagtgtttcactcttggacctatatctatctcctgacacagattcacaaaagaacatgatggatgaaatcttctatggtctgcaagaagcagagcagacatgtaacttcaagcagttaatggttgattcttgtcaagatttccttgctggaaacgatgaagaaactaataggttcatggttttggatgttgagcagatgtgctatgagaaacaaagatctgctgcacttagccaagcttctgttgattcatttaagcaagttttccgtgatattcagaatttactctacaagtatgcaaataaagacaattcattattcaccatgttcaaagcagggagcaagggtaacttgctgaagttagtacagcatagtatgtgtcttggattgcaacattcacttgtccctttatcattcagatttcctcatcagctctcatgtgctgcatggaataatcaaaagtctcacatcttaacccaaaaggttgatgatactgatgagtctgctaagaaatatatcccctatgctgtggtcgaaagttcgtttgtgaagggtctgaatccattagaatgttttgttcattcagtgactactcgagacacatctttcagtgacaatgctgaccttcctgggacgctgtcacgaaggttgatgttcttcatgcgtgatctatgcgcagcatatgatggaactgtgaggaatgcatatggagatcaggttgttcagttctgttataatatcgataagggtacatttagtccaactagttgccctgacaaattagtaagtcagggcagtagtcttcctgatggaattggtggacaacctgttggttcattatctgcctgtgccatttctgaggctgcatatagtgcattggatcagccaattagtctacttgaatcttctccattgctgaacttgaaggtgctctctctatctcctcacctccacctcctcctccctctccccctcccatcctcgatggtgttttgaagaattaaaaaacttgtcaaagaatttctttccctccaacctgatgaggaaatgggtgaccttttcatctaaaggaaatttgaaggatacaaaattactgtgctgaaacctacctaatagagttgataaggaccttgacactgttgagaacaaaagcaaatgatctttacgtgttcatggtcaactacaatacatgctgcttcgtaatgtaccttctaatagattaagtggcatatgatttctttttatgttcatgcaccaccatgattcagtccaccaaaattattttacatattattgcagatggtaggatgctaacatattattctgattaaattgctcagagggtccttgagtgtggttctaaaagaagcaatgctgaccagactatgtcactatttttatctggtaaacttgtaaggagaaggcacggtcaggagtatggagccttagaagtcaagaatcatttggagaggctgatctttaaagatattgtgtctactgtctcaataatgtgagtttaagttcctttctcattgtcttgtcctttctcgttttgtgatttatttttcccattactttgatgcttttttatttgagatttattaatgtgttatatggcactagcttctctccacagatgtctagtgaaaaccgtttcagtccttgggtttgccattttcatgtgtttaaggtactgtgatacgcaagtggtgtatctatgttgataagatttccacttcaaagtttcacatcaaaattatttactttccaggatattgtgacaaggaggcggctaacagtgcattctattattgatgctcttcacatgcactgcaccaatgccaaaagactatggaaaatcaatttgcccgacatgcaagttacaagcaagtaagtttgcccctttttagcatgtgtagatgttgcaaaaaggaggcactggtaatatgtattgctcttttccctctagtccctgttgaaagaaatcttgaagaccccaaatttgtgctttttctgtcaatattaagatcatgacctatatctttgtacatgtattatcactttctgatgcagaaatagggcttcaatcttttgttttcatggcttgcacccaagtttatgccttgatttttgtggtccttgtcaatctaatctcagcctgtctcaaagttgtatggttagatgcatgaaaaactataatcagcataaattcaatttaattatttcatttgagggcttcaaattttcaataatatgcttccagatggtagttgttccaatgcatttgaattctgaagggtggaaaatggtcgctgtaattgaatctgctagcattattgtttacttcctagagctttattttgcttcttatttgtttgattgaatgacagggcctgttctgttattgacatggaaaatgaagatgatacgttttgtatcactgtcacaattgttgaatgtaaaacttctcgtatagaactggatgtgattcaagacatggtgataccttcccttctggaagcagtggtaaaaggtatgtacttgcatccaaattgactagtattttttttttgaaggagcaaattgactagtgttaggaatcccatttgagggctgatttggtgaaatggcttagacctttattatgggtctttgaacaactaccgtcaagattgagaatatagtgttggaatctaaatttgccatgtgaattgctggtagactatttctatcactctgtttttgaaaatattgaaggttacgccttccctcagtgtgcatttcttatcttttacctataactgttaattccctattttgattacgtctgtttattggaggaagttctgatatttgaacttgtatcattgtatgaccaaatttctggtaggaaaagcagaatctttagtagggtctggtcaaatgtaaaaggcaatatttaaaccaccagaaatatcaaatggcctaaaagatgtgacatgcatctttgtagatatgcattacaagttgattacaagttggtaatattcatctgtttctgccttcaaatttttgaaattttctttaggattcccggagatcaagaaggtggaaattctatggaatgaggatttcagagtcccaaattctcataaacctgctcctggtgaactttacttgagggtttctgtatctggcgattttggtataacgaaactctggagtgtgcttatgaatgattgcctccaactaatggatataatcgattggacacggagccatccagataacattaatcagttttgcttggcattcggaatagatgctggatggagattctttctcaatgtttgttatccttgttataatttattccctgttttctacttgcacaaaagcttaagggtaactgcatatattaacctgctcatgcgtttctctatgcagaatatgaagagtgcaatatcagatactggcaagtctatactaaatgaacatctacaccttgctgccaattgtctgtcagctaccggggagtttgttggtttaaattcaaaaggcttgaaacaacaaagagaacatgcatttgtctcttctcctttcatgcaagcatgcttttcagttagttcttgtcattgtttcccctttgatgctcttaatataaaatgtttaagtagctgtcatttttatagtcaacttagctttatacaatttgtggcagaaccctagtgcttgctttgtcaaagctgcaaagactggagttgcggataatcttcaagggaccattgacctattggcttggggaagggttcctcgtattgggactggtggacagtttgatatagtctattctatgaaggtattttatgcagatcttgctgttgttttaaatatgtagcattgtggattagactttcactatagttgcatttaactgattggaaattgttgggtgttgaatatttaagcatctccccctattttttggttcaaaagaagagagaggcaaacaatgggtgagacataagataccattaaagttattttatgaataatgcattccggaagtgatatggagttacggatttgggcttgttaccaactgatgctgaataggatagtggaaataggttctcttcagaatgtaattggtttttgagagggaccaagtcagcaataaagaaactcgagcgaaatatgtatagaagagaatgcatcttgatggtaaatgtttctcaactaagagagtaacacttgtgaaggatcctattgtcgtatcactgacttggaaatttctgagtcaaagagctcaatttcgtatctcaagggcaggactatcctgtgcatgaggtacattttgatgcttatagtacagattcacttgttctcaatctggtcaaggtataaaaatgagctacgctactttcttagctgtatttgagatggagctgtatataagtttaatagtgcttcaaattaatcaagttttacatttttaatcattgttattttatactctcgaggtttagatccaaattccttagtagtctactggttcttcctttagtttccttcttaaaaaaaaagaagagatttttggctagtaactgtcattatatccatccatccatcccattactatttttcaggatgaagagcttgcagaaccggttgatgtgtataagctgctaggagattctattaattccaagaagcaggatatagagtttgaagtacctaaagtttttaaccctacatctgagaaacatagttctccgttcaagggagctcttcgtgactctgtctttgatgagtggaagaagattgaaacgaaaacaaggtcactcttgagaggacgtctaaccttgaatgacgttcagaggcttgagcgtaatttaaagaatattttgcgcaagtaagctttcctccagttgttggttatgttctatgtttatagtgctcaagtttttcctccattgttggtattgtacacgggctttggtgctcttatattctaatagcttttgatatctgtcccaaattcctaatattctctgaactcatggttgtgccgactgcagatatcctattgatcaccgtgtaagtgaagctgactgggataccttgatgatggcgttgtactttcaccctcatagagttgagaagatcggatctggagccaaggaaataaaggtacgtgatactggaaaaataggaaaaagaaagcaaaaaatgagacaatgaaaaaagaaaacaaaggttgttttaatgcttcatttccatatcttttgcaggtagggcatcatcccgatcatgcagacagtcgttgtttctttttggttagaacagatgagacaactgtagatttctcatatcggaaatgtgttgtcggtgcactcgagatcattgctccttgtagggcacaatcctacaagtcaaaatggttacaacatggtagtttgtaaaccaaactccacaagcgctcacttttgcatgtaaatatagcaagatccataccttcctaaaactgtacatttctacagactactgagcacaagaggagtagtttgaacagtatttcatatccttttgttgactttttttttctttttctttttttaaaatttttaagagtgtatttcccagcctaatagaatagggtcgccgctttcctcagcttctttttgctccttctactggaacttgtttgcctttctttttaacatgagacagaaaagatccagtggaagcagcaacgaaaagcttgtaaagttcgaccccatttcgttttgtattttccataactacacgtgatagtgttattaagtagcctgtttcagctaatctcattattttctttagtttagacgct

SEQ ID NO: 505 - DNA, 8965 bp, Gossypium raimondii
  source 1..8965: mol_type = genomic DNA
ttatttgtttggattggtgatcaatgtttacttctcttgcttttttatgtctattctgaatttgggtttttgtctttggttgattgttttgatattatatttgttttgcccctagacttatgattactgggtctcttttagttgattaggtggtatcttgtttctcatggcggtttcggttaaagtttttttttttttttcttgtttatgatataaaactgtttgctttgaaacaatgtgcttggaactctcatgttcatcaatggacctgatcattaaatcagtagtagttataagcttttgaactaattaaagcaggggattctttttctttttctcttttaattactgattaaaaaatgagtgacaatgatgtttcatttcttagttgtgtggtgtttatatatatacatgtacatactgttcaatgttttgcttttattcagtgatgctgttatcattctgttggcaatcagtgttgtttggactaatgaagaactcagatatgtgttggcaattagtgttgattggcctaattaaaaacctagattatgtatcgtgtcaaggtctataagtggttacggcagtagatcatgcatttttcttatgatcaatcgatatgtgagtaagatgcttgttgaaaatttgatcagtggacttatttaattgtcggccgttacaacggctataactatcagtttagattcttattctatgcttattccaacatatcaggctttgttcgtcatatattttgagtaaacaaggctagaataggacttatagattatgtgttggcaattagtgttgattggcctaattaagaacttagattatgtatcgtgttgaggtttataagtggttatggcagtagatcatgcattttcggtatgaccgattgatatgtgagtaagatgcttgttgaaaatttgatcggtagacttatttaattgtcggtcgttacaacggctataactagcggtttagattcttattctatgcttattccaatatatcaggctttgatcgccgtatttgttaagtaaacaagactaggatgggaaacatagctattaaatgcatagaggtatatggagttttatgacataatgcatgcttttcggcttggcactagtacttggtttatttgaatccatttattgcttgtcgtgtttacttaatgcattctagtaaagtttactgagattatcctccaggcattttccgtatttattatgttttagcggatgaatttaacattctatgagcttgatatctcttaccgattttggtttggtaatcgatcacgttatccctttctggtgcatgttgtagtgcccgctattttacctttattatgtctttgaaatggccattatgttttaaaaccctaattattgtaattcaagtgtttaatcatcatgtttttctctttgtagtttatattaatcttcagtttaaggctttggggaatcccatatcggttgtttgattgatcccatgaagtcaaagccgatgacctccattgaaacggacttgtctgaagagcaagaagtgctagctgccactatgactggcataaagtttaatgtatcgggtgatgaagataatgtaagtatacttcattgctgtttttatttatttgtttacctctatgttggaattgataataaaaagattgagttgagtgatttaatagaaccaatccacacctgctgtacgataaactttaaggaaggcgagtctgatttttttgtgaaaatatttgaattgaatttatattcttattcagctatgatttttatatttgctagtcactgtttcttacttttttcggtttttaagattgtttcagacatggcaacttaacaatcatgtagcactttccttaaattattgttagtatttcccttcctcttaacaacttgggacgtcattgttctgttcggattctctgacaggagaagatgtcagtcatggaaattgttgcatcaagtcaggtgtctgaccctaagctggggttcccaaatttgaggaatcattgcaccacctgtgacgccagagatttgggacattgtgaaggtgaatggcaaatttaaaactttaaatgatatccatgtctgttttaagttttgtttcattatatagctattgaaaactcacaggtttgtttccattcgtcttcctaggtcattttggggttattaaatttccgtacccaataatcaatccatattatctatcagaagttgtgcagatattaaataagatttgccttggatgtaaatcaattcgcaaagatctattgataaaggttgcatacctcacaccttcttaaacagatcatcatattgtcatgtaatatcatagtgtccatacgggcttgtttattagtgttgatgtttttcattgtcatgcatgtaccagggagataagtcggcatccaaactacgtcaacgcaaggggtgtaaatattgtgttgtaagtttgtctggcttcttgtgctcttaatcctttttttcttttatcttttattttttttactaattatttctggtcgacaggggaactcaattgactggtatccaccaatgacattcaagatatcctctaaagagctttccaaaaaaagcacaattgtggtagaggtaagtgaagactctttaatgatggtccgaaagagaggaaggcaagccttacctgctgattattgggattttattccaaaagatcaacaagaagaagaagatggtttgatgaaaccacgtcgaagggtcctatcacatgcacaggtagcattttcttttccaattcactgttttacggtgcttcttttgttatctatatcgcgttgttggcattggtatttgccaaccttgaacatttatggtgcttcttttgtttgactacattgtggtgttggtgttgcccgccccttcatgttaacaatcccttttttttaaccacattgatgggtgcatattgcttgatggttttcaggttcattatttactgaaggatgttgatccagagttcattaaaaagttcattcagaatgtggactctattttcctcaattgctttcctgtgacacccaatagtcatcgagtgacggaaatcactcatagatcttctaattcacagcgcttgatctttgtaagcatctttacttcgaacattctgttttacatgctaaacgaccttggttaatgtggatggtttatatgattatgtgtattatatctgttttcttttcagttttacttatttttctggttaatgattttgttgtaggatgagagaactaggctttacaagagactggttgatttccgaggagtagctaatgaactgagttcccatgtattggaatgcctaaaaatttcaaaggcaagttacagtgccttgttttcttttttgtatttggttcaacttttgtggaatcttatgctccatctctgtggttacattcattgtgcagctgttccaggagaagccatcaaatgaagataatgaacttatccttgccctgacaaggaataaagatcctgtttctaacatgtctggtttaagatacatgaaaaacgttcttcttggaaagcgaaatgaccattgcttccgcatggttcttaccggaaatccaagtcttaaactatcggaaattggtataccatgtcctgttgcagagaggttgcaaattgctgagcaactgaacaagtggaacgaggaaagattgaaagcttgctgtaatttgcgtattcttgagaagggtgagatttgtattaggagagaaggtacattagttagaattcatcataatgaaaagatccgactgggggacatcatctataggcccctaaataatggggatatcgtgcttataaacagacctccttctatacatcagcactctttcattgccctatctgtcaaagttctacctgtgagttcctctgtttcgataaacccccttatttgttccccttttcgtggagattttgacggtgattgccttcatggttatgttcctcagtccatcaacacaagggttgagctcagcgagcttgtttctttgaataggcagctaattaatggccaaagtggtcgaaatctactttcactgagtcatgatagtttatcagctgcttatttggtcaatggtgatggggttctcttgaacttgtacgaaatgcaacagcttgaaatgttctgtcccaatcgttcaccgtcgccagcaatcatcaaagctcctttattgagtaatcctgtttggactggaaagcagttattcagcatgctctttcctcccgaattggattatggtttttctccaagtgatcttgttatccgtaatggggagcttataacttcatctgagggatcttcttggttccgagatgctgatggcaacctttttgaaagtctcattaaaaattgtcgaggaaaggtccttgattttttgcatggtgctcaggaagttctttgtgagtggttatcaatgaggggtatgagcgtttcactcttggacctatacctaactcctgattcaaattcacgaaagaacatgatggatgaaatcttctatggtctccaagaaacagagctgacttgcaactttaagcagttaatggttgattccttctgtgatttccttgctggaaataatgaagaaattgatggttttgtgggttttgattttgagcggatgtgttatgagaagcaaagatcagctgcagttaatcaagcttctgttgattcttttaagcaagtttttcgagatatccagaatttatcatacaaatatgcaaataaagacaattcattattgaccatgttcaaagcagggagcaagggtaacttgctgaagctagtgcagcatagcatgtgtcttggactgcaacgttcagttgtacctttatcattcaggtttcctcctaaactctcatgttctgaatggaatgatctaaaatctcagggcttaacccagagcggtgatgacagtgttgaatctgcaaagaatttcatcccatatgctgtgatcgaaagttcttttatgacaggcctgaatccactagaatgttttgtgcattccgttactagtcgagacagttctttcagcgaccatgctgaccttcctgggacactgtcacgaaggcttatgttcttcttgcgtgatctatgcgcatcatatgacggaactgtgaggaatgcatatggaggtcaggttgttcagttcagctatggtagtgataagggtacatctactgcaactagttttgctaatgaaatacaaagtcagggcagtatcctacctgatggaacaggtggccaacctgttggttcattgtctgcctgtgccatttctgaggctgcatatagtgctttggatcaaccgattagtctacttgaaacttcaccattgctaaacctgaaggtgcactctctctttctctttaatatagttgctaagaaccatggtctctcatctaaagaaaaatttaaggatacaaattagtactgtgctgaaacctatctaatatagttcctaagaaccatggaacaacttgacactattctgaactaaaagcaaatggttcgaatgtgcttatggtcaaattccatgcattttgcttctcaatgtccatgttctttttatgttatatgtgccaccacaacccagtccaccaaagttttagccctgatgggatggtgagcaggggcaaatccagaagctcttttttttttttgtggggggggggggggcgaattgaattataaattttttgtgaggctaaagtgtaattttatcttgtattcacttatgatttcatcacttttgaaaggactatatagaaatctttttattttggggggccaaagtgcaagtttaccatatagtaacttttaattctatcatttattaggagactaaaaaaattttcccactctaaattcgcttctgatggcgagatggtgtgaatcccgaatttagttggttgatataaaaatggttgcacatgttagaatgctaacaaattaatctgattaacttgctcagagggtccttgaatgtggttctagaagaaggaattcagaccagactatgacgctatttttatcggataaacttggaaaggggagacattgtttcgagtatgcagctttagaaatcaagaattatttggagaagttgatcttttcggatattgtatctactgtcttaataacgtgagtttttatttcttttataatctcgtcctttctcgttttatgcttttcttattattactcgagatttaattgtgtcctgtggtatagctactccccgcagaagtcaactgaaaactgtttcaacccttgggtttgccattttcatgtgtgcaaggtaatgtgataggtaaatggtatttttaatgatgataaatcttcggctttcaagtttcccccataaaatcctgtactttacaggagatcatgaaaaggaggcgcctttcagtgcattctattattggttctcttcagatgcactacgccaatgccaaaaaattatggaaaatcaatttgcctgacatccaagttacaagcaagtaagttccccccccccccccttttctttagcatgtcccattgttgcaagaactactcactgacactattaatacaatgtaattcatcttttacatagttcaatgaatatcaaaatatctgtccatttaagttaggccaacttatccttatatccgtgggaagttgcttgggttgttaaacaaaacagtgaaattgccagctctggagataaaacatgtccgctagcattattgatttatttcgcagaactttatttttgcttcttgacttgcttgattgaatggcaggtcttgttctcatactgatatgccaaataaagatgatatgttttgtatcaccgtcacgattgttgagccttccaaaaggtctcatatagaattggatgtgattctagccatagtgttaccttcccttctggaagcagttgtaaaaggtttgtaattctagttctccgtttttgtccaaatttactagtattcgaaatctcgttcgtcttcttttggtgttgaatctataaaattctctttaggattcccggagatcaagaaggtgcaaattttatggaatgatcgattcaaagtctcaaaatctcataaaacttctcctggtgaactttacttgagggtagctgtaacaggtggttttggtaaaacaaaactctggggcatgcttatgaatgattgccttccaataatggatttgatcgactggacacgtagtcatccagatgatattaatcagttttgctcggcatatggcatagattctggatggaaattttttctcaatgtaagtattacgtcattgttattactccacatatttctaccggttaacagcattaaattaacttgcttcatgctattttaaatgcagaatttgaagagcgctatatcagataccggcaagactatactaaatgagcatttgcatcttgtcgccgattgtctgtctgttaccggggagtttgttggcttaaactcaaaaggcttgagactacgacaagaacatgcatttgtctcatctccttttatgcaagcatgcttttcagttagtatcattatatctaatttgatgctcttaatttaagccaagtaaatgtcgtttttaaagtcaacttagccttatctaatttgtggcagaatcccagtgcttcctttgtcaaagctgcaaagaaaggagtttcggataatcttcaggggaccattgatgcattgtcatggggaagagttccttgcatcgggaccggtgcacagtttgatatactgtactctatgaaggtatatttatgcatgtcttgcaacataatgtactgtcaaagttattttcatgaatgatgcattttagaaataactagctaattgtgttcatgccattgttaatttcaggatgaaatgatcaccgaaccggttgatgtgtataatcttcttggaaatattgttggttctcagaaccaagatgtagagtttgaagtaccccaagcttgtaacatcaagtccgagaaatatgtctctgaacttatggatgcacttggtgattctgcctttgaacggctgaaaaatattgaaacaaaaatattgagagaatttctgacgttaaatgacattcagaggctttcgcgaactttaaaggatatattgcacaagtaagctttcctccaatttgttgtttaccttctctgttcagtttggtcgtgcttttccgttctctgattgccatatagttccaggtttttggtgatgttatattataatcggtttcaatatgtctttgctaaattccgaatatatgccaagttgaccctttatcttgagcttgttgcactgctttgtatgtcttagaatggtggatagcttatgatatctcctgatttctcgtcttgagtgttttgattctcaacatcaattcagataaaatgactagacatgtttcgtattcttaatttctcagacttgaagttatttacttcttctaagtttatacttttgctgactgtaggtctcctattggccaccggttaagcggagctgactggaattccgcaatgatggcattgtactttcatccgcgaagagatgagaaggtcggatctggagctcaagaaataaaggtatgttaaaatatattggagttttaacatctattatacatgtacatacgcacagatacgatggtttcttgatcttcgttcccctattttttgcaggtagggtatcaccctgaacataaaaattctcgctgctttcttttggcaaggaccgatggggcaatcgtagatttctcgtatcataaatgcgttatcggggctcttgaggtcatcgcccccgataaggtccaattctacaagtcaaaatggtcacaatccggtaatctgtaa

SEQ ID NO: 506 - DNA, 17084 bp, Gossypium raimondii
  source 1..17084: mol_type = genomic DNA
tcgcttaatttttagacttatttttagttttttatattaatttttggttttaaatttttagatttattttcacaaaatgaactttgctttaagttttttaatatcatttaaaaaaaattcaaactaataatttttcaaaattttttaaattatttcactattttaaatatgaaatatttatttttacataatgaagattaaaattaattatattttaaattaattttacaaaatctttgcttcataaatcattcaaacaccttcgatttttttgagaagagcagtagccattactccaatcaaagtgttgccaaatttataaaattttaatataggtttaaaataattattttttcattattattatttaattaaaattgaacatcctcattttactctttaatttgaaagccaatagagcaagacaagcaaggtctgactgtcatttccttcaaaccttactgtaggtacatagtagatcctataatttgtttctctctttcatagcatacaaattatgacttacacttcaaatatcttgtatttaattttatttaaaatttcatatttatgtgaatttttataaattaataataactccataactaaaaataaaataaaatcatgattgatgatattataccagtaaatgcataatttttataataactatttttataattacaattaaaaattaactataatcattaaattaaattattagatttaattaaggatttttaaaatacttaaaataaaaattttaatatatacttaaaatgtatttataatacatatttattaaaaaatacaaatttaattacaaatattaaaaaatatttaaaacatattcataaactcaaataaaataatatacccaatctcaagggtgagatttgtttgattcgaattgttcattataattcggtccaattcttaattttttcacgttaatatttactttttgaatttattttaacaaaataaattttattttatagtttttaaatattatttagcaaaatcttaaagatattttttaaataaataaaaataatctttatataatattttaaataaaatatattttatataatttttttaaaatattttctattttaaatagaaaatatttatttttacatcataaaaaattaattataaataaataaaaataaaaacaatattttataaaccaatcaaatacttcaattttaagactagtttagaaatgcttctaatgagtatttttttgaagaaaaaatactttttgagataaaaatattattaaataaaacacttttaagaaattttttaatactttttatttcaaaaatatttattagaaatactgttaaactaatggtgagtttggatagacggtgcgtttatctacggttagtgtaaaaatagcagtggcggtgatattagatactgtaacgatactatgtatgaaataaaaagaaagctaaacgcaccgcacccaacctcccatctaaacctaacctaaatcttaatcaagctattaatatctagatttttcttactcaaccctaccaaccaacccaaacaataaagtaaaaatcatgtatacaccaacatgctcaaaatttccctcacaaaaagaacaccagtttctataagtccctttctctttctctctcactctcactctcactcatttgactgtccaaatcttctgttatttcacttctcctcctctctttccttcagtcagggagaggaagagagaaaaattgtacaaaatcatggaagagaaatttctagttttatttgaaaaaaaaaacatttttttgggctacattttctcttccctccccactaattttatttttttggtttgatcagtcatttctggctcttacatcgagaacccatttggtttccttctttttaaatttttttagggttttagtgtttcaaaattttagtcagaaaattcagaagaaaccaaagatatttcaggtaatttattttttaagtcttatgggcctaaatttatgatttttccttctttaacgtttgggtacttagaaactgaagcaaaggcgaagaaaatggagaaaaagatgacaaactttttttttgggtattcttttccctaagtaaacacaatttttgagttagagtttttttttggttttttggtttgttactggaaatgttagacggtgtttcttttcttcattttatcaggaaccaaaaaaagttttaatttttaggctttttttttttaactctttgcctaaaacccatttcttgggtttcgttgttttttcagggttatttcatttaggtagactaaaaagaagaaattttcgaggtaatatgctttttacccttttacttctacttcttgttttaacccctttcttgcatgtgatctttgttgagacagttgatttaaaaaaaaaaaaagaagagtgcaaggaatttggccatttgtgttttgttagtcaacttcagtttggttttcaattttggttttaagttatgcatgtctatggtcttgcattttctttgtccatcgtgccgaagtagagagttccttgtgtagttgacctttctcaaggtgagtcttttcatattccagatataagaggaaaaaaatcacccttaatctctttgctgtttacccggcatgatgactttgtgaagttaggtggctaaaatttcttgtttttggctgttgattctcatcattatggttcaggctactagttcattaacagaaaaagcataatatatatttttaacataaatgtagctactatcttatgatcgtccatgcctatgttacttggacttaagtgtgagtgtttgtatgcgtccaacacggatgggtatgttcattttttttttctttttaaaagtttggggggggtttcatatatcaacagactcttgtctgtaaatgagttatacataggtgttggagagggatattttaagaaaaatgaagagagggaataatgcaggtctatgcttcatgggtttgaaatggttagtttttgagtccccttcaaattaggatagtctatattactaaatgaattgtggttttattgattttgttagttggtgaatggaaatgacaaaacatctttcttataaattaatgtgtagttactgtattacttgcttttttttttttgtggaattaagcttaattgactgaacttgctattttgaacaaccacttcctttcgtgatatgtactgtgtgctggaattttcttacgccttcttcttctcttgtagacttctctgtccttcgtgtaattaaatgttattcatggagaacttgcaacttgtttttagcacattagctctgctctgatttgttcagttgctatagtagtttgggagtgattatgctcaggctatgttgctttggcttttaattttccttgaagtaccatgtatgaaacatattaagacatggatatggaggtatgaccctctaaagagttgagcatatacatctcaaacacatacgaatttcctacatgcatccctagtctgactaacataggtattaggttatagctattcaaccttaaactaaggtggatttgtaaaacaattcattttgtccttatcagtagtatctaggatgaccatatgatactggatgggttttggtgtccaacttatttgaagagcgttcaaatgtagttatagggagaaagttgccactggttttaaacttttaatatcattagcgatagcttttcctttttcccctgcatcttgtggtctttttttgttgtaatattattccccttatcattttacttattggatgtttatttgcacagttttgtcttatagtttaaagcgagaaacatggaggaaaattcttcgtcagttattttagatggtgagatagttggtataaagttctgcctggcaacccctaaagaaattgtgagttgaaatctgtctttctcatttatttgcacattagtttgtttctctatagcaataatcttccccccttggtcttttgtcatttggatgactgcaaaatgatttttggatgttccgcttattttaatgctgtcttcacctcctattcgattcctgcaaaggagttatctgtggtatctatatttgcttcttggaactagttttagcatctacaactgggaagtcgaatcatttaacaacaatgttttctgtgaacactaattttgattgattagggtttatcattgagaattacttaccctcaaattaatagtgttgatgatggactaaattctcttattttttatgcaatagttcattctttgatgctaattgactttgttcatcttccaaaatttattcacagcttacagcatcagtcagtggctttcctattaaccatgttagtcaactctcgaattcctaccttggtttgccccttgaatttggtaaatgtagcgcatgtggtacatcagaacctggacaatgtgaaggtgcttacttctattcttgccaatggataaaagttgaaagctagaaaaacaaagagaaaaatgccaaacttctcatttttgttgctgctttcaggtcattttggatatattgaattaccaataccaatataccatcctagccatatcagtgaattaaagcgactgttgagtttgctttgcttgaagtgcctaaaattgaagaacaaggtatgttaactattgcattatctattataaatgatcttgttttgaagtcacttgtacagaaagcggctctgatctctttggctctttttcattagttaaagaagatcaatgaaaggtcttgtcaaaggatgcttagctttttaggttgaaatgtatatctgtcttccatgcttcattagggacagaataaatcttgggatactgaggtataaaccttgcaggatattacctcttatatctaaaaatgtttagcaaattataagcctggaagctcatcaaaaagagatatcaccataaataatggtttgactcataagaatatcataaatattgttacctttttgactgcaggaaaaagtttaaagtcttaaatataactattcctctcttcaaagtaaaataaagtaatccgacgaatggctcacttgttgagagctaaaacaggattaaaatcttgccagtggttaaagtgatgaaaggtttctatttcctcactgctcctagatagatttaccaacccttatttctttccatttcaagttacttttcttcctccattttaccaaatttctctgtctagaactaagatcagcaattaacttattgtactttgtttagcttatatcatcctttatttgcacaaatcttgagttggcatttaaatgcataaacaatgtatttgtaagaaaatgtttaatcatgtgaaagtttctagaaatgccttgatttttcctctggagaatttgaaattcagcgctcaatgccctgcagttttaaatgataatatcccttaatttttatgtaacatcatttgtgaaaggttggattcttaattctttacttctcactaaatagcatgctgctaaatctgttgatgtatttacatgcttggtagttattagtgtttcacattacagtttcagatgaaaagtggcagtgtcgctgaaagattgctatcgtcctgttgtgaggtgagtttgatgtgcctaacattttttgcttgtttgatttgcagtacgagtgtttactaattgcagtttatcatttctgatgatgtttactattttgcatgtgattgcccacacaaacagttttctgtccccaattgaactgtatggtcatgatggaggggatggggttgttttcagagcctactccttcggatgaaggagaggcaaaatagtgggaatatgatgatcgattttaatttaagggcaactttttgagatatttacatggactaacaattgatatcgtgtaaattgtgcatgatggggtttctagtataatacctcattcttcatcctgggttaaatgagaattatttcttgaaattagttgaaattggacttatttgtatatgtatttgttctctttaattttttttggaggtgtgttattctttgttttcttacccttttctctcttgattttcatagaatactccacaagtttcaatcaaagaggttaaaacaacagatggtgcttgttatttggagttgaagcagccatctagacaatcaaaaactaactggaattttttagagagatatggttttcgctatggcgaccatcatactcgaactcttctgccttgtgaggttggtcttcaacttctctcttcttttggtgtttgaccttggctttcatatgttcatgtttgttgagatttgatgctgagtcattgtgtgctattctctttttcccaattttttcatgatttgatgttttattttgagctttacatttctagcttattattttatttttattatgctgtgacacagtacatgattacgcacctagacatgtatttacttgtattagtatcataaagttcagtatagtagtagtcttttaaagcagtcagtagtgcgtttgagtttggctgattttttgttcatatttcttggtttcaagcatcatcttgttatttttaaagttattaattagtctctgaaataataccaaatgcgtcagttttaaaaaaaatttagttcctgatacaagctgatgtgagagttgatttgttggatgagtctaaattttaccaaatctagaacaattatcttcaggaaagcattaggtttcctgaactgttatttggtcttgatacgaatatctgtttgatattgtgtctttgatgaaataacaacggttcagggttaatttttatttatttgaaaacgctaacaggtggtggaaatactgaagagaattccttcacagacaagacggaaactttctgggaaagggttcttcccacaagagggatatattttgcagtatttgcctgttcccccaaattgtttatctgttccggacgtttcggacggcgttagcgtcatgtcctcggtaagtgtattatgaacaaattaggttgcttatcttggttttcatgttggatcatattagtgttatctctttcgtggttgaccttttttttgtcaggatctttctacatcaatgctgagaaaggttctgaagcaagttgaaattatcaaaagttcaaggtctggtaccccaaattttgaatcgcatgaagtagaagctaacgatttgcaatcagcagttgagcaatatcttcaagttaggggtactgttaaagcatcccgcagcatagatgcacgatacggggttaacaaagatgctagtgattcgtcaacgaaagcatggctagagaaaatgagaacactgtttattagaaagggttcagggttttcttcacgcagtgtgattactggtgatccatacaaaaaggtgaatgagattggcattccatctgaaattgctcagagaattactttcgaggagagggttaacatgcacaacatgagatatttgcaaaatctggtggataacaagttgtgtttgacctacagagatggtggttctacatattcattgagggaggggtcaaaggggcatacatttttgagacctggtcaggtggtacatcggcgaattatggatggagatattgttttcataaataggccaccgactacacataagcattcattgcaggcactttctgtatatgtacatgatgatcatacagtgaagataaatcccctaatttgtgggccattaagtgctgattttgatggagattgtattcacttgttctatccgcagtctttatcagcaaaagcagaggtttatgagcttttttcagtggagaagcagttgcttagctcccatagtggcaacctaaatttgcagttggccactgattcattgttgtcactcagagttatgcttaagacatttttgtttaaaaaggcagatgctcaacaattgtctatgtttctctcttcagctttgccagaacctgcttttttaaagtgtaatcatgttgctccatgttggacagccttccaaattctgcagaccgcttttcctgcatgcctagattgctccagtgatagatacttaattggaaaaagtgatatattgaaagttgatttcaataaggaccttatgcagtctgtcatcaatgaagttgtggcatctattttctatgagaagggtccaaaagaggttcttaacttctttgattctttacaacctttattgatggagaatatctttgcagagggcttcactgtttgtctagaagatttttctgtctctagggaagttatagaaaatattcagaaggatattcaggttatttctcccttgctttatcagttaaggtcaacttataatgaattagttgagttgcaaatggagaatcacattcgagtagccaaagagccaatagctgatttcatactaaaaacatcctctttgggtaatttaattgactctaggagtgattctgctgtcaataaggttgttcagcagattggattcttgggaatgcaactttctgataaaggaaaattctactcgaagactttggttgaagatgtggctcaccaatttcaaagcatatatccttcagatgcaatcgattatccttctgctgagtttggactgattaaaagttgctttttccgtgggcttgatccgtatgagggcattgttcattcaatatctacaagagaagtaatggttcgctccactagaggattgtctgaacctgggaccttgtttaagaatttgatggccatccttcgtgatgttgttatttgttatgatggcacagttagaaatgtcagtagcaattcaataatacaatttcaatatgggctaagtgctagaactagacctcaattccccgctggtgaacctgtgggtgtcttagctgctactgcaatgtcaaatccggcatataaagcagtgcttgattcatctcctagtagcaattcttcttgggaactgatgaaggtaatccactatggattgtgtagaatgaaatgattaggtagtaatgctgaagcatgtctgttttgtatatcacttaccattactttgtgattttcttattttcaggaaatattgctttgcaaagtaagtttcaaaaatgacccaattgaccgccgtgtaattctgtatttgaaagattgtgattgtgggagaaagtattgccaagaaaatgcagcatatcttgttaagaatcatttgagaagagtcaaactcaaagatattgcagtagatttcatcattgagtatgttcaatctcataatcactctgctttctggggttccattcccccccccatattttgtttgttgaaaaggggatatgtatatgattactgatgagcttgagtaataatgcagtagtataaggcctaactgtagcgcattgcttacagataccagcagcagcaaattgtatcagaaatagaggcaggccttgttgggcatatccttctcaataaggttactgtacttagcctaacattattgtttcttttgggatatatttaagactttaaattgcatccatgttgcttcttttaatatatctcattttagaggtggtgaaaaacacaggatctattgaaggagttgagtgttagtgtgcaagagattcatatgaagtgccaagaaactattaactcctttcgtaagaagaaaaaaactgctgaaacttttaagaggacagatttgtttgtcaggttagttttcttcaatggaatttgttatggcggactaaatgtgttttctttattctactgtctgttaatagttactgccagaagtttgctaaaatttattgtagttccactgatttgaaaaacaaatatatattggtgcgactcttagcattatgttctttagctgatgtctaggcagtatataacttatcagtaataacattggtatgtgaaatagataccaaattcttctgctttactgtacgcatttcaaaatatgactaagtgccaactatcaacaatccaaattcttctgattacttatctcatgccaaaatcggactaagcaccaactattggcaatcagctattagttaaagtgttcttacaaaatattccaattttaccacttgtgctttttctctgtgttctgggctcctaaaattgcttatgcttttaattacgggttaatttaaaaacctcttaaaaattgggccttagctcaatcagtaatggtgggtgtgagacatggatagaagtcctaggtttgagctgtagtgctcttccttttaacaaaaacataaaaagaagcctcatacttcatctttcagctggccaatctagaagtagtagagtttgatattctccctttattgaccaactgtgctagaaccctaacagtgtgtgatctgtttctgttataacatttatctggttgcaatgggacaaagtactggtaaaactcttgcatgataagaatcactgctgatgttgaccttttctctggaaggaacctgataggtcactaggctgccaccaaaaaagaacttgggaggctgtttgacgttcggtttagcttgcattgtctgcttttatctatttcattttatctgatttctacttattgtgactttctctttggttgcatgtcttatcattgagaatctctattatttcttgatccactgcactgttctgtcgctatgtacataaattttcctctctttgaactttttggcagtgaaagttgttccatccagcaatcctgtgtggacaaatggcttgacatgccatgcttgatgttcttttttcgaaatacaaatgatgataatctagatagtgctatacaaatcctggctgacatcatctaccctgttcttctacaaacagtgatcaagggtattgccctatactttgtgatttttggtttctcttttgatgaaatgttcagcaatatgtacgaatcttacatattgctcaacagataagggtgacagtgtgattagctttctttttaaaaatttttaatatgtaattattatgttaacaagttaaggtcgccaagctgtagatatagtctcttccaatctctggtcatactttttgaatattttaatttctttgagttaagcatatagtagcagtgtataaggtccagaaaaggctaggcaacaaaactcatatagatatccacacaattattgttagttgtatcattaattttcaactttgtacaactctcaagttgttttcttttccaaaccttatgatacttggccttgaatactttctctgtctcaattatatttagcttgtaatctgagaaactggttatgatggttgctttccgacaatgtttgcattttgatatttactgttttggtatctttaatggacaggtgaccctcgtatctgttcagcaaaaattatctgggttaaccctgatgcaacaacttggataagaaatccaagtaagactcagaagggtgaattggctttggaagttgttttggagaaatctgctgtgaagcagaacggtgatgcctggaggactgtcatcgattgttgtcttccagtgctaaatataattgacacccataggtctataccttatgccataaagcaagttgagcaactgctcggaatttcttgtgcttttgaacaagcagtgcaggtatatttcaaccagacatcaagtgtagagtagggtttgatggttgtttagacgtgcatacttttcatttttggcttgcattttttgcacacgtggcatctactataacataacttactttttcttactgttaatggatgaatatagtagctcatatatacttttatcctaacaaataatcttaaagcttcattgtttcattctctgtcactgaaaatgctcactttttgtgacatttacagcgtctctccacttctgtgtcaatggtgacaagaggtgttctaaaggaacacctcatgctcttagctaacagcatgacatgttgtggaaatttaatcggcttcaactctggtggttataaaacactatctcgctcattgaatattcaagtgccatttaccgaagcaacactgtttgtaagtattttgttattctttctaagttgagaaattacaagaagtcccttcttggataaaccattgttcctttgaatcaattagctcttttatggttgcacagacaccaagaaagtgttttgaaagggctgctgagaaatgctatgatgattccttgtcgagcatagttgcatcctgttcttggggtaaacgtgtggctgttggaacaggatcacggtttgacctcctgtggaatcaggaggtatgtcatatttggagttacgctttttaatgatattcctaactcttatcctcgattgttgcttgaacttggtatttttggtggaatttggtgtcaacacgacttgtcacgaacatgggtatgggacctgtgatggttttagctggagatatctgaatccaccaaattagaccaagttgctaccctaaccagaattagtttcttcagttccataccctttcaggttttaattgctatagatcttcatgccacacaataagctgacaatttagactcagttacagtaacaagatatgaagcttgatgatctgatgtcatctttgtttgcttggttcctctctcttcctccatcttgggttattactgccaacgcccttgcccttttcatctgtcccatttaggttcatttactaagatcttaatatttttacttgaccaaaaaaacgggtcttaatattttattttggttaaagaatccatagagctttttcctcattttgaaccctctataactgtattggcatgtgttctatttcatgtagttggcatgtcagacaatgcatacctgcagttgacacctgcaattgagttcgagcaacaaacttcttattggctttcattgatttctagtgtagcattttctcattatcttttttctttcccagtctggatctgatcaaatgagtggaatggatgtctacaactttctgcacatggttagtggtgctggtggaagcaattctaatactgcttgcctgggagaagaagttgatgatttaatggatgagtggtgcttgtctccagaccatagcactggtttagataagccggtgtttgaggacgcagctgaatttgagaataatttagacggtcagtcagctagtgcaaattgggaaaaagatgtgtctttggacaaggtgtcagatgttggttgggatgcatctggatggaataaaaatgctgaggatgttgacaaatttgctgcagctgcgaccagttcggagaagcaaaatgagtggtctggttggggtgcgagcaaatctaactcacaagatgttggttgggatgctttgtctggatggaataaaaatgcagaggatggtgacaaatttgcagctgctgcaaccagttcgaagaagcaaaatgagtgttctgattggggggcgagcaaatctaaatcacaagatgttgtctctccaaaagtggatgttggttgggatgccttgtctgcatggcataaaaatgcagaggatggtgacaattttgcagcagctgcatccagttcaaagaagcaaagcgagtggtctgattgggggatgagcaaatctaaatcacaagatgtctctccaaaaacggatggaacttgtatgaaagagcaaactgaattgtctggttgggagatgaaaaagtttgatacacgagatgtccttcctgtggaagagagagcctccaagcccaatggttgggattctggtgctagttggggaataatgagcaaagaatctgaagaacttgatgctagtgctgcagctccatggtctggttgggggacaaaagattcctcccctaaaaaatctttggacaaaacttccaaatctagtagctgggatactgtttcttcttggggaaggaagactgctgcagttcatgaatctggcttcattggaaacgataaccagccgggccaagggagaattgaaaatgaatgggataataaagcaagtcaagtaaagccggtgcagtcagcatctggttggaataacaaagtgacagaggaaatggtagttcaatcgacatctagttgggatgaaaaagcttcttgggaaaagccagttcagtcaatgtctggttgggtttcctcatctgctgcaggctcagatgagtcacctacaaaaggctgtagtaagaatagtaattgggaccaacaaaaggcacagacaatgaataatgcttgggaccaacaaaagtcacctgcaacaaatagttcttgggatcggcaaaaatcatctacggcaaataattcttgggatcaacaaaagccaccagcaaatagttcttgggaccaagaaaagtcacctacaattaataattcatgggaccagcaaaagtcacccgaatgttcacagggttggggcacccttaatgacttaaaccaacctgcaagttctagtggctgggatatgccacagggtgaggataacactcaaagtgaaaaacagcatcagtggggacagagtaagggctcacgtcgttgggcttcagatgctaataagaagagtcgtcctttgaagccagctcgaatgatgaatgatgattccagtatggctgcaatgtacactgttacaagacaaagactagacatgtttacttctgaggagaaagatattctcttggatgttgagccactcatgcagtcaatcagaaaaataatgcaccagactgggtaaatttttagacttttgctcttgaaattttatgacaatgtttttagttacatcagaaagtagaaagtaatttctttatgttgttaattgacatggatctgcatgagttaggaaattctgggaaattagatgcccttacatttgatgatctatttgtatggcattatatgtttttaatcacctttcaagtgggaaacaatttgggttttgcatgaacaatctttgctatcatagttcatgtcaaaattttcatgattcttttaagcattagggttcgctcaagttttattagatacatatgtaacaaagcagacacttccaaggacctagcctacatttattctcggagtctaattattgtactgcttaatctttttttctacttttccattccccaaccctgcaatcaatagtttctgctcatgttttcatcttatgcgagttttaatagaaaattcatatttgaaggtacaacgatggggatccactgtctgccgatgatcagacgtttgtacttgataatgttttagctcatcatccagacaaagctgtaaaaatgggtgctggtattgattatgtcatggtatggcttctctatccaatttttttcccactttgcctttgtttgaatgatgttcctatcatttgtgatacatggaagaattttaggccatggcttggcatctgtgatttgtgagcttttaataagtggacaaaggcatccatgtaaacacattctcttaatggttggagttctccattagttacacgagtcactcactattcatctctcatattggctcgtactttgcatgtgtttacatgttactaccaagttccaatttcaccaatgataagatgtttgccttgttctgaggtgtcggctctgacatttcatctctttgtagtttaagttctttgtttagtgatagcataaaattctcaggccttttaaagtactctggaagtattagacgaaggtgccttcagcttagggtgatgttttcttgttctttattcacttaaagaaccaaattcccttgatacagcttgtgttgttttggactgtgcattatgtctgcatgttaactcttactgatattcagtacacttctgtgacatctagatcctatgctgtctggtcacgtaaattcgtcccatgcttcctggcccttgccttagattggttttgttaagcattgaacctaaaaccgattggtaataggtggagaggcacaatttgaatgtaaaagcacaagaaatccgagacttaatagatgtcagaaaacacacttaacatgcttaaaatttcttgtatgttagatattttataagacttggggaaaacatgattgcatatagtcatcagcataggatgaagtgatctttttatttttttggtcagtttaacagttccaatttcagtctatataagaccggttctgaatttgattttggaatgagttacctatgattttggaatgagttacctatgaatgatggtgtgcaattttatagtgatattaatatatttttgggcacatagtatttatggattttaattatatattctttcagagaagaaaagaaaggattaatcaattatttgttgtgcatcaccatttgatgcaaaacaggtaaacaagcacagccttttcctggataccaggtgcctctatgttgtcacaaccgatggtcataagcaagatttctcttatctcaagtgtctggagaacatgatcaaggggaaatatcctgatttggctgaagcttttgttgcaaaatatttccgaaaatctcgagggaaccgtgagcgaggtgttgctccagagaattctcaagggaaccgcgaccaaagtgttactcaagatgataactctcaagggaaccgtgaccgaagtgaccgaagtgttgctcaggacgataatgagggggaggttaagcagtaggcatctgtctctccaagtgttaatatcattcagagaggtctagttaggtattttgttcattcctgatatgaatcttttgatatgtacatgtaaagcagatgttagtgtgtttatccccctcaaaaattatactttcatagatcccaatatgaactgccctcttttagatggcacacattagcagttacatgtattctggttaaagtggtttttacttatgttgcttcatactctcttcttttttaccaaaggaggcaaatgccttaaaaactagtgaaatcaaattacacagtcccgagcatagttaaaatggggcctaacaaacatatgcgg

SEQ ID NO: 507 - DNA, 7563 bp, Gossypium raimondii
  source 1..7563: mol_type = genomic DNA
taatcttaattcctctcctctttcaaataatgtggcccaatttaaagggataaagttttagttttaagagaagttaaattttatctattcacctggttatttaatgtacgtactagattaaaagttgatcatcataaattaattctctctccacaaaaaaaattatggctgccatcacttaaggtttgtgtggttaaggaaaaaggattaagaagggaaatcaaatttatatggtattcttcttcgtgttcttcgtcaaatctagtggccaacttcaatttcacataagctatgtcttaagtttgtaaaaatcatattattctaaacatctaaaataattgtttatacaatattaaagatttataatttgcatcataactatatctaaatctaaagatatcatatcaaaatcttattaaaaaagtggtatttattgcctaattggaaaaaccgaaatattttgcaagtgcaatggttgttgtggcataatgataaacaaaatttaaccttaaaagcaagatttttagaacgaatggtcgaaatgatttagagtatcgattttgcagtcaattaaattaattattaaaaaataaaagaaaattgattgaattattttattaacttgattcaattggtttgtgggttaattggtttaaccatttatttcgaacaaatatcttattctatccagtccaattctaaaaacaatgcttgaaagtgcttagacattgtgatgttaagtcttttaaaattattttttatttttacaaacaaacttaaatttaaaaattaattactacaacgtaattagacctagtcatgagtcgggctacttggctcagctcgaagactcgcccaaaaagtgggagggtttaggcaaaaatataggtctgaaaaatgggtttggacaaaaaaatgagacctattttctaaaagggataggccttgggtaagctttttttggcccgggccagttcaacctgaatttgcaaaaaattatgcctattatattgctaagcatttattttaatatttgtagtgtatttgatgtattatattttttaaacttgtttttatataaaattaaaaatataaaaaaattaatatgaacagactgagctgagctcgagttttagcatttttatcctaattaagcttgaacaaaattttaaatctatttttcaagctggacctaaaaaataaacctaaaattctattcaaacctgattaatcctaacctataattaactctaaacataaccgaacaaactcaaatttacaaaattttacttcaatttatataaaaaatgatttttaaattcattatcactcaaatcaaagcctaaaggacccatgcgtcttttactacacccgtcaaacagtacagaatcacttttttatggtaacaaatttcctagttttacaataacacccctgagtctcaccaaaatagaacaaaaagagagaagtcaaggctatttacgtcatttcagttcgtctccaaaacaaacccacatgtcaattttcattgctgtttgttcttcgtctgatcgtctccgcccaattttttttttttttaaaaactcccccctaaaactcaagacttcactcctttgagactgaaacactgggaaaacccactgaaatttgatgcacattgctttacagaggctgtaaaacccttagaaatcactgaattttcacatctaagcaccgagaagattagggtttagggggggttttgttcttaatttctccttcctctccacaaactttcaatgtaagtctttctcagttcatccattgcttgtgtacgtgttgctaatgtatatatatatctatactattccactgtttatcttcgctgttctaatctttctttttgttgaagccttataaagtctgttttcctgttttctttgtgatttttttttgggggggattgtttatgtttgtgtaaaccttatttttacggggttttactttacttttctttttttattcttgttttagattttggtgcaatgggggcttcgccagatggaaagggaaacgggggaatgggcagtactagtggtgaaaagtttgcaaatggaactgatttgaatatggatatagatgaagatgatgatgtgtttgatgagctggtcagtgtgcaagagctgggagaagagtttttgaggaatttctgtaggaaagctgccgtgtctttcttcaatcagtatggtctagtaagtcatcaaataaactcttacaatgatttcataaaatacggtctccagaacaccttcgactcctttggggagtttgttattcattctggttatgatccatcgaagaagggagaaggtgactggcgtcatgccagagtgaagtttgggaaagtcaccgttgagaggccaaccttttgggctgtcacaggtggcaatgagctcaacatgcttcctaggcatgcccgccttcagaacatgacttactcatccaggatgaaggttactgttgagcttcaggtgagtagatatcaccaacagtttaaacttctagtgatttcaatgtcacgtgttcttgttgatgtttgacgtgttagcttttctggtaattttaataatctggaatctaaatgtgctgtgtcttagtatcttcattgcttaactgatggttttggctaaaaataagttccttaaagtatgatatttttgtgccctggtaatgtatcaggtatatacagcaaaaagtgtaaagagtgacaagtttaaaactggaagagaagaaattgttgaagaggagatcgtgcatcaagataacagggagattataattggaaggatccctgtgatggttaagtctgagctgtgctggatgaatgaggttgaaaagtctgattgtgattttgatcacggaggttattttctcatcaagggcgcagagaaggtcagtctggcatttttttattctgttagttgacttgttattcagtgcccatacaccattattgctgaacagacttgaatttgctaaccataattaataattttttgccatatttaattgtagatattcattgcacaagagcaaatctctctgaagaggctctggatttcaaacatacagggctggactgttgcctacaggtcggaggtgaagagaaataggctaattatcagactagtggagaattccaaagtagaatatatcaaagggggggagaaaatcctgactgttttcttcttgtcgattgagatccccgtttggattttattttttgcccttggtgtacgatcagacaaggaagttgtaagtctgattgattatggaagcagtgattcaagtatatcaaacatactgttcgcgtcgattcgtgatgctgattggaaatgccgcaattttcgtgaagaaagtgctgctctcaaccatttggataggttacgcaaagaaactagatttccccccgaagaaagtgttgaagagtgccttggaaagtatctgtttccctctctcaaaggattcaagcagaaggctcggttcttggggtacatggtcaagagtcttttgcaagcattcaccggtcatcgaaaatgtgacaatagagatgattttaggaacaagaggttggagttggccggtgagctgcttgagcgtgagatgaaagttcatattgcccatgcaaggagacgtatggcaaagactctgcagagggatctttatgcggatcgtactgttcgtccaattgagcattatcttgatgcttccatagttacaaatgggctctctagagcattttctactggagcttggtctcatccttacaaaaagatggaaaggatatcaggtgtagtggcaaatctcggacgagcaaatccattgcagacaatggttgatttgagaaaaacacgacagcaggttcagtacactggaaaggtcggagatgcgagatacccgtaagttttgtcagactcgtatcttgtaaattgtaacccattgctgcaaaagatgcaatatttgtttcacttcatagcaatctatttttacattcagaactttgtgatatcaacaatatgagtttcatatcttttgttggtttggtatctttgatagtttgattatgcaattgcatggacatgaatctttgcaaactgtgtatctcttatactttatctgaaagtcatttttttcacttcagaacagttggattagaagttagttaaatgtttcaatgattctatctttagttttttgctttcctgtggtaattttcctctagaatctgttattagtagtgtttgtattttagggtttgaaatatggagttgatttatctttagagcatttgggtctgttgagatgtttgtcagcaataatgttgagatgtttgtcagctctgatataattttctaatgcagacatccttctcattggggaaaagtttgctttctctctactcctgatggtgaaaattgtgggcttgttaagaatctggctaccactgctcttgtgagtacgaacatagtgaaatccgtagtggaatccatagtcgacacgttgtttgattctggaatggagaaagtggttaatgatacttcaagctcacttgatgggaaagataaggtctttctgaatggggaatgggttggtgtttgtgaagattctcttttctttgccgctgaacttagaagaaaacgacgcaggaaagaattgccgtatcaggtgatcgccatcccatttcatagaccttatagcttttgaatttctccacttcgaaatttttatatgcatacctgcttgttcactgatcaacgtaatgggcttgaaccatgaaacaaaaattgtgtctgttaaggttgtatgtgtcaggagggctttggacaattttaatcagctgtactcgaaaactcagcttttcttgatgttttcatctttttcttattagtagttggcatgtttgtgaacttcagcaattagaaatgagaagtgaagccctaggctgagaatcttttccttttactaaaatggaagagagtaaaattgcttagaagtcccccagcatcgattcttgtacaatatagttttgtgaaatttaaattgcttttattctgttgttcattattattggtctcctcatcttttctctaaatgattttcatcttgtaggtggaaattaaaagagatgagcataaaggagaggtgcggatctttactgatgctgggaggattctacgcccgcttttagttgttgaaaatctgttcaaactaaaagcattcaagggcaaggaaaattatgctttccagccccttttagacaaggggattgttgaactcattggagctgaagaggaagaagattgtcgcacggcatggggtatcaggtacctcttaaccgaagttgaggggaagcaacctgtcaagtacacgcattgtgagctggacatgtcatttcttttgggtttaagctgtggaatcattccatttgccaatcatgatcatgcgcggagggttctttaccaagcccagaagcattctcagcaggcaattgggttctctacaacgaacccaaacatcagggtggacactttgtcgcaccagatgtattatccccaaaggccactcttccatacgatgactgctgattgtcttggtaaatctggatttcctcttggtcagaatagattggaaccgaagccagaactctacaatggccagaatgctattgtggctgtaaatgttcatctcggttacaaccaagaggattccttggtaatgaaccgggcctcgatagagcgtgggatgttccgcaccgaacatgtaagaagttacaaagctgaagtagataacaaggaaatccaggagaagaggcggaaggctgaagatattgtaaactttggaaaaacagaaagtaagattggacgggtggacagccttgatgatgatggttttccttatatcggtgcttccctgcagtctggtgacattgtcattgggaggtttgcggaatctggagctgatcatggtgtaaaactgaagcacaccgaaagaggcatggttcagaaagttgtgttatcttcaaatgatgatgggaaaaattttgctgtggtgtctctgagacaggtagcgttagcatgttttgttctgcaaaatagcgtctactgcttttaagtaatgttcatcagttgtctttctgatatatttttcaggttcgttctccctgtcttggagacaagttctcaagcatgcatgggcaaaagggggtccttggttttctggagtctcatgagaactttcctttcacaactcaaggaatagttcctgatatcgtgattaacccacatgcatttccttcacgacaaacgccaggtcaactcttggaggctgccttgggaaaggggatcgcctgtggtgggtcgaagaaacatgccacccctttctccactctctccatagatgccattacagaacagcttcacaggtaatgaattgccctggaacaagttgacctgcgtgcttactgtgcattcatcatggattttttcattatagagatcttaggtgggccgtttcagagttgttttggtgtatcaatgcctttaacgaatactattggattttcacgctttgttgctttgttgatctgcatgcttactgtcctggaacgattagcgagcatacatgctggttttcagactttgatcacacataagctatagctttgttttttgtgtctctaggctatttgatatgttcttgaagcttgactcactgtttgtagtgattatatatttaagttgtccatttcgttgtctaataccattattgggttttcttatagttactgttatttacaatgatggctactttgtctaatatctcccacagggctgggttttcaagatggggaaatgagagagtttacaatggtcggactggtgagatggttcggtcactcatatttatgggtccaacattctatcagcgtcttgtccacatggctgaagacaaagtgaaatttcgtaacactggacctgtgcacccacttacaaggcagccagttgcagaccggaaacgttatggcgggatcaaatttggtgagatggagcgggactgccttattgctcatggtgcatcagccaacttgcatgagcgcctcttcacgcttagcgattgctcacagatgcatgtatgtcagaattgcaaaaatgctgcaaatgttattgaacggaccgtagcagctggtcggaagattaggggaccctattgccgggtttgccagtcaggggatgagattgtgaaggttagtgtgccgtatggtgccaagttactgtgccaggaactattcagcatggggattagtctgaaatttgagacacagctttgttgagttagctgctaaactctttatcaactgttataacttctaatcgcaaatacttgggttcttttggttgaatgatgatgtaaatattagcaatcgaagttattgcagaatttaacttgtcaattgccttgcctttaatacttattatgcctctttaacacaatcccttggtctgattttaaaaatcaatttaattt

SEQ ID NO: 508 - DNA, 6601 bp, Gossypium raimondii
  source 1..6601: mol_type = genomic DNA
gttatttaatgtacgtactagattaaaagttgatcatcataaattaattctctctccacaaaaaaaattatggctgccatcacttaaggtttgtgtggttaaggaaaaaggattaagaagggaaatcaaatttatatggtattcttcttcgtgttcttcgtcaaatctagtggccaacttcaatttcacataagctatgtcttaagtttgtaaaaatcatattattctaaacatctaaaataattgtttatacaatattaaagatttataatttgcatcataactatatctaaatctaaagatatcatatcaaaatcttattaaaaaagtggtatttattgcctaattggaaaaaccgaaatattttgcaagtgcaatggttgttgtggcataatgataaacaaaatttaaccttaaaagcaagatttttagaacgaatggtcgaaatgatttagagtatcgattttgcagtcaattaaattaattattaaaaaataaaagaaaattgattgaattattttattaacttgattcaattggtttgtgggttaattggtttaaccatttatttcgaacaaatatcttattctatccagtccaattctaaaaacaatgcttgaaagtgcttagacattgtgatgttaagtcttttaaaattattttttatttttacaaacaaacttaaatttaaaaattaattactacaacgtaattagacctagtcatgagtcgggctacttggctcagctcgaagactcgcccaaaaagtgggagggtttaggcaaaaatataggtctgaaaaatgggtttggacaaaaaaatgagacctattttctaaaagggataggccttgggtaagctttttttggcccgggccagttcaacctgaatttgcaaaaaattatgcctattatattgctaagcatttattttaatatttgtagtgtatttgatgtattatattttttaaacttgtttttatataaaattaaaaatataaaaaaattaatatgaacagactgagctgagctcgagttttagcatttttatcctaattaagcttgaacaaaattttaaatctatttttcaagctggacctaaaaaataaacctaaaattctattcaaacctgattaatcctaacctataattaactctaaacataaccgaacaaactcaaatttacaaaattttacttcaatttatataaaaaatgatttttaaattcattatcactcaaatcaaagcctaaaggacccatgcgtcttttactacacccgtcaaacagtacagaatcacttttttatggtaacaaatttcctagttttacaataacacccctgagtctcaccaaaatagaacaaaaagagagaagtcaaggctatttacgtcatttcagttcgtctccaaaacaaacccacatgtcaattttcattgctgtttgttcttcgtctgatcgtctccgcccaattttttttttttttaaaaactcccccctaaaactcaagacttcactcctttgagactgaaacactgggaaaacccactgaaatttgatgcacattgctttacagaggctgtaaaacccttagaaatcactgaattttcacatctaagcaccgagaagattagggtttagggggggttttgttcttaatttctccttcctctccacaaactttcaatgtaagtctttctcagttcatccattgcttgtgtacgtgttgctaatgtatatatatatctatactattccactgtttatcttcgctgttctaatctttctttttgttgaagccttataaagtctgttttcctgttttctttgtgatttttttttgggggggattgtttatgtttgtgtaaaccttatttttacggggttttactttacttttctttttttattcttgttttagattttggtgcaatgggggcttcgccagatggaaagggaaacgggggaatgggcagtactagtggtgaaaagtttgcaaatggaactgatttgaatatggatatagatgaagatgatgatgtgtttgatgagctggtcagtgtgcaagagctgggagaagagtttttgaggaatttctgtaggaaagctgccgtgtctttcttcaatcagtatggtctagtaagtcatcaaataaactcttacaatgatttcataaaatacggtctccagaacaccttcgactcctttggggagtttgttattcattctggttatgatccatcgaagaagggagaaggtgactggcgtcatgccagagtgaagtttgggaaagtcaccgttgagaggccaaccttttgggctgtcacaggtggcaatgagctcaacatgcttcctaggcatgcccgccttcagaacatgacttactcatccaggatgaaggttactgttgagcttcaggtgagtagatatcaccaacagtttaaacttctagtgatttcaatgtcacgtgttcttgttgatgtttgacgtgttagcttttctggtaattttaataatctggaatctaaatgtgctgtgtcttagtatcttcattgcttaactgatggttttggctaaaaataagttccttaaagtatgatatttttgtgccctggtaatgtatcaggtatatacagcaaaaagtgtaaagagtgacaagtttaaaactggaagagaagaaattgttgaagaggagatcgtgcatcaagataacagggagattataattggaaggatccctgtgatggttaagtctgagctgtgctggatgaatgaggttgaaaagtctgattgtgattttgatcacggaggttattttctcatcaagggcgcagagaaggtcagtctggcatttttttattctgttagttgacttgttattcagtgcccatacaccattattgctgaacagacttgaatttgctaaccataattaataattttttgccatatttaattgtagatattcattgcacaagagcaaatctctctgaagaggctctggatttcaaacatacagggctggactgttgcctacaggtcggaggtgaagagaaataggctaattatcagactagtggagaattccaaagtagaatatatcaaagggggggagaaaatcctgactgttttcttcttgtcgattgagatccccgtttggattttattttttgcccttggtgtacgatcagacaaggaagttgtaagtctgattgattatggaagcagtgattcaagtatatcaaacatactgttcgcgtcgattcgtgatgctgattggaaatgccgcaattttcgtgaagaaagtgctgctctcaaccatttggataggttacgcaaagaaactagatttccccccgaagaaagtgttgaagagtgccttggaaagtatctgtttccctctctcaaaggattcaagcagaaggctcggttcttggggtacatggtcaagagtcttttgcaagcattcaccggtcatcgaaaatgtgacaatagagatgattttaggaacaagaggttggagttggccggtgagctgcttgagcgtgagatgaaagttcatattgcccatgcaaggagacgtatggcaaagactctgcagagggatctttatgcggatcgtactgttcgtccaattgagcattatcttgatgcttccatagttacaaatgggctctctagagcattttctactggagcttggtctcatccttacaaaaagatggaaaggatatcaggtgtagtggcaaatctcggacgagcaaatccattgcagacaatggttgatttgagaaaaacacgacagcaggttcagtacactggaaaggtcggagatgcgagatacccgtaagttttgtcagactcgtatcttgtaaattgtaacccattgctgcaaaagatgcaatatttgtttcacttcatagcaatctatttttacattcagaactttgtgatatcaacaatatgagtttcatatcttttgttggtttggtatctttgatagtttgattatgcaattgcatggacatgaatctttgcaaactgtgtatctcttatactttatctgaaagtcatttttttcacttcagaacagttggattagaagttagttaaatgtttcaatgattctatctttagttttttgctttcctgtggtaattttcctctagaatctgttattagtagtgtttgtattttagggtttgaaatatggagttgatttatctttagagcatttgggtctgttgagatgtttgtcagcaataatgttgagatgtttgtcagctctgatataattttctaatgcagacatccttctcattggggaaaagtttgctttctctctactcctgatggtgaaaattgtgggcttgttaagaatctggctaccactgctcttgtgagtacgaacatagtgaaatccgtagtggaatccatagtcgacacgttgtttgattctggaatggagaaagtggttaatgatacttcaagctcacttgatgggaaagataaggtctttctgaatggggaatgggttggtgtttgtgaagattctcttttctttgccgctgaacttagaagaaaacgacgcaggaaagaattgccgtatcaggtgatcgccatcccatttcatagaccttatagcttttgaatttctccacttcgaaatttttatatgcatacctgcttgttcactgatcaacgtaatgggcttgaaccatgaaacaaaaattgtgtctgttaaggttgtatgtgtcaggagggctttggacaattttaatcagctgtactcgaaaactcagcttttcttgatgttttcatctttttcttattagtagttggcatgtttgtgaacttcagcaattagaaatgagaagtgaagccctaggctgagaatcttttccttttactaaaatggaagagagtaaaattgcttagaagtcccccagcatcgattcttgtacaatatagttttgtgaaatttaaattgcttttattctgttgttcattattattggtctcctcatcttttctctaaatgattttcatcttgtaggtggaaattaaaagagatgagcataaaggagaggtgcggatctttactgatgctgggaggattctacgcccgcttttagttgttgaaaatctgttcaaactaaaagcattcaagggcaaggaaaattatgctttccagccccttttagacaaggggattgttgaactcattggagctgaagaggaagaagattgtcgcacggcatggggtatcaggtacctcttaaccgaagttgaggggaagcaacctgtcaagtacacgcattgtgagctggacatgtcatttcttttgggtttaagctgtggaatcattccatttgccaatcatgatcatgcgcggagggttctttaccaagcccagaagcattctcagcaggcaattgggttctctacaacgaacccaaacatcagggtggacactttgtcgcaccagatgtattatccccaaaggccactcttccatacgatgactgctgattgtcttggtaaatctggatttcctcttggtcagaatagattggaaccgaagccagaactctacaatggccagaatgctattgtggctgtaaatgttcatctcggttacaaccaagaggattccttggtaatgaaccgggcctcgatagagcgtgggatgttccgcaccgaacatgtaagaagttacaaagctgaagtagataacaaggaaatccaggagaagaggcggaaggctgaagatattgtaaactttggaaaaacagaaagtaagattggacgggtggacagccttgatgatgatggttttccttatatcggtgcttccctgcagtctggtgacattgtcattgggaggtttgcggaatctggagctgatcatggtgtaaaactgaagcacaccgaaagaggcatggttcagaaagttgtgttatcttcaaatgatgatgggaaaaattttgctgtggtgtctctgagacaggtagcgttagcatgttttgttctgcaaaatagcgtctactgcttttaagtaatgttcatcagttgtctttctgatatatttttcaggttcgttctccctgtcttggagacaagttctcaagcatgcatgggcaaaagggggtccttggttttctggagtctcatgagaactttcctttcacaactcaaggaatagttcctgatatcgtgattaacccacatgcatttccttcacgacaaacgccaggtcaactcttggaggctgccttgggaaaggggatcgcctgtggtgggtcgaagaaacatgccacccctttctccactctctccatagatgccattacagaacagcttcacaggtaatgaattgccctggaacaagttgacctgcgtgcttactgtgcattcatcatggattttttcattatagagatcttaggtgggccgtttcagagttgttttggtgtatcaatgcctttaacgaatactattggattttcacgctttgttgctttgttgatctgcatgcttactgtcctggaacgattagcgagcatacatgctggttttcagactttgatcacacataagctat

SEQ ID NO: 509 - DNA, 6077 bp, Gossypium raimondii
  source 1..6077: mol_type = genomic DNA
tataataaatcctagttttatctttatatcatactttaatttttaacttttatgattttacttctataagaaaaacttataatctacttttaatctcttaaaaaaatataacttcacccttaaatattatattaaaatcgaatatcaaatgatatattaaacataatacattttctatggataaaagtgatgacttatatatcttagaaaaactattttacataaacaatagaatcagtctatggaatggaggttttataaaatgttatatttaatgaacttatttcaccaatatatgcacttacatgttactccaaagtaagtcaatatgtttaggcttagcatataacaatcttttaatatatataatttatttatgtgaaggttgattttctgtgattttacgtattaaattttgatttgattcaatttttataaattattaatataattattgatgtaacatcattttatgtttatatattgtatataaaaataattatatttatccaatctaaaaataaattgatgtatttatttatttaaatgtgtataattgaatcaaaattaaagtttcacgtataaatttgaaccacaatcaaagtttcatatgtataattgcatcaaattaaaattaatgtattaaattacacattaaattaaaatttatgtatcattttaaagttatacccctaaatttttaggatataataaaataagagcaaaaataaaaataaaaaacatttgataacatttttcttgttttaataatttacttttaaaataaaaaactactacattgttagggtaacatatatcattagtcgcctaattattattgtgtttctgttttgatcataaaactataaaaaattccaatttcatcactaacattttaaatagtttatgttttgatcactctccgtgaaatggtttaggaaaatgatagatgtgacctataataatgatagatgtggtcaatctcaattctaaataattcagtaaatttaattatctatatttacaaatgttatcctcaaacgtatataattaaataaatttcccaacatcctgattctataatctctaccatgaaagctagctgcgttaatgtaggcctgaatcaagtccaaaaaggttccatcaacccaacttttgttattttcatttgtaggcatgatgtttggagaattggattttgcgaatcaatcaacttaagcttcacttccactaaatcaaccttatttttagtttcttttcaatccccctccaaaaaaaaaaatttgtttgaagaatgctaagcaacagaaacacaaataactgaacaatctttttgcattttttattactatactagattttaggaatgaacatacaataatatataaatattgagaatcaaatatgttattataccagataaaaataatcacatcatcatctcttaattatatttatatttaagggaaacaattgggtgtagtttttttttttttaatggctaaaggcaactctaattccaaaggataaaaaaccttggcccaagttaaataatcataaaacttcagtgaaagcagaaaaggtgaaaggaaaaaaagggtgtaaaccaccgcgccactagccggcagtagtagactgaaaccgaggcaaaagcaaacactggaaggcaaagcaaaaccttgtgagagaagagaggtgatggatggtacggagatagagagacccacattacggctcaccaacataccccaaaccgccgttgccaaagatctcttagacttcttcgagtccaagctcggccctgattcggtcttcgccattgagatctctaccgaccgcaacaactggaagtctcgtggttttggcagagtgcagttcgctgctccccaagctaagtccgatgcccttcgtctctcccgccacgatcacctccttttcaagtcccattctcttaaactctctcgaacttatgatgacatcatccccagacccatcagggccgatcataggcttgatggtggagtccttcatgcgggttttatgtctagtgatgattgcttgcgtgtcttggagcgctgggagggtgtgagaggttggataatgcccgagagaaggagattggaattttgggtatggaccgatggagagtgttacaagcttgattttctgtttgatgatatttttgagactgttggctgctgcttcgatggctctgcatgcaatgctcttctcttgagggtatgcttttttcatcatcgctgctaaccaattatgtgtttccagtctattacatggttggttatttgcaattttgagcactaatttcatgtttactgtcattcttttaacggggatttgttataaagatttcatagctagagaactgaaacaaccgagcttattcatgttatgtgtactttccagtaagcctatgtttgcagtttattgagcttgttaatatcattttgaacaagaaaattgcatttatagaaatatcattaatgttttcaccatggagttaattgatttcgtaatgccatggaaggactcgtatgcaattattttagatgtaatatactgctggggtacatatgttgaaaactattaattgtgttaattgtgtggaatggtttttggataactattgtttccaggttaggtatgctccaaggatatatcagaaagtatctgggccgaatgtggcttcaaaattcagtacggatcggtatcatatatgcaaggagaagtttgacttcctttgggttcgaacaacagatttttcaaggataaaatcgattgggcaatcgacttcgttttattgggaatttaatgcaggattttcaatctcggatatgtctacatatctcccgtgttatagagaagacatccaatctccatctttagaggccagaagagaattctcatctccatcagaaattgttccgcttgtaaagttcccatcagattccaagttagcatatgagatcctttttcagctcaatgcccttgttcatactcaaaaaattagcattgctgcagtggacactgatctgattggtatcctcagtggtttgcctgtcgaaactgctgtaatgattctgcagaagcttcgcctgctgcagtccccttgctataatcccgtttcatttgtgaaagcaaaattacctacaggaaaaaactaccgaattcctttatctgtttctgaaaggttaaaaaatcacaatgtcatgagctgtcgtagagccctaattacgcctacaaagatttattgcttgggtcccgagcttgaaacagctaattatgtggtaaagaactttgcagaatatgcttcatattttatgagagtcacttttgttgaagaagattggagtaagctttctgcaaatgccatttctactggtgtgcatctgggtgttttttctagacctttcaaaacaaaaatatatgacaggatattgtatgttcttcagaatggaattgttatcggagataagcgattcgagtttctggcattttctgctagtcagcttcgatcgaattctgtctggatgtttgcgtctaatgatgaggttaaagcagaagatattagagaatggatgggatgcttcaagaagatacgtagcatatctaagtgtgcttcaagaatgggtcaattgtttagttcctcgatgccgactcttgttgtccctgtgcaggatgtggagattattgatgatattgaagttaaaactgatggcattaattattgcttctctgatggtatagggaaaatttctctgccttttgctagacaagttgctgagaagtgtggattgaatcacattccatcagcatttcaaataagatatggtggttacaaaggtgtcgttgctgttgaccgtaactccttttggaagatgtctctgcgtgatagcatgctaaagtttgaatctaaagtcaggatgcttaatgtcaccaaatggagtgaatccatgccttgctttttgaatcgagaaattgttactctcttctccaccttgggcatcaaggatgaagtttttgagagaatgcaagaggaacaactgtgtctgcttggcaaaatgctaacaaatagagaagcagctttggataccttacaaagtttaggtggagttaattccaagaacattctggttgaaatgcttcagttttatgagccaaatgtccaaccttacctctcaatgatgcttcaagcacattatgagaatctactgtctgatctaaaaagcaggtgccgtatatttgttccaaagggacggatcttaattggttgtttggacgaaactggtacactgaattatgatcaagtttatctctgcataaaaatgaaaaaagcagaactagaatgtgcagaccaaagttacttccgtaaggtggatgaggaaacagctatagttataggaaaggtggttgtcacaaaaaatccttgccttcaccccggggatgtcagagtccttgaggctgtttatgaaccccaactagaagagaagggtttggtggattgccttgttttcccccagaaaggtgaaaggtattatggttcacagtttaatttaactcttgttttcgtattcttcatggaaaactcaatatactctgctctcctatatgaaatagttgctaccacgtgtttgttcctatcattttctgatcttgaggtcacttataagattgtgtttgtcttactattcctggataacattgtgtctgatgccatttatggcaacaagaggtggttactgttagttatttttggatcttaaatagattggtgtggctaacgcctacaatttgatcttgtaggccgcatccaaatgaatgctcgggtggtgatcttgatggggaccagtttttcattagctgggacaaagatctcatcccatgtcaaactgagccgccaatggactacactggacgaagacctcggataatggatcatgaggtgaccttggaggtagtttgaaactgagctggaatttctgatgtgatgaaacttggaaagatttgtatttagttagatttttttttcatccttatcctttggtgaaatttttgcaggaaattcagaagttttttgttgactacatgatcaacgatactttgggtgccatttctactgcacatctagtgcatgctgatcgtgaaccagacaaagcgtgcagtgaaaactgtctagcattggctactcttcactctatggctgttgattttgccaagacaggcgcaccggctgagatgcctcgtgctctgaaaccaagggagtttccggacttcatgcaaaggggaaacaaacccatgtatacttcctctggtgtactaggaaaactgtaccgtgctacaatcaactccacagtgcaaacaaggtcaaagtttgtttggacaaaagagatggccgagttagtttatgatcatgacctggaagtaaatggctttgagtcgctgatatcagttgcagagacccataaagagatgtatgaagagagaatgagcttattgatgagttattatgatgtagagtatgaggacgagatcctgacaggtaacatatacaacaaagcacagtttttgctgcgagacaaccggagatatggagaaatgaaggaacgaatcgtgttgtctgtcaaggacctacagagagaagctaaagaatggtttaagagtagctgcagcaaggctgatgagcatcaaaaacttgcctcagcatggtattatgtgacttaccacccgaattacttccaggaaaggatgaattccttgagctttccatggattgttggagacattttactgagggttaaatctcggaataagtttttgaatagccgagaaattcagagaaaccgaccgaaattcgataatgtctacattaagtccccaagaaggcatacttcaggtgatgaatcatccatggaatgaccaaatttaataatattctcctgtgaatgtaaactgctgtctcgctaatttgaaatgatttgaaaggatatgggtagggaaaatcaaggtatttaaaatttaagaactacaattttatttttatttttatttaatatataatt

SEQ ID NO: 510 - DNA, 7711 bp, Gossypium raimondii
  source 1..7711: mol_type = genomic DNA
aaaattatttaaaatggcactggggcacttcttgctaagccttccctgttgcatcaaaatggcatctacttcctctttagtaattagatgtcctcgcgatgatattgctgttgcagatgatgcctccttcgacggaagcgaacttgtattcatttaacgatggtggattttgcagcggaagggagcatttgtttctctttcaatttttatgatgaatatctccttcttgaccaacctttgctcttggcttgcttcccaaacagtgcttcagttatttggtgaatcttgggctcgcttttagctttcaagttggtctcttccactaatggtgtttgtaggggatttttttaagtaaagaagaagataaatgaaacaagaaaagaaaagaaaagataaatgttgtattgttatgaaaaagaaatcaaaattacatgttagtattttagtaaattaaatgacgtggattagtgtaaatgtatttgtttttatcgatttaaacattcagattagaaatttttttaaagaaaaatggttaatgggttgaatttggtgtattaagtgtaatattttcgtccatgtacatttgaatttttcgaacaaattgatttaataaaattatccataatttacattaatatcatttgcatattgtacttaatgatttttgaatgcaaaacaaaataatatatcattgatctaacataataaaatgtgagtttgaacctattgaaatacgtttatcctcctatttaagagttgatgagaaataatgcttaatcttaagcactgttgcaagattcctttaatgtgtttaccatatttggagttagtctcatgtttctataagtgttaagttatcaaaattaactctaaaagcacttgtttttttattatataattttacaatattttaatcaatttcaataatgttaagtcagagcaattcaaatgtcacattttccttgataattttattgaaattttatatttcagtattttattcaattttgattttttttacttaaataaaatataagttcagttacaaacactcctttcaacaagcgtttcactttcacacactttttatcacttgattattattaatttttcatattacttaaaaaaatatattttttgagtttccaacaattttagttgatgatgcaatcagatttataaattaatttcaatattatacaagtattaatatataaactgtaataaaaataagaattaagacaaatgatatgaaagaaactaaactggttaaaagatttgataaataagacaatttagtaaagttgttaaaaaagataaagagtctaaaaaatatatatgaaaatatgtttaaaagtatcataaataggagattctctctaaacatcaaaattttacgatggaaaaaagcgcactcaattttaatccaatttagctaatttaaattctactaataaaatatttcttttgtactcaatacaaatgacaataaaaatggcaaaagcgggaaatggaaacaacttctccagcaagtagtaagaaaaaaaaaaaaaaaagggggggagggggaagacctgaactggagactaaagttctttgtctttctcctaaacaacttcttcgtgaagtgcttaagaatcaagacacgataaaagcacacttgtttatatactgggtccatccctctaactctaagctcactccctaaaactcacaaatactttgctttctctttctctcactcctactctgcaaacgcgttcaaagttgcttctcttcttgtgtcaaaccaatacgctttcaggttagcagatttttctgacaacccaattttcttttcaagtttaatttcgtttgttttctaaccttgcaatgaccacattttgtttttgaaggggtttctgtttgaaattaaaatgagaaactggatttgggtatttcgatttttatcacatcatgttaaatttgatgttttatttttcttttttcttttttatttctgtaatttgctaaattgtcgatttgattgtttggctgtatgtgatttagcagaagattaaaaggttgaatttgatcttctgattaatagacacagggttgacaattaaagtgaggcatcatgttgtttgttatggtctctttaaggttatccaagcttttacctaaaacaatgcaagaagatgaatttcatactactagtgataattggaatggattctgttttgcatcaattaggtatatttcgtacggttaaattacgaatcctcgattaggatgtggaatgtaaggataagggcagaaaatgaagtctatatagtatacatgttccatagaataagggtggatcgtttccattttcctttgttattttctactaaagaaaaagaaaaaaaaagggttaaatcactgttctgctattaacgattcttcaatttgttccgagaacatgaagaagttactccataagtttcgattgcatgatacattctgtttccaccattgtcgaagcacaaagctctaacctttgaaactaaagtatgtagtttgtttctcagtccaacttagtgctaatgcattttcaaagataccatggcttgaattaactttttagttccattatttgctcacctattatggggcacttaaatggcttgaattccatgggttggtagcaaattgatgcctgtaatttccccctctggataaaatgcttttgagaggaaatttacctagtattgttgctgagtatgttagtgttaatccacctagtcgctgcggaggttgttgtaaaagaaaattaaggcttattttcaattgactaatataacagaagtctgtgtgctgatttcttaatttgttttctttttctcttatgaatatgttgtgtctagttttgtttcaggaacttattggctttcaacccgaactggttaattttctgaaatatatggagttagaagggagtgtaaaggagactgtggtgacacaagttagtgttggtggatttgaccgacatgtcaaagccagagatctgatgaagtacttggagaatgcagttggcgttgtctggaggtgtagactgaagacctcatggacaccaccagaatcgtatcctaatttcgaaattactgacacttctgttatccaaagaaaagataactataagaaggtggagccccatgcctttgttcattttgcttcaccggaagcagtgacttgggctgtggatgctgcaggtcgtactgagcttgctttcaacaatcagctgttgaaggttagtttggggcctgagaatccttattacttgaatcgacggaggagggacacagcaccctttatgctacctgatgtctccctggagattggagcactggctagttgcgatgaattctttgttggctggagaggacctccttctggtgttgagtttcttgtggatccatttgattgtacctgcaaattttgtttctccagagatacagccttctcgttcaaaggcacaaatgagcgtgctgtcataaagtgtgactttaaggttgaatttctggttagggagatcaatgaagttaagcagtattcagaacagacgggttttgtagtgctcttgcagctggcttcgtcaccttgggtctggtatagaactgctgatgacgactttgaaaaatcagttccatttgatctgttggatgatgatgatcagtggatccggaccactgattttactgcaagtggagctatcggtcgttgtaatacatacagagtcctagtccgtcctcgtcatggtttaaagctgaagaaggccatgtattatctcagagaacgaagagtaccagtgaaagatctcagatcacaacttaggatctgtgatgaaccttattttgggaggtccatgtctgatcacttctattatacttacaaggaagggattccttttgaaataatgtttttggttaatgctgtactgcataaaggcatatttaatcagcatcagctatcaatggacttctttaagctactgagaaatcaatcaatggaggtcaatgtggctgcactaaggcacatctattcctctaggcatccagtgtatgatgcctataagaggctgaaagatgttcatgattggctgttgaagaatcccaaactctttaggagccctccgcagttggatgatattgttgaaatcagaagattggtcattaccccaaccaaagcttattgtcttcttccggaagttgagctttctaatagggttctcaggaaatataaagatgttgctgatcggtttttaagggtcacatttatggatgaaggcatgcagacaatgaatgcaaatgtgctcacttactataatgccgcaattgtaagggatgtgacgtctacctctttttctcagaaaacgggagtattcaaaagggtaaagtctattctaacagatggattttacttgtgtggtcgcaaatactctttccttgctttctcagccaatcaattgagagaccgctctgcatggtttttcgctgaagatgggaagataaatgtgcttcaaattataggttggatggggaagtttgcaaaccggaatattgctaaatgtgctgccaggatgggtcagtgcttctcgtcaacgtacgcaacagtggaagttccttcaggacaggttaacatgcaccttccagatatacagaggaatggatatgatttctctgatgggattggcaagatcactcccgatcttgcaatggaagttgctcagaaattgaagctggacttgaatcctccttgcgcttatcaaattagatatgctggttgtaaaggggtcgtggcttgttggccggaagaaggtgatgggatccgtctttctttacggtccagtatgattaagttcttttctcaccacacaacactggaaatctgttcttggacaagatttcagcctggcttcctgaataggcaaattattacattgctttcaacactaggtgtgcctgacaaagtattttggggaatgcaaaagtccatggtttctaagttggacaaagtccttgtggacactgatgcagcatttgaagtcgttatttcatcatgtggtgagcaagggcatactccagcaataatgttgagtgcaggtttcaagcctcaaacagaacctcatttacgaggaatgttgacttgtgtgagagcatctcaactttggggccttagggaaaaatctaggatttttattcattcaggcagatggttaatgggcgttttggatgaactaggtgtacttgaacaaggtcagtgctttatccaagtgtcaaatccatctctacaaaactgcttccttaaacatggttctaggtttgctgaaacaaagaaaaattttgaagtaattaaggggctggttgtcatagctaagaatccttgtcttcaccctggagatgtaagaattctagaagcagttgatgcccctggtttacaccatttgtatgactgtctggtcttccctcaaaagggtgagagaccccatacgaatgaagcttctggaagtgatcttgatggggacctttattttgtcacatgggaagaggctcttatcccccctagcaagaaaagctcacaacccatgcagtataaccctgatgagcctcgggagttgcatcgcccagtcactcataaggtaactgtttgttctgttttattattatcattgaacttttatgaacctgtggttttccagaattgtttttctcttatttccttttttccaattggcgaatttccagaatttttttttaatttccttattctcaattgcaaaatataagtaccagcacttcttaataaaaccaacaatttgttcctacaaaacagtattgttttctagtatggtacttggaagctagtattgaaaggaatgtttctatcatagacatgcatgtttgagcgcctaactatctgttttaatgttattattcttttatggttatataaccggctgtcttaatgttgtaatggcactatgttgttgggttgaaacctgattgacagactgtttttgaaatggtttttcttgtcactggtaactgtttgtgttgctataatttccatagggcaatgagaaaaactgtggcggtaacactaggaagttctcaagtataacatattaataaaacaggaaaagcgggttttggatttatatcatggtgaataccttattataatttcctagtgtgctaaagaggaaaagaatcctcaaatggtagaaactggagcacaatcgtgggaatataatcttgtatacaatatatcaaaaaggggggtcatcagtttatattctgatgaatgaactatttttaagttccaagtaggtgaaagacataatcttttgactcttttgtttcacatttactctacaggacataattgagtttttttcaaaaaacatggtgaatgagcacctgggaagtatctgcaatgcacatgtggttcattctgaccttagtgaccatggtgcttcagatgagaaatgtatacatctcgcagagttagcggctatagctgttgattttcctaaaaccgggaagattgtgtcgatgcctgctcacttaaaaccacaactttacccagattttatgggtaaagaggagttccagtcatacaagtcaaacaaaattctgggaagactatatcgtgatatcaaagatgcgtatgacgaagatgtctctgaatcttctgggctcaatttttgtgctagtgacatcaattatgatgcagatcttgaaattacaggatccgctgactacatagctgatgcatgggctaaaaagtgctcctatgacgggcagctgattggactacttaaacagtacaaagttaagagggaagaggaggtcgtaactggccaaatctggtccatgcccaaatatgccagtaagaaactaggggatttgaaggagaagcttggtcattcttatggttccctcaggaaagaattcagacaactttttgagaacatggattccgactttgagcagctcaatgaggatgagaagaacaagttgtatgaaagaaaggcttcagcatggtaccaggtcacttaccatcctgaatgggttcagaagacgttagagttccagaagcctgatggtgatgaaggtgttgtgatgttaagctttgcttggattgctgctgattacctagctcgaataaaagttaggcaccagggcactgaaaatcttgactttgctaagcctgtcaactctctagtaaggtacctagccgatcgaatataaccagtatttgactgttttggcagcaaattcatttgctggatccggcttcttggtcgcaaagccactctgccattttgaaagataagttgtaatgttggtttgtaatgcagtacatctctcttgttaccctattgttgctatgacctattgtgattgttcaaagatgattttccatgctttgtatgaaagtaatatttttcaattttcttgctttgcttgaatataatcatggtcttgtctcagtaaatggattagcaagtggttttggtccctccagtataaccgttgctcattgtaagttctgcttattgtgatccttcaaaggctatggatcaagaggctgccctgcctgtctcaatcattattgaccctttcttttggtcttaagtttcatttttacatgctttgttctatttaggttctttattatcgat

SEQ ID NO: 511 - DNA, 4189 bp, Gossypium raimondii
  source 1..4189: mol_type = genomic DNA
ttattagtccttgcgaattgactacccgctaccatcagaaaggtctttgcctattcatctttacgaccaaaccaccctcctttttaatgtgaatacaatctttattgtagacacatcctttaggccaccaagccctaccttaatgtaacaatcccataccataatttaaaaggaatgacaaaatgagtcccatcatgaatatctctccatgcacaccacaatgatagcctattagtagatggtttaccatattagaactatcaagcacaagacctccactatatataccccctttctcctttgtgctattaggtcctttacttacactcctcttatgctccgctcagctaggatgaaccaatcttccttaacaccaccgcatcatcctctttatcccctcccttattgatatactcataaaaaaacttatcatctaatcatcccaaaattcaatattaaattttaatcatttccctctatcttttccaaagacatgtctgattctaaacatttcgatgacgatggacgaaatggggcaaaattttataaaaaagccaaatgaagcaagtaataaaaaagtttgtgtttgtacccaaaatcggagttcaaacatttgtgtaattaatttccttttcaagagtaaagaagtgcagagtaataaaaagaaaacaaatcagtaatcggctaaaatcaaaattcatgaatcatttaaccttcagatgagggaacatttaactcaaaacatattatattaggacaaagacgaatccaatttgtgagttaaaaactggataaatattgggcctgaaatctcttggaattgacgtgctgctaaaaggtaatgatccattatttgggctcaaagtattctatatccaagtaagcaaataatagtaaaaattaatttcagaattcagatgaataagcatttgatcgaattcactgctttgacccccataccaacttatggtgcatcctggggaaaaacattaatcccaatctttatatttcttttcctttcggatttcatctttacatttccaacaacttaattaccacgccaccaaaaagaaaaataaagttcaatcgctataataaacccaattgccagtgcaatccaatcaaatcaaaggatagtaaacttcgaagtagttttcgtgcctaaaaactaaaaaacgaagtttcaacaccaaaatattggggtgctggccatatttgtctaaaggaggaataaatctacatataggcgatcaatcaatatatataatcctccttaaagaagtaggaagtgcccaatgaacaaaacttcttctcagctaagttgttttgtactgtaatgttaatcataaaggggcgtggactaaatcttttagcatcaacttgtaaaataattaatcctttaacgaagtagcttgtgtccaattataggaacttctttgccaagttttagagaaagacattaggaatcaagtcatatatatatatatagcagctagatagatggtcattttttgtgaagaactgaatagactgaattcgatcgatcctttactcggaattactaatatggccaacgaattagcatttgatctgatctatggagttggtgacgagaaggatattttcgagctttcatatgctacatttgctgaagagttgcagctccaggagatcctgaaggagtccatgatgggttctgaaaaggagctggaagatgcagctagtgaagccaaccagaaacttgagtgtcttgtcagccatggattatccaacacggaatgtgctatctcccatgtctcagagattcatgagcctcagtcgttcaataaacaggggtcagcaagatggcgtccccagcagaggtttggttacattgagcaacagaggataaactgggatgacaaaggaagagaccgtttcaggtggaggaaacctacagggtggcacaacattaggggaagaagggtgggagatgttcctcaaaccagttccaggtcagtgatttttacttatttgtaacagatggaaaaatacatattttaactaatatctgaaacattggttctccagcaaggaatttcatgcaaaaaccagttcctggggtgaaggcagtcctcttgttggcactggtaatattgaagatcctaagggtaaaggcaaagccatagatgatggctggttgctggtctccaaatggaaatccgaaagcaggggtggaaacagtgttgacaaacagcaggttgatctcgggcatcctaatcatttaaagggttcaaaagatgacgacacaagtgctgttcacgaagatgattgcgagtccttggatgatgaggatgactttgattccgatgatagtcaaaagagctacgagagtcgcaagaagagtaaatggtttaaggaattttttgagagaatggacgccttgaatgcagaggagattgatcaaaccctgtggcactgtccagcatgccaaggtggtccaggtgccatcaaatggtacagaagcattagtgacctgatagcacattccaaaaagattggatcgagaagggtgaagttacatcaagagctcgcgatgcttctagaaggggagttgtgcattaggggaacatcagtttctcctcctgctgacccaattgttggtacttggaaaggtttaaaagaggaggcaagagatcatcaagtagtttggcctcccatggttgtcattatgaacacaatgacaagcaattcaaaggatggaaaggtaaaaatgatcagaaaatcttttggtttttaatagttgaaccaatgatgctggtttctagcactgattaaattgaaaattgtaatatacattatattatctaatatgcatgcaatttacaacttctttcagtttgttggcatgggaagtcatgagcttcttgagcacttcagctcgtttcctgctttaaaggctcaacattcctatggtcctcaaggtcaccgtggtttgagcgtcttgatctttgagagctcggcggtaggttatttagaagccgaacgactgcatcagaattttttggaccaaggattggataaatttgcttggaattcttgtacaaacgaagtcctgccaggaggagagcgccaactttatggtttcatggcagtgaaagaggacctggattgcttcaaccagcattgccaaggtgctctttgtcattcatactgttaaaggttctaagtaaatgccctggatcattttaactgatttaatctcaaactaacgtgtatgagatttacacttgcttccagttcgtattctcttcaagtgattgacatgctattactattgatcaggtaaatcaaagctcaaatatgagctcaaatcatatcaagaagcggttctgaatgaaatcaagaaaatgagggaggatagccagcaacttatccggctcaaggataagcttgaagaagaaataaaacgagcaaaaactcttgaaagatcagtcgatgatctaagtaggaacctgcaacagagaatgaaggacatctgcatatttgaacgaagggtcaaatcactgcatgaagataacaaagaagaggtaataatactcttttaacaaattccacacaaaattttccttttatgcataaggttgttagctactatataatacatataggtaactgaaacttgagtggcgtaatttctcaggtggaatcccaggagatcttttataaggatcaaattaaaattctggaagcaagagtgaaagagcttgatcacaagttgaaggaatctggcgcaagtcctttacatacaggggaacctgaacctgccatgtccggcctattggaggaggagcacactccatatcagtacaacagcaacctcggcattgatgaagattcaagtttggagaatggaaagcttccaagcaaatccaatgaaaatggagattgaaaacattcaaaccaccagcttttaagactttactgcaactcataaagtaatatcagtgtaggattatatatccctgtggatgcgttgtagggttgggtgctatttgtttataagaaccaactattatttcataatttcttcatgataattacatgggtactttatgtttattaaaaaaaagtttttttgatacaatattgagggtaaggatgagaatcacatgatttaaattcgcatgttgtatcaaatggatatcca

SEQ ID NO: 512 - DNA, 4683 bp, Gossypium raimondii
  source 1..4683: mol_type = genomic DNA
tccgtctttaattgaacccaacataatttaaatttcatttcatatatttatctctatataagcatgaatgtttggagctgcatttgtcacaatgcttgcattttatgttatgtacatatttggtgtgccagactgccagctaaagtgaatttcttttttctatgaaattgtggtttggttggtgattgtatcatgatttttcaaagaccagcacgaattattgagttttactgattggaaattgattatttgtttttgttaattttgagctaatattatacaatgaaacagttttaaatggtaactcccttgcactggaattattattttttttataatatatgaagataaatgtgaaactaggtttaatttcaatgaaattaaataattgtttaaatcgtttatttagcctctaaacctaacaaatttaaactaaatatggtcacatgaaattgatgattcttgtaaaattggtattgatgattcttccaactttggaaggtttaggttaaaataatttatttagataaattaaattaattaaaataaaaggttggcttgagcttattagtcttatatattatatgatttgtagcataaataaattaaaaataatacaactttttgtaaaagaaacgtggaacagcttcaaatgattttagtttttttctttttcgtatttcatgtttgttttataattcatatttggaattagtaatcgttcctttcagcaaaattgatttcaaagtttgaatttacgttttctttttgagagtataatacatcttaccattacacttaatacttgttggaagattaatatttataagtatgaagtgtattaatatcatatataaatttgagtcgaatatgacaaaacttgatcatgaacacttcttactgtaggggtggcaatggagcgagataggagttgatgtagttagagacagatctaggaggctgagaggagccttaaccccttaaaatgaaaaattttctatttgagtattttataatttataaaattttaaattagtaatgataaaattatattttgacccccaaaaagataaaactttgatttagacctctaaaaattataaagatataaactattaaaataacaaaattaaatttttactattataaaaatgtataattaattccggcccatcccaaaatttttggacttcacctgcccctaaatcatatttctagatccgccactgaatgtagttaaatttaccactactccatagttggtgtgctttgatccaccaactacaccgctccgttataaatatgtattcttaaaaattattattactttcaaagtgttgatatatccatttctaccccacttctgctttaactttctttttaatggaaaggctccgtttaaatttaatttatgttattttaatattttcaatattttttaataaaatatttaaacataattcttcaaataatttaaacataaaacatataaattttgtgaacatattattacaagtttaccctttttaatatatataattaaaaagaaacctcatttctagtttcccttgtctacatgcatctctcatgaatcacgcgagtattgattgtgtcagcgccgtgtccgattcgtgtttgatttctttcgttccgtttcccggcgtttcagacaccggtacgagggtttccagcattagtgctttaaagattggagaatgagttcgagaaaaggaggatcaaaagggaaagaggtatctggagtctctcgtcccaaggttgaccagctaagccatggtgtagcggaaatgaacatggattcttcacaagatgatggtgagtgggaagttattcaaagaaaacccaagaatacaggtggaagcagtggtgcaaagccatggggttctcaaaattccaaccctaaaccttggaatggaggcatgcggggtaatgctggacctggaagaggcaccggcggcaatgcttgggctaatcatggtgctgattctaggatagcaagtggccgagggaattcaaggccccaaatagtcaacaagagcttggacaaccaccaagtgccttccaatcctgtcattcgcccgcctcttgagcatggttggaattggcagtcaagaactggttccaatccatccaagggttttcaagatggatatgagaaagacaatgtcaacgctgaggctgaaaaagacaacgatgttgatgatattgaggatgattcggatgatgttgctgctgatgattctgacaatgagcttctaaccgatgaatttgattcagattcaagtcaaaagagccacgagacaagaaagaaaaatagatggtttaagaagttttttgatagtttagataagttgcgcgtggaagagatcaatgacccagcaaggcaatggcattgcccggcttgccaaggcggtcctggtgccattgactggtatcgaggccttcagccattagggacacatgcgaaaactaaaggatcaaaaagggtgaaactccatcgtgaacttgctgagctcttggatgaggaattgcgtagaaggggtacttcagttatccctgcaggtgaagcttttgggaaatggaggggtttaaaagatgacgaaaaagatcatgaaatagtctggccacctatggtaatcataatgaatacaaggcttcaacaagatgataatgataaggtaccccgagaacttgtactatttctgttttccagttataattcaatggaatttaattaaatctttgtaattaccgaggagctatttatggcgttgtgtacttcagtggattggtattgggaaccaagagctgcttgactatttcagctcatatgctgccgtgaaggctcgccattcatatggcccacaggggcatcgtgggatgagccttctgatttttgagagcacagcaagaggttatttagaagctgagcgtctgcataagcattttgctgagcaaggaacggatagagaggcttgggaacaccgtcaggtcttattttatccaggtgggacgcgccaactctatggttacatggcaaacaaggaagatctggacatcttcaaccaacattctcaaggttctctcctactgaagacaatggttatttgcatgcagggataaactgcgagataactttattgcacgaaaagtttctttattattttctgccgattcttatgcatttaattcacttgtgtgtaaatgttatgttgattaggaaaatctaagctcaaatttgagatgagatcttatcaagagatggttgttaatcaaatcaggcaaatgagcgaggccaaccaggagcttattttttacaagaacaagtttgctatacagcaaaggctcaaaactgcccttgaagagtcttttggtgttgtgagcgaaaagctccggaagacaatggaggagaacaggattgtgagacagagaaccaaaatgcagcacgaacagaacaaggaagaggtaattgttttagtttctgataatttacatctaaatgcagatgcaagctagtggctttcttcacagatttgttgctagatgtaatggttgtggcgtactaattactaatttataccatagaacataacttcattttagtaagttactggttgatcatatctttgcaaccatatttatcttaactagccagggatgaatatgaaaactttgctagtatctttatatgtttgctatgcttatacatctgtgatcttatttttggatataaaaatttggtggagatgaatatgaaaattttgcatctccaaggaaaattccaggtagcatttcatttttatttagtaggaccaagcagtttagtgtggccttagaactttgagatgctttaactcgaaaaaacgtccatgtccaaaccgtctctttcagagcatgttagtgtcttcccttgaacttttccatgtacttgataaattacattctatttgctattctctagtttctgtttgatgttaactgttttgtatattgctcttcgcagatggatttccaagaacaattcttcaaggaacaaatcaaatttattcatgaagcaagggatgaggaggaggagaagtttgagaagctacagcagcaacagcgtgagaagtttgtcaagcaatctactcctaatacttcaaatacagaggaatacaggcgtaggtatgtaattttgatgctaatgtgaatttccatgtgtaatcggatcgaaacatgctaaaatgctgctacaccttccgtttatttgtttattaatttgtctacatcaatcatgagataacccatttttctttcttgtttcatttgtagggcggatgaaattgcaaaattcataaagctccaggacgaagagatggaagcttttgtgtctgagagggacaagctgattaccgtacacaaagagaagatggctgcaatgagacagaggcattggcaggaagaagttgagctcgaaaaggagtttgatacggaattgagccgtctcatggagaagtatactcctactatgcctggaatggacaaatatatatattaaaattgttttctacatagattaaatttgattaaaatatgggcgagacttctgagttcgattcaatagcatataaaacttaatattataataatataatactaaaatataaacattaaaaatatccgttg

SEQ ID NO: 513 - DNA, 4649 bp, Gossypium raimondii
  source 1..4649: mol_type = genomic DNA
tccgtctttaattgaacccaacataatttaaatttcatttcatatatttatctctatataagcatgaatgtttggagctgcatttgtcacaatgcttgcattttatgttatgtacatatttggtgtgccagactgccagctaaagtgaatttcttttttctatgaaattgtggtttggttggtgattgtatcatgatttttcaaagaccagcacgaattattgagttttactgattggaaattgattatttgtttttgttaattttgagctaatattatacaatgaaacagttttaaatggtaactcccttgcactggaattattattttttttataatatatgaagataaatgtgaaactaggtttaatttcaatgaaattaaataattgtttaaatcgtttatttagcctctaaacctaacaaatttaaactaaatatggtcacatgaaattgatgattcttgtaaaattggtattgatgattcttccaactttggaaggtttaggttaaaataatttatttagataaattaaattaattaaaataaaaggttggcttgagcttattagtcttatatattatatgatttgtagcataaataaattaaaaataatacaactttttgtaaaagaaacgtggaacagcttcaaatgattttagtttttttctttttcgtatttcatgtttgttttataattcatatttggaattagtaatcgttcctttcagcaaaattgatttcaaagtttgaatttacgttttctttttgagagtataatacatcttaccattacacttaatacttgttggaagattaatatttataagtatgaagtgtattaatatcatatataaatttgagtcgaatatgacaaaacttgatcatgaacacttcttactgtaggggtggcaatggagcgagataggagttgatgtagttagagacagatctaggaggctgagaggagccttaaccccttaaaatgaaaaattttctatttgagtattttataatttataaaattttaaattagtaatgataaaattatattttgacccccaaaaagataaaactttgatttagacctctaaaaattataaagatataaactattaaaataacaaaattaaatttttactattataaaaatgtataattaattccggcccatcccaaaatttttggacttcacctgcccctaaatcatatttctagatccgccactgaatgtagttaaatttaccactactccatagttggtgtgctttgatccaccaactacaccgctccgttataaatatgtattcttaaaaattattattactttcaaagtgttgatatatccatttctaccccacttctgctttaactttctttttaatggaaaggctccgtttaaatttaatttatgttattttaatattttcaatattttttaataaaatatttaaacataattcttcaaataatttaaacataaaacatataaattttgtgaacatattattacaagtttaccctttttaatatatataattaaaaagaaacctcatttctagtttcccttgtctacatgcatctctcatgaatcacgcgagtattgattgtgtcagcgccgtgtccgattcgtgtttgatttctttcgttccgtttcccggcgtttcagacaccggtacgagggtttccagcattagtgctttaaagattggagaatgagttcgagaaaaggaggatcaaaagggaaagaggtatctggagtctctcgtcccaaggttgaccagctaagccatggtgtagcggaaatgaacatggattcttcacaagatgatggtgagtgggaagttattcaaagaaaacccaagaatacaggtggaagcagtggtgcaaagccatggggttctcaaaattccaaccctaaaccttggaatggaggcatgcggggtaatgctggacctggaagaggcaccggcggcaatgcttgggctaatcatggtgctgattctaggatagcaagtggccgagggaattcaaggccccaaatagtcaacaagagcttggacaaccaccaagtgccttccaatcctgtcattcgcccgcctcttgagcatggttggaattggcagtcaagaactggttccaatccatccaagggttttcaagatggatatgagaaagacaatgtcaacgctgaggctgaaaaagacaacgatgttgatgatattgaggatgattcggatgatgttgctgctgatgattctgacaatgagcttctaaccgatgaatttgattcagattcaagtcaaaagagccacgagacaagaaagaaaaatagatggtttaagaagttttttgatagtttagataagttgcgcgtggaagagatcaatgacccagcaaggcaatggcattgcccggcttgccaaggcggtcctggtgccattgactggtatcgaggccttcagccattagggacacatgcgaaaactaaaggatcaaaaagggtgaaactccatcgtgaacttgctgagctcttggatgaggaattgcgtagaaggggtacttcagttatccctgcaggtgaagcttttgggaaatggaggggtttaaaagatgacgaaaaagatcatgaaatagtctggccacctatggtaatcataatgaatacaaggcttcaacaagatgataatgataaggtaccccgagaacttgtactatttctgttttccagttataattcaatggaatttaattaaatctttgtaattaccgaggagctatttatggcgttgtgtacttcagtggattggtattgggaaccaagagctgcttgactatttcagctcatatgctgccgtgaaggctcgccattcatatggcccacaggggcatcgtgggatgagccttctgatttttgagagcacagcaagaggttatttagaagctgagcgtctgcataagcattttgctgagcaaggaacggatagagaggcttgggaacaccgtcaggtcttattttatccaggtgggacgcgccaactctatggttacatggcaaacaaggaagatctggacatcttcaaccaacattctcaaggttctctcctactgaagacaatggttatttgcatgcagggataaactgcgagataactttattgcacgaaaagtttctttattattttctgccgattcttatgcatttaattcacttgtgtgtaaatgttatgttgattaggaaaatctaagctcaaatttgagatgagatcttatcaagagatggttgttaatcaaatcaggcaaatgagcgaggccaaccaggagcttattttttacaagaacaagtttgctatacagcaaaggctcaaaactgcccttgaagagtcttttggtgttgtgagcgaaaagctccggaagacaatggaggagaacaggattgtgagacagagaaccaaaatgcagcacgaacagaacaaggaagaggtaattgttttagtttctgataatttacatctaaatgcagatgcaagctagtggctttcttcacagatttgttgctagatgtaatggttgtggcgtactaattactaatttataccatagaacataacttcattttagtaagttactggttgatcatatctttgcaaccatatttatcttaactagccagggatgaatatgaaaactttgctagtatctttatatgtttgctatgcttatacatctgtgatcttatttttggatataaaaatttggtggagatgaatatgaaaattttgcatctccaaggaaaattccaggtagcatttcatttttatttagtaggaccaagcagtttagtgtggccttagaactttgagatgctttaactcgaaaaaacgtccatgtccaaaccgtctctttcagagcatgttagtgtcttcccttgaacttttccatgtacttgataaattacattctatttgctattctctagtttctgtttgatgttaactgttttgtatattgctcttcgcagatggatttccaagaacaattcttcaaggaacaaatcaaatttattcatgaagcaagggatgaggaggaggagaagtttgagaagctacagcagcaacagcgtgagaagtttgtcaagcaatctactcctaatacttcaaatacagaggaatacaggcgtaggtatgtaattttgatgctaatgtgaatttccatgtgtaatcggatcgaaacatgctaaaatgctgctacaccttccgtttatttgtttattaatttgtctacatcaatcatgagataacccatttttctttcttgtttcatttgtagggcggatgaaattgcaaaattcataaagctccaggacgaagagatggaagcttttgtgtctgagagggacaagctgattaccgtacacaaagagaagatggctgcaatgagacagaggcattggcaggaagaagttgagctcgaaaaggagtttgatacggaattgagccgtctcatggagaagtatactcctactatgcctggaatggacaaatatatatattaaaattgttttctacatagattaaatttgattaaaatatgggcgagacttctgagttcgattcaatagcatataaaacttaatattataataatat

SEQ ID NO: 514 - DNA, 3755 bp, Gossypium raimondii
  source 1..3755: mol_type = genomic DNA
tccgtctttaattgaacccaacataatttaaatttcatttcatatatttatctctatataagcatgaatgtttggagctgcatttgtcacaatgcttgcattttatgttatgtacatatttggtgtgccagactgccagctaaagtgaatttcttttttctatgaaattgtggtttggttggtgattgtatcatgatttttcaaagaccagcacgaattattgagttttactgattggaaattgattatttgtttttgttaattttgagctaatattatacaatgaaacagttttaaatggtaactcccttgcactggaattattattttttttataatatatgaagataaatgtgaaactaggtttaatttcaatgaaattaaataattgtttaaatcgtttatttagcctctaaacctaacaaatttaaactaaatatggtcacatgaaattgatgattcttgtaaaattggtattgatgattcttccaactttggaaggtttaggttaaaataatttatttagataaattaaattaattaaaataaaaggttggcttgagcttattagtcttatatattatatgatttgtagcataaataaattaaaaataatacaactttttgtaaaagaaacgtggaacagcttcaaatgattttagtttttttctttttcgtatttcatgtttgttttataattcatatttggaattagtaatcgttcctttcagcaaaattgatttcaaagtttgaatttacgttttctttttgagagtataatacatcttaccattacacttaatacttgttggaagattaatatttataagtatgaagtgtattaatatcatatataaatttgagtcgaatatgacaaaacttgatcatgaacacttcttactgtaggggtggcaatggagcgagataggagttgatgtagttagagacagatctaggaggctgagaggagccttaaccccttaaaatgaaaaattttctatttgagtattttataatttataaaattttaaattagtaatgataaaattatattttgacccccaaaaagataaaactttgatttagacctctaaaaattataaagatataaactattaaaataacaaaattaaatttttactattataaaaatgtataattaattccggcccatcccaaaatttttggacttcacctgcccctaaatcatatttctagatccgccactgaatgtagttaaatttaccactactccatagttggtgtgctttgatccaccaactacaccgctccgttataaatatgtattcttaaaaattattattactttcaaagtgttgatatatccatttctaccccacttctgctttaactttctttttaatggaaaggctccgtttaaatttaatttatgttattttaatattttcaatattttttaataaaatatttaaacataattcttcaaataatttaaacataaaacatataaattttgtgaacatattattacaagtttaccctttttaatatatataattaaaaagaaacctcatttctagtttcccttgtctacatgcatctctcatgaatcacgcgagtattgattgtgtcagcgccgtgtccgattcgtgtttgatttctttcgttccgtttcccggcgtttcagacaccggtacgagggtttccagcattagtgctttaaagattggagaatgagttcgagaaaaggaggatcaaaagggaaagaggtatctggagtctctcgtcccaaggttgaccagctaagccatggtgtagcggaaatgaacatggattcttcacaagatgatggtgagtgggaagttattcaaagaaaacccaagaatacaggtggaagcagtggtgcaaagccatggggttctcaaaattccaaccctaaaccttggaatggaggcatgcggggtaatgctggacctggaagaggcaccggcggcaatgcttgggctaatcatggtgctgattctaggatagcaagtggccgagggaattcaaggccccaaatagtcaacaagagcttggacaaccaccaagtgccttccaatcctgtcattcgcccgcctcttgagcatggttggaattggcagtcaagaactggttccaatccatccaagggttttcaagatggatatgagaaagacaatgtcaacgctgaggctgaaaaagacaacgatgttgatgatattgaggatgattcggatgatgttgctgctgatgattctgacaatgagcttctaaccgatgaatttgattcagattcaagtcaaaagagccacgagacaagaaagaaaaatagatggtttaagaagttttttgatagtttagataagttgcgcgtggaagagatcaatgacccagcaaggcaatggcattgcccggcttgccaaggcggtcctggtgccattgactggtatcgaggccttcagccattagggacacatgcgaaaactaaaggatcaaaaagggtgaaactccatcgtgaacttgctgagctcttggatgaggaattgcgtagaaggggtacttcagttatccctgcaggtgaagcttttgggaaatggaggggtttaaaagatgacgaaaaagatcatgaaatagtctggccacctatggtaatcataatgaatacaaggcttcaacaagatgataatgataaggtaccccgagaacttgtactatttctgttttccagttataattcaatggaatttaattaaatctttgtaattaccgaggagctatttatggcgttgtgtacttcagtggattggtattgggaaccaagagctgcttgactatttcagctcatatgctgccgtgaaggctcgccattcatatggcccacaggggcatcgtgggatgagccttctgatttttgagagcacagcaagaggttatttagaagctgagcgtctgcataagcattttgctgagcaaggaacggatagagaggcttgggaacaccgtcaggtcttattttatccaggtgggacgcgccaactctatggttacatggcaaacaaggaagatctggacatcttcaaccaacattctcaaggttctctcctactgaagacaatggttatttgcatgcagggataaactgcgagataactttattgcacgaaaagtttctttattattttctgccgattcttatgcatttaattcacttgtgtgtaaatgttatgttgattaggaaaatctaagctcaaatttgagatgagatcttatcaagagatggttgttaatcaaatcaggcaaatgagcgaggccaaccaggagcttattttttacaagaacaagtttgctatacagcaaaggctcaaaactgcccttgaagagtcttttggtgttgtgagcgaaaagctccggaagacaatggaggagaacaggattgtgagacagagaaccaaaatgcagcacgaacagaacaaggaagaggtaattgttttagtttctgataatttacatctaaatgcagatgcaagctagtggctttcttcacagatttgttgctagatgtaatggttgtggcgtactaattactaatttataccatagaacataacttcattttagtaagttactggttgatcatatctttgcaaccatatttatcttaactagccagggatgaatatgaaaactttgctagtatctttatatgtttgctatgcttatacatctgtgatcttatttttggatataaaaat

SEQ ID NO: 515 - DNA, 6479 bp, Gossypium raimondii
  source 1..6479: mol_type = genomic DNA
aattatatatttatttaaatttttcaatacataaagtacgattatttttgtagtcttaattcaattagcatgaacattgttcccaatacaagaggacgtgagttcgagtatttatgggttgaggagggggtatagatagttctagacattgtatcaaaaacaaatataattagaacttataatgaaattattaaaaaaagaaaaaccattagttttacctattaattgaatattcaaatgactagtcaatttatggctcaatccacattttgttttctctttcttctttaacaaaagtttgatcctataatttataaatctcaaattcaacacaacacaagtctgtgtttaagtttgaataagaatgattaaatttaaaatattataccttagattcaatcatattctaaataaattaaattatgtaattttttttattttgaaatactcacaacgtgagtaaaaaatataattatttaattttaaatgatatatagttcgttgacatggttgttattgtagtaattagaaagacgcgctttctagcgcatttaagtatgtatcttcttttgcttttaaatttgagatgtttgtagttaaatgtttaagtaagcaatatatataaaaggaataaggttacatttggtacttatactttcatagaatgtttaatgtaatatttgtactttgaaaatgtttaatgtgatacttgaactatcaatgtgtatttcatcattgttcttgtactttaataaaatgtctaatgtggtatccgaactatcaatatgtgctttgtgtcatatttgttgcaaagatggcacgggagtccaagggtcatacacttgaagaaatacaagcatcacttactacttctccgtagtcagaaccaagtgtaatgagttactttcctgtactaattattatggtacatggtgttaacaacattagtgaattgttaaataaaataataaaaaattgacacataatttcttttcccaaatcataagtccttacggacaatataaaaattatatggaaaactaaataaaaaaattaaagtaaattaaccatgtttagctctttgcttttaatttaatttaattctttttttatctagtttttaacgtaatgttatattatctacgagtaaatgatgatttgaaaaaaaagttacgtgtcgaatttatattggttggtttaacaattcactaacgatattaacgtcaaatactataataaaacatatattgatggtttagaaattacataggagaatttcaaagtagaggtactacattagacattttatgaaagtataagtaatgtaataaaatacatagtgatggttcaagtaccacattagacaatttttaaagtacaagtatcaaattgaatattttagaaaattacagataccaaatatgatattaccctagataacagaaattcctcgcgaggagttttatattaggtaagcttaattagttaagatatccccattctcaacaatgcgcgtgcaacacaaatctccttcttgcactcagctatttttatggtcctcactctccattcacttctacaccactgccttttctctgcaggtatctccttctctctcgtggctcttacgattatcaggtaaaaatacccattattctttgatttctcttaaaagttatagtgcttttaatctatttttctattttaaagtgtttttcttttttaattttttaatctctcgccatgcatggctttattgttcttcccagtttcataaaaaaaaaaaaatagagaacgttatttcacgttatgattttgttttttaatgtattgtttatcaattacttgtgcaaatgtgtacgttatgtagtctgatggattccagttattcgcattgttatattctgtaatcttacactttgaattggtgctttattattattttttaaaattttattttcaagttttaagctttttgagaagatctcttaaaacccatatagtgaaccccaaagtgattgctgaaatatgggttttactcatttataattgttttaatctgcaacggttaatttgttgcttgtccttgcttatgatcagctacaaagagatttattgagataggtttaatcttggtaagaacaaaagatacatttatcctggggagattattcagtttttactgtacaattggcctatttggattccacattggtattttatttttgttttaagtgcttaaagaatccttgccttttgctatgatgggatacaaaaggaaggatttttctgaggaattcttacagttgggacgttttattgataagcaaatgggcggtatttataggtcgttaggtcgttaactcgtcgccaacttgtcatattagttttggttataacataggcttttttgattgtggcatcgaatatgaaaattgaccaatcttttcattcaaacagtgatctaggactagaaagcgtttgaaagatcttaatggcagatgctactgattcatttcctgacttgcggagtgtgtataaaagttctggtcaccaagttaatcgcctaagtcagaatgtggcaaacatgaagctagcttctgcgcaagatggtgaaaaggagaactcattgggatccaataacaaaggtgctgaaaatgttgggtttcctcaagattctacccctaatgtatggggacatccgaatgtgattcagaaacttaggatgcaaggtaatcttggttcagaaaaggttactcacaaagcctggccaactcaaaatgctgtttctaggacgcaacaaggtgatagaacatggggaaatagtagtataaaatctccatcctcagagtatggaaggaatgaccctgatcaagctggttttactttctctaataattcttgggatggtcaaattaaaaccgaccatgaagtgggtgataagttggatgatgaaattggagataatgaaaatgttgatgatgaatatggtaatggtgtctctaatattgagtacgatagtgatgatatcgatgattatgtttccggttcagatgaagatgagaagagccatgaagcacgcaaggagagcaagtggttctattttttttttgaaagtttagagaaactgacagttgaggagattctttctccggttcggcggtggcactgtccagcatgtcaaggtgggccaggagccatcaactggtaccgaggtgtgcaacccttattgactcattccatgactaaaacaacacggagagctaagctgcatcgtgtatttgctggacttttggttgaggagatgcgcaggagaggagctttcattaaaccagtcaatgatgcatttggcaggtgggaagggctgactgatagagttgcagatcacgagatagtttggcctccaatggttatcattatgaatacaagatatgaacaggatgaaaacggcaaggtactatatggctatcatctttgttttcagagatcttattttccttattttcccctggtttcaagcaaaatgttaccactttttcagtaaaatatcttgtaaaagaaaacccaagaaaatgctacgtagcatttattgcttttttggtaaaatatctcttgtactcttgtattaatatactcttaatatctcttgtatcatttcatcagtggattggaatgggaaatcaagaacttctcaattacttcagctcgtatgctgcagtaaaagcaagacactcatatggtccacaagggcatcgggggatgagtcttctgatctttgagagctcagcagcgggatatttagagactgcacgcctgcataagcattttaaggagcaagggagggatagggatgcttgggattgttcacgggttccattctgtccaggtggcaagcgccaactctatggctacattgccatgaaagaagatctggatttatttaaccagcactctcaaggtcaaatcactctctctcctctcaaaatatcgtgtctatgtgtatacacttgtgcttgcatgtgctagataaagaaataaaaggaactccatagtagcaaggaattgaatgcctatacctttataatttttaaaggattaaatcacatttttatcattttttttgggggggtggggggtgggagtaactttgctatttgctaatgggaatattatttaatttgttaatataaaattttcaacttttggtgccattgcaaacttaaaaagatgatttgtagttcctttttcttttggcttctttgcaaagttttgattactttgatagtcacagccttacttgattatggagacaggaggtaatcctcaaaaacaactcttaccagttcgtgacagtttgttcttgtttaggataaagcgacattgccttaaattatactcttactttagtaagagaagtagttaaaacatgcatttaaatttgccgaattggctggtgttttgtttctataatttgttttaaaatttaaatatttccttttcttgaaagaaaaaatttaatgaatgattgatggtggaagatgcataatttaatctgtattggcaatgtagtttcctttttcagtcatgtttgatactctatgcgatcaagcaggaaagtccaagctgaaatttgagacgaggtcatatcaagagatggttgagagtcagataaagaagataaatgatgatagtcagcagcttaacctacttaaaaagaaggttgctcaagagcagcagcactcacaagtccttgcagagtctctaggacgattgagtgagaagctgcgccagacgacagaggaatatggtatcatgaggcagcaaactagattgcagcatgagcagaacaaagaagaggtagcatttttaaaactttgtattcctttacttttattgccaatcatggttgccaagttaggacaagaagggtgccctgggaccaccttctccatgtttcactatttggtaaaatggtgatcatactcagtggatgctattactgttgtcatgttgtttcttaataacttgtagggaggctgaacttaaggtaaatctaagaagtcagttcagaggcatgcttgtgcttgacattgaatcttctccatgttttataagtatatttaagttgacatcgaatcttctaatttgttatctcaatgcattgatttgcagttgggcgccaaagaacagtattttaaggagaaaattaatgttatttaccaagccataaagttgaaggaagataattttgagaagctgcagagggcagcgagggagagagttgagcggtcaaatgcaactctgataaataatgaagatcagcacaggtaacagttatgattcaaaatatctcgttttgtcacacatgacctacttcatgctgtaatgaagatttttcttttctgagatggaatgtctatacgatctgactaccttgagaaggtttttgttttctgctgacttgatactgctctgtccatcaaataaaatatctgtctctttatttttcctttaagtttctgtgtttgtcttatgcatatttagacataaaatgaggtatgatctttcgaacatatgcaaaacttagaaaaagattatttctataccagttttagatgcctactatataggactctaaacctccgaccgtgggtaattcaaggtcacttgctgctactagggtcttgttttgttgaaactgaaacttgttgactttatactgtaattatgatctgataatagttttcaacaaaatttgaacattcagtgctactgagttggaggaaaactcaaggtccataacaatccaggagaagaagatggaggaattcgaggcagagagggagaagctaatgaaaagtcatcaagatggaagattggcaatcacacagcggtactgggaagagctgattgagcttgaggaagggtttgaaaaagaattgaccctgcttatgggaaagtacaaccccgatcgcctcgaggaagagactactgacagccttgaaggacgagacaagagaggagcaagagatattgaaacagaatagacaacaatgatcctatttgtcgagggtaagaagcagcatattatgttttgggtaaaaggtatacaccagttttattaccaaagatacttcagttttggatatagagggctaaaagtgaagcctttctggatcggtacaaacattggaataatgaaacttcaagtgctttattattattattgaacatacatagctgaggattcttttgtgtttaagctgtcttgcaatgacaatttttgcagtggcatatatgtttgatgattcgatgtctgaatttccatgcaaaaagaaaacatttttgtttgctaagaaatcgacaaaaaaattggggtttctgcagatttgctctctctctctctctaatattttttcaacaagttaactaaatatagaaattgggttttgtccatgcagaaaacctgctaatattgt

SEQ ID NO: 516 - DNA, 6292 bp, Gossypium raimondii
  source 1..6292: mol_type = genomic DNA
gacgtgagttcgagtatttatgggttgaggagggggtatagatagttctagacattgtatcaaaaacaaatataattagaacttataatgaaattattaaaaaaagaaaaaccattagttttacctattaattgaatattcaaatgactagtcaatttatggctcaatccacattttgttttctctttcttctttaacaaaagtttgatcctataatttataaatctcaaattcaacacaacacaagtctgtgtttaagtttgaataagaatgattaaatttaaaatattataccttagattcaatcatattctaaataaattaaattatgtaattttttttattttgaaatactcacaacgtgagtaaaaaatataattatttaattttaaatgatatatagttcgttgacatggttgttattgtagtaattagaaagacgcgctttctagcgcatttaagtatgtatcttcttttgcttttaaatttgagatgtttgtagttaaatgtttaagtaagcaatatatataaaaggaataaggttacatttggtacttatactttcatagaatgtttaatgtaatatttgtactttgaaaatgtttaatgtgatacttgaactatcaatgtgtatttcatcattgttcttgtactttaataaaatgtctaatgtggtatccgaactatcaatatgtgctttgtgtcatatttgttgcaaagatggcacgggagtccaagggtcatacacttgaagaaatacaagcatcacttactacttctccgtagtcagaaccaagtgtaatgagttactttcctgtactaattattatggtacatggtgttaacaacattagtgaattgttaaataaaataataaaaaattgacacataatttcttttcccaaatcataagtccttacggacaatataaaaattatatggaaaactaaataaaaaaattaaagtaaattaaccatgtttagctctttgcttttaatttaatttaattctttttttatctagtttttaacgtaatgttatattatctacgagtaaatgatgatttgaaaaaaaagttacgtgtcgaatttatattggttggtttaacaattcactaacgatattaacgtcaaatactataataaaacatatattgatggtttagaaattacataggagaatttcaaagtagaggtactacattagacattttatgaaagtataagtaatgtaataaaatacatagtgatggttcaagtaccacattagacaatttttaaagtacaagtatcaaattgaatattttagaaaattacagataccaaatatgatattaccctagataacagaaattcctcgcgaggagttttatattaggtaagcttaattagttaagatatccccattctcaacaatgcgcgtgcaacacaaatctccttcttgcactcagctatttttatggtcctcactctccattcacttctacaccactgccttttctctgcaggtatctccttctctctcgtggctcttacgattatcaggtaaaaatacccattattctttgatttctcttaaaagttatagtgcttttaatctatttttctattttaaagtgtttttcttttttaattttttaatctctcgccatgcatggctttattgttcttcccagtttcataaaaaaaaaaaaatagagaacgttatttcacgttatgattttgttttttaatgtattgtttatcaattacttgtgcaaatgtgtacgttatgtagtctgatggattccagttattcgcattgttatattctgtaatcttacactttgaattggtgctttattattattttttaaaattttattttcaagttttaagctttttgagaagatctcttaaaacccatatagtgaaccccaaagtgattgctgaaatatgggttttactcatttataattgttttaatctgcaacggttaatttgttgcttgtccttgcttatgatcagctacaaagagatttattgagataggtttaatcttggtaagaacaaaagatacatttatcctggggagattattcagtttttactgtacaattggcctatttggattccacattggtattttatttttgttttaagtgcttaaagaatccttgccttttgctatgatgggatacaaaaggaaggatttttctgaggaattcttacagttgggacgttttattgataagcaaatgggcggtatttataggtcgttaggtcgttaactcgtcgccaacttgtcatattagttttggttataacataggcttttttgattgtggcatcgaatatgaaaattgaccaatcttttcattcaaacagtgatctaggactagaaagcgtttgaaagatcttaatggcagatgctactgattcatttcctgacttgcggagtgtgtataaaagttctggtcaccaagttaatcgcctaagtcagaatgtggcaaacatgaagctagcttctgcgcaagatggtgaaaaggagaactcattgggatccaataacaaaggtgctgaaaatgttgggtttcctcaagattctacccctaatgtatggggacatccgaatgtgattcagaaacttaggatgcaaggtaatcttggttcagaaaaggttactcacaaagcctggccaactcaaaatgctgtttctaggacgcaacaaggtgatagaacatggggaaatagtagtataaaatctccatcctcagagtatggaaggaatgaccctgatcaagctggttttactttctctaataattcttgggatggtcaaattaaaaccgaccatgaagtgggtgataagttggatgatgaaattggagataatgaaaatgttgatgatgaatatggtaatggtgtctctaatattgagtacgatagtgatgatatcgatgattatgtttccggttcagatgaagatgagaagagccatgaagcacgcaaggagagcaagtggttctattttttttttgaaagtttagagaaactgacagttgaggagattctttctccggttcggcggtggcactgtccagcatgtcaaggtgggccaggagccatcaactggtaccgaggtgtgcaacccttattgactcattccatgactaaaacaacacggagagctaagctgcatcgtgtatttgctggacttttggttgaggagatgcgcaggagaggagctttcattaaaccagtcaatgatgcatttggcaggtgggaagggctgactgatagagttgcagatcacgagatagtttggcctccaatggttatcattatgaatacaagatatgaacaggatgaaaacggcaaggtactatatggctatcatctttgttttcagagatcttattttccttattttcccctggtttcaagcaaaatgttaccactttttcagtaaaatatcttgtaaaagaaaacccaagaaaatgctacgtagcatttattgcttttttggtaaaatatctcttgtactcttgtattaatatactcttaatatctcttgtatcatttcatcagtggattggaatgggaaatcaagaacttctcaattacttcagctcgtatgctgcagtaaaagcaagacactcatatggtccacaagggcatcgggggatgagtcttctgatctttgagagctcagcagcgggatatttagagactgcacgcctgcataagcattttaaggagcaagggagggatagggatgcttgggattgttcacgggttccattctgtccaggtggcaagcgccaactctatggctacattgccatgaaagaagatctggatttatttaaccagcactctcaaggtcaaatcactctctctcctctcaaaatatcgtgtctatgtgtatacacttgtgcttgcatgtgctagataaagaaataaaaggaactccatagtagcaaggaattgaatgcctatacctttataatttttaaaggattaaatcacatttttatcattttttttgggggggtggggggtgggagtaactttgctatttgctaatgggaatattatttaatttgttaatataaaattttcaacttttggtgccattgcaaacttaaaaagatgatttgtagttcctttttcttttggcttctttgcaaagttttgattactttgatagtcacagccttacttgattatggagacaggaggtaatcctcaaaaacaactcttaccagttcgtgacagtttgttcttgtttaggataaagcgacattgccttaaattatactcttactttagtaagagaagtagttaaaacatgcatttaaatttgccgaattggctggtgttttgtttctataatttgttttaaaatttaaatatttccttttcttgaaagaaaaaatttaatgaatgattgatggtggaagatgcataatttaatctgtattggcaatgtagtttcctttttcagtcatgtttgatactctatgcgatcaagcaggaaagtccaagctgaaatttgagacgaggtcatatcaagagatggttgagagtcagataaagaagataaatgatgatagtcagcagcttaacctacttaaaaagaaggttgctcaagagcagcagcactcacaagtccttgcagagtctctaggacgattgagtgagaagctgcgccagacgacagaggaatatggtatcatgaggcagcaaactagattgcagcatgagcagaacaaagaagaggtagcatttttaaaactttgtattcctttacttttattgccaatcatggttgccaagttaggacaagaagggtgccctgggaccaccttctccatgtttcactatttggtaaaatggtgatcatactcagtggatgctattactgttgtcatgttgtttcttaataacttgtagggaggctgaacttaaggtaaatctaagaagtcagttcagaggcatgcttgtgcttgacattgaatcttctccatgttttataagtatatttaagttgacatcgaatcttctaatttgttatctcaatgcattgatttgcagttgggcgccaaagaacagtattttaaggagaaaattaatgttatttaccaagccataaagttgaaggaagataattttgagaagctgcagagggcagcgagggagagagttgagcggtcaaatgcaactctgataaataatgaagatcagcacaggtaacagttatgattcaaaatatctcgttttgtcacacatgacctacttcatgctgtaatgaagatttttcttttctgagatggaatgtctatacgatctgactaccttgagaaggtttttgttttctgctgacttgatactgctctgtccatcaaataaaatatctgtctctttatttttcctttaagtttctgtgtttgtcttatgcatatttagacataaaatgaggtatgatctttcgaacatatgcaaaacttagaaaaagattatttctataccagttttagatgcctactatataggactctaaacctccgaccgtgggtaattcaaggtcacttgctgctactagggtcttgttttgttgaaactgaaacttgttgactttatactgtaattatgatctgataatagttttcaacaaaatttgaacattcagtgctactgagttggaggaaaactcaaggtccataacaatccaggagaagaagatggaggaattcgaggcagagagggagaagctaatgaaaagtcatcaagatggaagattggcaatcacacagcggtactgggaagagctgattgagcttgaggaagggtttgaaaaagaattgaccctgcttatgggaaagtacaaccccgatcgcctcgaggaagagactactgacagccttgaaggacgagacaagagaggagcaagagatattgaaacagaatagacaacaatgatcctatttgtcgagggtaagaagcagcatattatgttttgggtaaaaggtatacaccagttttattaccaaagatacttcagttttggatatagagggctaaaagtgaagcctttctggatcggtacaaacattggaataatgaaacttcaagtgctttattattattattgaacatacatagctgaggattcttttgtgtttaagctgtcttgcaatgacaatttttgcagtggcatatatgtttgatgattcgatgtctgaatttccatgcaaaaagaaaacatttttgtttgctaagaaatcgacaaaaaaattggggtttctgca

SEQ ID NO: 517 - DNA, 4171 bp, Gossypium raimondii
  source 1..4171: mol_type = genomic DNA
ttaaattttatattgtatatatcataatattaatattttattatcaatgttctttaaaaaaatattgaaaaaaatagaaaataaagaaagtgaaaaaagcgggcatgcaatggactatctacgtggaagtaaatctgcgatatttatgtacttacagtcgtgaaaagggtccccattctcgactcagtggggggacgcggccgtctggtcatttccatcactcacaacgcgcgtgcgtctcacatcccttcttccatgattaatgatttctgagtttctcatttttagactctctcttgttctccacaggcacctgttctttttttttttcgctcttcaaactctatcctggtaaaaatacccaccttttttgttttggtaaaaagcatgtcttttgttaaatgttaatgtattcttccatgagagtttcaaagagaataaagagttgtttttacgtgatgatctcatgttcttaatggttgaaacttgaaatctttgtttgttttgcacatgaattgtttgtataaatgcatgtgttgatgtcatttgattggcttttgagttattcaaacaggatgaataaacggaggtattgttcttctttttttcggctgaataacttgtttattttcgtattttatgcattggaaaacgttacgttttgaaaagatcttacttttttccttattatatgcaagttttatgtttcttttttgagtactgatttacaattgttttaaattaaatctgccatagctactttgctgcttgttcttgctcatgattggctaaaagaaagataggtgggtttcgatttaaatcttactggtaagattccatgtaaattggaagtagctagctgattgatcctagagagaattatccaattcatttgatttcaaaacggtattgtttgaagtgcttaccatttgcatatatatatatatatatatatatttacaaataagttatcatttatttccgttttatctatttataatttttttagattcgtaactactcttctcaatatcaacatgtcgtgcaatccactatttacattttaagatccatattatatgttttgtttcatagattttctttctttaattatgacgcataaccttgacgttcaaaatataattttgaataatctaattcaattattcaaccatttcattatatcaaattttatattaatcgtattaattgatatttatatatttcggtacaataacaatatgttatttgtaacactagtcttattagtcagttaattgatcatattttgttcatgaaaaggggtttgattggtattagtgtggatacaacaaaatattaccgatctaataagcatcttgtattagaacttagaaaggaattaatcttatatgatatgaaattttgactattcatgagtgtgctcaatatggatataccccacagtgatccttggtagtaaataattttagctgatggaaaatcgtagcattttgttttgttcttccttggaaaagaagagtaacgtttggtctagtacttttaatgttgggacgttttactgtggaaattaaaaccacatggatagcttttatgcatcattaatccctcaacaactgagcatatatgtgatatttcttgtatatgtactgatataactaagcttcttgttgtaagaaaatcaccaatcttttcattcaatacagtgatctaggagtagatttcatggcagatgctactgacccatttcctgacttgggaagcgtgtataaagtttccggtcgttgtcaagtaaaccgggatgtagctgacatcaagcttgcttcttcagtggatggaagggagtctaaaaaccgagttgctgcaaattccgggttacataaagattctacatctaatgtatggggacatccaaatttgattcagaaacttaagatgcaaactacttccaatgtcaggccaactgtggatggttcttgtttgagttcgagaagacatggtagtgcatcgacccaacaaggtgctggaacttgccctgttcaagctggtttcactttgcctaacagttcagaaaatagagttgatgaatatgataacaatgaccctgatgttgtgtatgataacgatgatttggatgactatgacttcgattttgatgaagacgagaagagtcatgaagcacgcaagaagagcaaatggttcaatgcattctttgaacgtttagagaaattgactgttgaggagatcatttcaccagctcagcaatggcactgccctgcatgtcaaggtggaccgggagccattgattggtatcgaggtgtacagcctctaatgactcattccatgactaaaatgacacggagagctaagatgcatcgtgtattcgcggaacttttggtcgaggagatgcgtaggagaggaactttcattaaaccggccaacgatgctgttggcaaatgggaagggcttaatgttagagttgcagatcatgaaatagtttggccaccaatggttatcattatgaatacaaaatatgaacaggacgaaaccggcaaggtactttactgctcttggatagtaaactatctctattactaatatactgctaattgctttgtactgactgttatttcattagtggagtgggatgggaaatcaagagcttctcaattacttcagctcatatgctgcgataaaagcgagacattcgtatggtccacaaggtcaccgcgggatgagtgtgttgatctttgagagttcagcagcagggtatttagaggctgttcgtttgcataaacattttaaagaacaaggaagggatagggatgcttgggatcattcacaggtcccattctgtcctggtggaaaacgccaactttacggctacattgccatcaaagaagacttggatgtatttaaccgacactctcaaggtctaatacgctgcaatcacttttgttaaatcgttgtttttgaacttttcttgtgaatgatacaatctatgcgatcaaacagggaattccaagctgaaattcgagctgagatcataccaagagatggttgagagccaaataaagaagataaacgacaatagtcagcaacttacccgacttaaaaagaaggttgctcaagaacagcaacattcacaagtccttgcagagtctctaggccgattgagtgagaagctccaccagacaatagagccgaaaaatcatatcgtgaggcaacgagctatattgcagcatgaacagaacaaagaagaggtagcattttttaactttattgctgcaatttcagtgttctatagctagatatctcttccttattgcaatgcaatggttttccagttgatagctaaagaacaatatttcaaggagaaaatcaatactatttaccaatccatagactgtaaggaagataatttcgagaagctgcaaagggctgcaagtgagagagttaagcaatcaaatatgaatccgatacatgataaagatgaatgcaggtgacattctatctacttaaagctgtaacaacatttattttcttgttctatgttgtgaagagaatttttaacatgtttttgaatgttcagtgccattgagcttcatgagaaaaacataggagagttcaatgcagagagggagaagctgatgaaaagtcgtcaagatagaaggttaacaatcacactacggtattgggaagatcttgtcaagctcgaggaagggtttgaaaaagaatttaccttgcttatggaaaagtacacccacagaatattgcattgaggaacaatagaccactaaatagacaagacatgaacaagagataaggaaatagaagacacaataccaccatgaccattaccattggcacagtgaacagaagcaagacaaacacttgtttgataggtaaatataaaccagttttgttacttgatacacgtttaagttttggaaagagaaaaatggtttatgagggagggaagtttgggtttcatggtgaacactgaaatagtgaaacttcaagtaatgttttttatgcatttttgtttcagatttttggcatttgcccatggtattgtcaacttcaccataaattttttattgtgattttatttatacaataaaatctatactactatatatgtatacatcaaaaaatagttggaaaaagt

SEQ ID NO: 518 - DNA, 5281 bp, Gossypium raimondii
  source 1..5281: mol_type = genomic DNA
ataaatcctatttaattagtttacctcaatgggaagttttgtatgctttcgtcacgagttttgatccgtgacccgtaacactaatgacaacttttaattatacactaactttaatctaatgtgtaatattatgcaaaaattttgattttatttaattttcaccaattactaacacaaatattgatagaacaccattttaagtttgcacattacataaacaaataattatatttatctaatataaaattaaattaatatatttatttatttaaatatataaagttaaattaaaattaaagttttacgtacacatttatagaaataaaacaatatataaaatagtttattttttaaataaaataataatatcatgacttaaataaatataaagaattctatataatttaaaatttcacactcttatgtatgttaagttttgaatgaaaatttataaaggtttaatagtatgataatgatattaaattaaattgaaatcatataataaatatgaattatatcgataaaataataaccgacaaaatattaatggcacaaaatttataaaaaaatataaaatattttaattttatattgaaataattttgatacatcatgagtacataaattttatgcaccatcaataaataataacattgttgacagtgtaggaagatgtaggtttgagtgcgctgaagcgtattatcctcctatttatgaattgaggaggggttatagatagttctaggcattgataggaggataatatatttcagcgcattcgaacttacgtcctcttgtattgataataatacgcatttcaatcgagctaaaactcaatcaacgtatctctattattttttgttttctttaatgataacatattatattattattaatcatcaaatattctccctatgaataattataaagattataacgactacaagtctgaacgtgattcatgcaaacgaagcagaaaatgaaaggaagctcctgtttctatcatcaattaaaacgagtatcacatatctttcacatgaaaaaaagaatatattgaaaataaactataataaatatatatacagacccacacttccggccaaaatattttttacgcataaataaaattaaataatggctttaagaatatttaaaatttatattaattatttaaattttatattgtatatatcataatattaatattttattatcaatgttctttaaaaaaatattgaaaaaaatagaaaataaagaaagtgaaaaaagcgggcatgcaatggactatctacgtggaagtaaatctgcgatatttatgtacttacagtcgtgaaaagggtccccattctcgactcagtggggggacgcggccgtctggtcatttccatcactcacaacgcgcgtgcgtctcacatcccttcttccatgattaatgatttctgagtttctcatttttagactctctcttgttctccacaggcacctgttctttttttttttcgctcttcaaactctatcctggtaaaaatacccaccttttttgttttggtaaaaagcatgtcttttgttaaatgttaatgtattcttccatgagagtttcaaagagaataaagagttgtttttacgtgatgatctcatgttcttaatggttgaaacttgaaatctttgtttgttttgcacatgaattgtttgtataaatgcatgtgttgatgtcatttgattggcttttgagttattcaaacaggatgaataaacggaggtattgttcttctttttttcggctgaataacttgtttattttcgtattttatgcattggaaaacgttacgttttgaaaagatcttacttttttccttattatatgcaagttttatgtttcttttttgagtactgatttacaattgttttaaattaaatctgccatagctactttgctgcttgttcttgctcatgattggctaaaagaaagataggtgggtttcgatttaaatcttactggtaagattccatgtaaattggaagtagctagctgattgatcctagagagaattatccaattcatttgatttcaaaacggtattgtttgaagtgcttaccatttgcatatatatatatatatatatatatttacaaataagttatcatttatttccgttttatctatttataatttttttagattcgtaactactcttctcaatatcaacatgtcgtgcaatccactatttacattttaagatccatattatatgttttgtttcatagattttctttctttaattatgacgcataaccttgacgttcaaaatataattttgaataatctaattcaattattcaaccatttcattatatcaaattttatattaatcgtattaattgatatttatatatttcggtacaataacaatatgttatttgtaacactagtcttattagtcagttaattgatcatattttgttcatgaaaaggggtttgattggtattagtgtggatacaacaaaatattaccgatctaataagcatcttgtattagaacttagaaaggaattaatcttatatgatatgaaattttgactattcatgagtgtgctcaatatggatataccccacagtgatccttggtagtaaataattttagctgatggaaaatcgtagcattttgttttgttcttccttggaaaagaagagtaacgtttggtctagtacttttaatgttgggacgttttactgtggaaattaaaaccacatggatagcttttatgcatcattaatccctcaacaactgagcatatatgtgatatttcttgtatatgtactgatataactaagcttcttgttgtaagaaaatcaccaatcttttcattcaatacagtgatctaggagtagatttcatggcagatgctactgacccatttcctgacttgggaagcgtgtataaagtttccggtcgttgtcaagtaaaccgggatgtagctgacatcaagcttgcttcttcagtggatggaagggagtctaaaaaccgagttgctgcaaattccgggttacataaagattctacatctaatgtatggggacatccaaatttgattcagaaacttaagatgcaaactacttccaatgtcaggccaactgtggatggttcttgtttgagttcgagaagacatggtagtgcatcgacccaacaaggtgctggaacttgccctgttcaagctggtttcactttgcctaacagttcagaaaatagagttgatgaatatgataacaatgaccctgatgttgtgtatgataacgatgatttggatgactatgacttcgattttgatgaagacgagaagagtcatgaagcacgcaagaagagcaaatggttcaatgcattctttgaacgtttagagaaattgactgttgaggagatcatttcaccagctcagcaatggcactgccctgcatgtcaaggtggaccgggagccattgattggtatcgaggtgtacagcctctaatgactcattccatgactaaaatgacacggagagctaagatgcatcgtgtattcgcggaacttttggtcgaggagatgcgtaggagaggaactttcattaaaccggccaacgatgctgttggcaaatgggaagggcttaatgttagagttgcagatcatgaaatagtttggccaccaatggttatcattatgaatacaaaatatgaacaggacgaaaccggcaaggtactttactgctcttggatagtaaactatctctattactaatatactgctaattgctttgtactgactgttatttcattagtggagtgggatgggaaatcaagagcttctcaattacttcagctcatatgctgcgataaaagcgagacattcgtatggtccacaaggtcaccgcgggatgagtgtgttgatctttgagagttcagcagcagggtatttagaggctgttcgtttgcataaacattttaaagaacaaggaagggatagggatgcttgggatcattcacaggtcccattctgtcctggtggaaaacgccaactttacggctacattgccatcaaagaagacttggatgtatttaaccgacactctcaaggtctaatacgctgcaatcacttttgttaaatcgttgtttttgaacttttcttgtgaatgatacaatctatgcgatcaaacagggaattccaagctgaaattcgagctgagatcataccaagagatggttgagagccaaataaagaagataaacgacaatagtcagcaacttacccgacttaaaaagaaggttgctcaagaacagcaacattcacaagtccttgcagagtctctaggccgattgagtgagaagctccaccagacaatagagccgaaaaatcatatcgtgaggcaacgagctatattgcagcatgaacagaacaaagaagaggtagcattttttaactttattgctgcaatttcagtgttctatagctagatatctcttccttattgcaatgcaatggttttccagttgatagctaaagaacaatatttcaaggagaaaatcaatactatttaccaatccatagactgtaaggaagataatttcgagaagctgcaaagggctgcaagtgagagagttaagcaatcaaatatgaatccgatacatgataaagatgaatgcaggtgacattctatctacttaaagctgtaacaacatttattttcttgttctatgttgtgaagagaatttttaacatgtttttgaatgttcagtgccattgagcttcatgagaaaaacataggagagttcaatgcagagagggagaagctgatgaaaagtcgtcaagatagaaggttaacaatcacactacggtattgggaagatcttgtcaagctcgaggaagggtttgaaaaagaatttaccttgcttatggaaaagtacacccacagaatattgcattgaggaacaatagaccactaaatagacaagacatgaacaagagataaggaaatagaagacacaataccaccatgaccattaccattggcacagtgaacagaagcaagacaaacacttgtttgataggtaaatataaaccagttttgttacttgatacacgtttaagttttggaaagagaaaaatggtttatgagggagggaagtttgggtttcatggtgaacactgaaatagtgaaacttcaagtaatgttttttatgcatttttgtttcagatttttggcatttgcccatggtattgtcaacttcaccataaattttttattgtgatttta

SEQ ID NO: 519 - DNA, 3387 bp, Gossypium raimondii
  source 1..3387: mol_type = other DNA
tgtactactaaatgtcgattttatgacatcttactataggattgtgttagaggatgagttcaagaaaagggaatgggaatccttttgtttctggtggtattaacaacccatcgtccaaggggaaagacatatctggatcctctagctccaaggttgagcagctaagccagggtgtagcagacatgaacctgggtttgcctcaagacgatggtgagtgggaggttattcaaaggaagcctaagaatagaactggaagcagtgctgcaagaccttggggtcctcaaaattccaatggtaaaccgcggggagcgatgcggactaatgctgtatcaggaagagcctctggcaatgcttgggatgctcataatactgattctaggatggcaactggcagaggaaatgcaagaccccaaacatgcaacaaggctattgagaacaacaatgtgccaccacatcctgtcattcgcccaccccttcagtatggatggaattggcaatctagaactggttccaatccatcgggggggttacaagatgatcatggaaaaaacaatgtcaacactgaggttgaagaggtcaatgatattgatgatgttgaggatgactcggatgataatgctattgatgattctgatgatgaacttctaaccgatgactttgattcagattcaagtcaaaagagccacgagacaagaaagaataatagatggtttaagaagtttttctcgagtttagatgcattgagaattgaggaaatcaacgacccagcaaggcagtggcactgcccagcatgccagggtggtcctggtgccattgactggtataggggccttcagcctctgatgacacatgccaaaacaaaaggagcaaaaagggtgaaactccatcgtgaacttgctgaactcttggatgaggaattgtgtagaaggggtacttcagttattccttcaggtgaagcttttggcaaatggaagggtttaaaagatgaagaaaaagatcatgaaatagtctggccacctatggttatgataatgaacacaaggctggaacaagatgagaacgataaggtactgcaatatcttttgcaatttttattttctgatatactaaaataatgaagctaattgtttctattttcagtggaaatactcgtttcctgtctcctgctctaacttttaactttttatttattgtattatacttcagtggattggtatgggaaaccaagagcttcttgattatttcagctcatatgctgctgtgaaggctcgccactcgtatggtccacaggggcatcgtgggatgagtgttctgatttttgagagcacagctaggggttatttagaagctgaacggctacataagcattttgctgagcaaggaacgcatagggaggcttgggaacgacgtagggtcttattttatccaggcgggaagcgccaactttatggttatatggctatgaaggaagacctagacagcttcaaccagcattctcaaggttctctctatttaacagaagacaacgattatattacatgcagggataaaatgcaagatagctttaaatgcatgagatttttctgtatttttttcttcacaaataagtagccctgcagatacttaggcagttgactgacgtgctgtataactgatctgttgattaggcaaatctaggctgaaatttgagatgagatcctatcaagagatggttgttaagcagatcaggcaaatgagtgaggacaaccagcagcttattttttacaagaacaaggttgcaaaagaacaaaggcaaaaagttgctcttgaagagtcttttggtattgtgagtgagaggctccggaagacaatggaggagaacaggattgtaagacaaagaaccaaaatgcagcatgaacagaataaagaagaggtaattacttcaaatcttcacatgcctgttgccggacatttggtcctggtgtattagttagtaaatttatactgtagtacatattagtaacctactggtttgggatatcttataggattgattaataatgcatgtttgccataatcaatatttgcttgctggccttccttttcctggatcatggtttttgggttgacatgctcagtatctgggactttcaaagttggcgtacctacatgccccttggtagcaacagcatgtcaagcgtccacttgcccttgggttccaaatccaggtgtttattttaggtggcacctatttttatggtattttttggtctggtttcgaaatttttaattcggtaactttatgcccatggtttcctgcccannnnnnnnnnnnnnnnnnnnnnnnnnnnnnnnnnnnnnnnnnnnnnnnnnnnnnnnnnnnnnnnnnnnnnnnnnnnnnnnnnnnnnnnnnnnnnnnnnnngttcaagtagacgaagaagagcatgctattgtcctccctgggaattttctacttgatagaatagtaattcttgttctgcttcatgttaactgtgtttcttcttttgccctttccagatggatttccaagagcaattcttcaaggaacgaatcaaatttatccatgaagccagggatgagaaggaagagagttttgagaagctgcagcagcaacagcgtgagaaggtcaagcagtctaaccccaatccttcaaatacagaggaatacaggcgcaggtacataattttgatacttctgtgaatttccttgtgtaatttgattgatactggtaatcttacagtatatgaccgtttcacattaaaacagatggtttaatctcataagatgaaatgctgctagatatctcttttctgtttacctgttgaagttatatgagatatttgtgtatttttcttttcatatcttttgaaaaattatttgtagggcggatgaaattgcaaaattcataaagttccaggatgaagagatgcaggcttttgtggcagagagggacaagctgatcaaagcacacgaagagaagatggttggcatgagagagaggcattggcaggaagaagttgagcttgaaaaggagtttgatgctgaattgagccacctcatggagaagtacactccggatggctcaaaagtcaaccccggcaatacttgattgtggaattgtaggggaatgcgatggtatgtacacatgtggtaaaaaagactttaatctctctgttccctgaggaaacttctgtgatgacactgaatatttctccatcttgagttacaactcctaaaatagtatgttaaaagattggaatatatgggtaaaaaaaagttaaatctaaagttgcatctatggtttattatgcttgtgttgtttgcttagacatggttcaaataagaacttggaatgaatctacgatttctttcctaatatgttgcaa

SEQ ID NO: 520 - DNA, 5959 bp, Gossypium raimondii
  source 1..5959: mol_type = genomic DNA
taatttgaattgaaggaaatcatttttgcttaaagtattgttttattttggtttagcctttcgaaaattagtttggggtttgagtttcaaaacccgttttgacttaaattagtttggagtttgtattaggggtgtgtaaaattcggataaaaccgaaaaaattcggttaaccgaccgattccgaaaaaattcgattaaccgaccgaattaggttaatcggtcggttaaccaaattttttcggtcgggggtcggttaattattttttgatttttcagttaacggttaattcgcttcgaaaccagtcggttaaccgaattttttcagtttaaccgaaaaattaataaataaaattataatatataaataggtccactattcacctaaacccaatccaaacccaagtattcaacctaacccaattacccaacccaacacaatcataaaaagaacaaataatttaataaataaaaataaaattctaaaacaaaaactaaaactaaagtctaaaagtctaaaaataatttaattatgtagtgattcaattcggttaattctggtaattcggttaattcgggtaattcggttaatttttgatcaaaaataaaaaatatataattttcggttcggttaattttttttgaaaaaatttcggttcggttaaaggttaaaaattttgaaaggtcggttaattcagttaatattattttggggtggttaaccggtcggttaaccgaatgaacacccctagtttataccgtgaaaagtgtaagtttccataattaatataaattcctgttttttaatcttgtaattaccctaaactaataaatttgatataactcctaatttttttttaaaaaagaagttatataaaactatattggttaagttaatttgacatttcatgatgttttccttacactttaatgggttaaccgctcaaaattttcaattataagctgcgaaaattcgtgtgaaatttaacaaaaatttcaaaataaaaatgactagttaaaattgatattatataggtcttttgttcgtactacttataccaattgaaagctctcttctcttctattattcaatattttcattaaacagttttggatgtcacgaatctacaaacatataatctttttctccaacttccgacactaatcatcaaatcaacttggatttaaataatgttcttctactcattgataggaactaatttaccgaacagattgccgaattgtaatttagagctctttggtaaaactttttaaaaaaaacttaacctaataactcaaataaaaacttttgagtagttcagtgacttaaatgaaaattttgaaataattcagcgagcaaattataacctttgtaattaagtaaccaaaacaaaaatttagccataatttagtgactaattccgtagtttatccaaatttatatttattatcaattcaacacccgtcgatgttattggtgatacaaatgaaatgacgcttaaaatgctttccagatactagctaacccaaaaactttcctgctcatttcattttccaagccgacactcactctccactctcatactgtcgctactctgctctactccacaaccctgtctcgccttaccggccccgcacctccacacgctctatgcttacactgcgccccctgcgtctaccctattattagaggtaaatttattggcttttcactgtttttgtgaggtaaccctagttttttttttcttagatgtggggtaaattattttctgagtttcttaattatattgcttggttttttatttaacggtttctctgtctcattatggcattgttgttgttattgttgccgctgcagttcgtgctatcatttttgctgttgctctcatttttttttacaggttagccatgtttttcgtgttaatcttgtcatgccctgccatacccatacctaagagttctaacttcaaacagactggcgttgtcaatgatgtattgtggcgtgtagtttgtcttgtttctgtctaaaatttgacatgtttaaaatttcgtgccatgttcatgttttagacttttagttatttcaatcatgtttgagttgagatataacacggatacaccgattgctagctctattttgaggccaacccagtgcattgtgtaaatgttttgatctttgcaagtaaaggttgactgaaatatccttcgtaaggcaacagctttgacgattagggtatagtgatcgtacaaccaatttatagcttgagacacttgctgacaacaccatctacaggcattttcatagttagttgttgtcgatcttgtttatttttaagactatgtactactaaatgtcgattttatgacatcttactataggattgtgttagaggatgagttcaagaaaagggaatgggaatccttttgtttctggtggtattaacaacccatcgtccaaggggaaagacatatctggatcctctagctccaaggttgagcagctaagccagggtgtagcagacatgaacctgggtttgcctcaagacgatggtgagtgggaggttattcaaaggaagcctaagaatagaactggaagcagtgctgcaagaccttggggtcctcaaaattccaatggtaaaccgcggggagcgatgcggactaatgctgtatcaggaagagcctctggcaatgcttgggatgctcataatactgattctaggatggcaactggcagaggaaatgcaagaccccaaacatgcaacaaggctattgagaacaacaatgtgccaccacatcctgtcattcgcccaccccttcagtatggatggaattggcaatctagaactggttccaatccatcgggggggttacaagatgatcatggaaaaaacaatgtcaacactgaggttgaagaggtcaatgatattgatgatgttgaggatgactcggatgataatgctattgatgattctgatgatgaacttctaaccgatgactttgattcagattcaagtcaaaagagccacgagacaagaaagaataatagatggtttaagaagtttttctcgagtttagatgcattgagaattgaggaaatcaacgacccagcaaggcagtggcactgcccagcatgccagggtggtcctggtgccattgactggtataggggccttcagcctctgatgacacatgccaaaacaaaaggagcaaaaagggtgaaactccatcgtgaacttgctgaactcttggatgaggaattgtgtagaaggggtacttcagttattccttcaggtgaagcttttggcaaatggaagggtttaaaagatgaagaaaaagatcatgaaatagtctggccacctatggttatgataatgaacacaaggctggaacaagatgagaacgataaggtactgcaatatcttttgcaatttttattttctgatatactaaaataatgaagctaattgtttctattttcagtggaaatactcgtttcctgtctcctgctctaacttttaactttttatttattgtattatacttcagtggattggtatgggaaaccaagagcttcttgattatttcagctcatatgctgctgtgaaggctcgccactcgtatggtccacaggggcatcgtgggatgagtgttctgatttttgagagcacagctaggggttatttagaagctgaacggctacataagcattttgctgagcaaggaacgcatagggaggcttgggaacgacgtagggtcttattttatccaggcgggaagcgccaactttatggttatatggctatgaaggaagacctagacagcttcaaccagcattctcaaggttctctctatttaacagaagacaacgattatattacatgcagggataaaatgcaagatagctttaaatgcatgagatttttctgtatttttttcttcacaaataagtagccctgcagatacttaggcagttgactgacgtgctgtataactgatctgttgattaggcaaatctaggctgaaatttgagatgagatcctatcaagagatggttgttaagcagatcaggcaaatgagtgaggacaaccagcagcttattttttacaagaacaaggttgcaaaagaacaaaggcaaaaagttgctcttgaagagtcttttggtattgtgagtgagaggctccggaagacaatggaggagaacaggattgtaagacaaagaaccaaaatgcagcatgaacagaataaagaagaggtaattacttcaaatcttcacatgcctgttgccggacatttggtcctggtgtattagttagtaaatttatactgtagtacatattagtaacctactggtttgggatatcttataggattgattaataatgcatgtttgccataatcaatattgcttgctgtcttcctttcctggatcatggtttttggttgacatgctcagtatctggacttcaaagttgcgtactacatgcccttgtagcacagcatgtcagcgtcactgccttggttcaatcagttgttatttagtgcactatttatgtattttgtctgttcgaattttattcggtacttatgccatgtttctgccaatccctaattattactagtaaaagatggtggtggtgatcataaaagttgctgcgtatctaaaatgaaagttccaattggcatttgcatattattactacaaccaatgcttacagggtaaatctagctatttgctaggctcgcatttaaggtatttagtcagactatgagcaacttcggcttgatatagattcatgtgcttaaccatctgttgcatgttggctgatgttcaagtagacgaagaagagcatgctattgtcctccctgggaattttctacttgatagaatagtaattcttgttctgcttcatgttaactgtgtttcttcttttgccctttccagatggatttccaagagcaattcttcaaggaacgaatcaaatttatccatgaagccagggatgagaaggaagagagttttgagaagctgcagcagcaacagcgtgagaaggtcaagcagtctaaccccaatccttcaaatacagaggaatacaggcgcaggtacataattttgatacttctgtgaatttccttgtgtaatttgattgatactggtaatcttacagtatatgaccgtttcacattaaaacagatggtttaatctcataagatgaaatgctgctagatatctcttttctgtttacctgttgaagttatatgagatatttgtgtatttttcttttcatatcttttgaaaaattatttgtagggcggatgaaattgcaaaattcataaagttccaggatgaagagatgcaggcttttgtggcagagagggacaagctgatcaaagcacacgaagagaagatggttggcatgagagagaggcattggcaggaagaagttgagcttgaaaaggagtttgatgctgaattgagccacctcatggagaagtacactccggatggctcaaaagtcaaccccggcaatacttgattgtggaattgtaggggaatgcgatggtatgtacacatgtggtaaaaaagactttaatctctctgttccctgaggaaacttctgtgatgacactgaatatttctccatcttgagttacaactcttaaaatagtatgttaaaagattggaatatatgggtaaaaaaaagttaaatctaaagttgcatctatggttgccttattatgcttgtgttgtttgcttagacatggttcaaataagaacttggaatgaatctacgatttctttcctattatgttgcaatgttttggttaaatgacattgctctttctagattatgggctgcatctttcatgccacttgaaaccaaagctaatcatatgttttgtaaagaaggaaatagaaataatgttatttttggctcggtacgagggctgaaaatttttgggg

SEQ ID NO: 521 - DNA, 6074 bp, Gossypium raimondii
  source 1..6074: mol_type = genomic DNA
acaaatgacaagcgatagaaaaactaaatctcttctctttgatttatcgaatcatagagtggctagccattaatttgaattgaaggaaatcatttttgcttaaagtattgttttattttggtttagcctttcgaaaattagtttggggtttgagtttcaaaacccgttttgacttaaattagtttggagtttgtattaggggtgtgtaaaattcggataaaaccgaaaaaattcggttaaccgaccgattccgaaaaaattcgattaaccgaccgaattaggttaatcggtcggttaaccaaattttttcggtcgggggtcggttaattattttttgatttttcagttaacggttaattcgcttcgaaaccagtcggttaaccgaattttttcagtttaaccgaaaaattaataaataaaattataatatataaataggtccactattcacctaaacccaatccaaacccaagtattcaacctaacccaattacccaacccaacacaatcataaaaagaacaaataatttaataaataaaaataaaattctaaaacaaaaactaaaactaaagtctaaaagtctaaaaataatttaattatgtagtgattcaattcggttaattctggtaattcggttaattcgggtaattcggttaatttttgatcaaaaataaaaaatatataattttcggttcggttaattttttttgaaaaaatttcggttcggttaaaggttaaaaattttgaaaggtcggttaattcagttaatattattttggggtggttaaccggtcggttaaccgaatgaacacccctagtttataccgtgaaaagtgtaagtttccataattaatataaattcctgttttttaatcttgtaattaccctaaactaataaatttgatataactcctaatttttttttaaaaaagaagttatataaaactatattggttaagttaatttgacatttcatgatgttttccttacactttaatgggttaaccgctcaaaattttcaattataagctgcgaaaattcgtgtgaaatttaacaaaaatttcaaaataaaaatgactagttaaaattgatattatataggtcttttgttcgtactacttataccaattgaaagctctcttctcttctattattcaatattttcattaaacagttttggatgtcacgaatctacaaacatataatctttttctccaacttccgacactaatcatcaaatcaacttggatttaaataatgttcttctactcattgataggaactaatttaccgaacagattgccgaattgtaatttagagctctttggtaaaactttttaaaaaaaacttaacctaataactcaaataaaaacttttgagtagttcagtgacttaaatgaaaattttgaaataattcagcgagcaaattataacctttgtaattaagtaaccaaaacaaaaatttagccataatttagtgactaattccgtagtttatccaaatttatatttattatcaattcaacacccgtcgatgttattggtgatacaaatgaaatgacgcttaaaatgctttccagatactagctaacccaaaaactttcctgctcatttcattttccaagccgacactcactctccactctcatactgtcgctactctgctctactccacaaccctgtctcgccttaccggccccgcacctccacacgctctatgcttacactgcgccccctgcgtctaccctattattagaggtaaatttattggcttttcactgtttttgtgaggtaaccctagttttttttttcttagatgtggggtaaattattttctgagtttcttaattatattgcttggttttttatttaacggtttctctgtctcattatggcattgttgttgttattgttgccgctgcagttcgtgctatcatttttgctgttgctctcatttttttttacaggttagccatgtttttcgtgttaatcttgtcatgccctgccatacccatacctaagagttctaacttcaaacagactggcgttgtcaatgatgtattgtggcgtgtagtttgtcttgtttctgtctaaaatttgacatgtttaaaatttcgtgccatgttcatgttttagacttttagttatttcaatcatgtttgagttgagatataacacggatacaccgattgctagctctattttgaggccaacccagtgcattgtgtaaatgttttgatctttgcaagtaaaggttgactgaaatatccttcgtaaggcaacagctttgacgattagggtatagtgatcgtacaaccaatttatagcttgagacacttgctgacaacaccatctacaggcattttcatagttagttgttgtcgatcttgtttatttttaagactatgtactactaaatgtcgattttatgacatcttactataggattgtgttagaggatgagttcaagaaaagggaatgggaatccttttgtttctggtggtattaacaacccatcgtccaaggggaaagacatatctggatcctctagctccaaggttgagcagctaagccagggtgtagcagacatgaacctgggtttgcctcaagacgatggtgagtgggaggttattcaaaggaagcctaagaatagaactggaagcagtgctgcaagaccttggggtcctcaaaattccaatggtaaaccgcggggagcgatgcggactaatgctgtatcaggaagagcctctggcaatgcttgggatgctcataatactgattctaggatggcaactggcagaggaaatgcaagaccccaaacatgcaacaaggctattgagaacaacaatgtgccaccacatcctgtcattcgcccaccccttcagtatggatggaattggcaatctagaactggttccaatccatcgggggggttacaagatgatcatggaaaaaacaatgtcaacactgaggttgaagaggtcaatgatattgatgatgttgaggatgactcggatgataatgctattgatgattctgatgatgaacttctaaccgatgactttgattcagattcaagtcaaaagagccacgagacaagaaagaataatagatggtttaagaagtttttctcgagtttagatgcattgagaattgaggaaatcaacgacccagcaaggcagtggcactgcccagcatgccagggtggtcctggtgccattgactggtataggggccttcagcctctgatgacacatgccaaaacaaaaggagcaaaaagggtgaaactccatcgtgaacttgctgaactcttggatgaggaattgtgtagaaggggtacttcagttattccttcaggtgaagcttttggcaaatggaagggtttaaaagatgaagaaaaagatcatgaaatagtctggccacctatggttatgataatgaacacaaggctggaacaagatgagaacgataaggtactgcaatatcttttgcaatttttattttctgatatactaaaataatgaagctaattgtttctattttcagtggaaatactcgtttcctgtctcctgctctaacttttaactttttatttattgtattatacttcagtggattggtatgggaaaccaagagcttcttgattatttcagctcatatgctgctgtgaaggctcgccactcgtatggtccacaggggcatcgtgggatgagtgttctgatttttgagagcacagctaggggttatttagaagctgaacggctacataagcattttgctgagcaaggaacgcatagggaggcttgggaacgacgtagggtcttattttatccaggcgggaagcgccaactttatggttatatggctatgaaggaagacctagacagcttcaaccagcattctcaaggttctctctatttaacagaagacaacgattatattacatgcagggataaaatgcaagatagctttaaatgcatgagatttttctgtatttttttcttcacaaataagtagccctgcagatacttaggcagttgactgacgtgctgtataactgatctgttgattaggcaaatctaggctgaaatttgagatgagatcctatcaagagatggttgttaagcagatcaggcaaatgagtgaggacaaccagcagcttattttttacaagaacaaggttgcaaaagaacaaaggcaaaaagttgctcttgaagagtcttttggtattgtgagtgagaggctccggaagacaatggaggagaacaggattgtaagacaaagaaccaaaatgcagcatgaacagaataaagaagaggtaattacttcaaatcttcacatgcctgttgccggacatttggtcctggtgtattagttagtaaatttatactgtagtacatattagtaacctactggtttgggatatcttataggattgattaataatgcatgtttgccataatcaatattgcttgctgtcttcctttcctggatcatggtttttggttgacatgctcagtatctggacttcaaagttgcgtactacatgcccttgtagcacagcatgtcagcgtcactgccttggttcaatcagttgttatttagtgcactatttatgtattttgtctgttcgaattttattcggtacttatgccatgtttctgccaatccctaattattactagtaaaagatggtggtggtgatcataaaagttgctgcgtatctaaaatgaaagttccaattggcatttgcatattattactacaaccaatgcttacagggtaaatctagctatttgctaggctcgcatttaaggtatttagtcagactatgagcaacttcggcttgatatagattcatgtgcttaaccatctgttgcatgttggctgatgttcaagtagacgaagaagagcatgctattgtcctccctgggaattttctacttgatagaatagtaattcttgttctgcttcatgttaactgtgtttcttcttttgccctttccagatggatttccaagagcaattcttcaaggaacgaatcaaatttatccatgaagccagggatgagaaggaagagagttttgagaagctgcagcagcaacagcgtgagaaggtcaagcagtctaaccccaatccttcaaatacagaggaatacaggcgcaggtacataattttgatacttctgtgaatttccttgtgtaatttgattgatactggtaatcttacagtatatgaccgtttcacattaaaacagatggtttaatctcataagatgaaatgctgctagatatctcttttctgtttacctgttgaagttatatgagatatttgtgtatttttcttttcatatcttttgaaaaattatttgtagggcggatgaaattgcaaaattcataaagttccaggatgaagagatgcaggcttttgtggcagagagggacaagctgatcaaagcacacgaagagaagatggttggcatgagagagaggcattggcaggaagaagttgagcttgaaaaggagtttgatgctgaattgagccacctcatggagaagtacactccggatggctcaaaagtcaaccccggcaatacttgattgtggaattgtaggggaatgcgatggtatgtacacatgtggtaaaaaagactttaatctctctgttccctgaggaaacttctgtgatgacactgaatatttctccatcttgagttacaactcttaaaatagtatgttaaaagattggaatatatgggtaaaaaaaagttaaatctaaagttgcatctatggttgccttattatgcttgtgttgtttgcttagacatggttcaaataagaacttggaatgaatctacgatttctttcctattatgttgcaatgttttggttaaatgacattgctctttctagattatgggctgcatctttcatgccacttgaaaccaaagctaatcatatgttttgtaaagaaggaaatagaaataatgttatttttggctcggtacgagggctgaaaatttttgggggtgtagctaactgtcagagtttcgaaaaatattgttttttgcacg

SEQ ID NO: 522 - DNA, 5968 bp, Gossypium raimondii
  source 1..5968: mol_type = genomic DNA
ctctttgatttatcgaatcatagagtggctagccattaatttgaattgaaggaaatcatttttgcttaaagtattgttttattttggtttagcctttcgaaaattagtttggggtttgagtttcaaaacccgttttgacttaaattagtttggagtttgtattaggggtgtgtaaaattcggataaaaccgaaaaaattcggttaaccgaccgattccgaaaaaattcgattaaccgaccgaattaggttaatcggtcggttaaccaaattttttcggtcgggggtcggttaattattttttgatttttcagttaacggttaattcgcttcgaaaccagtcggttaaccgaattttttcagtttaaccgaaaaattaataaataaaattataatatataaataggtccactattcacctaaacccaatccaaacccaagtattcaacctaacccaattacccaacccaacacaatcataaaaagaacaaataatttaataaataaaaataaaattctaaaacaaaaactaaaactaaagtctaaaagtctaaaaataatttaattatgtagtgattcaattcggttaattctggtaattcggttaattcgggtaattcggttaatttttgatcaaaaataaaaaatatataattttcggttcggttaattttttttgaaaaaatttcggttcggttaaaggttaaaaattttgaaaggtcggttaattcagttaatattattttggggtggttaaccggtcggttaaccgaatgaacacccctagtttataccgtgaaaagtgtaagtttccataattaatataaattcctgttttttaatcttgtaattaccctaaactaataaatttgatataactcctaatttttttttaaaaaagaagttatataaaactatattggttaagttaatttgacatttcatgatgttttccttacactttaatgggttaaccgctcaaaattttcaattataagctgcgaaaattcgtgtgaaatttaacaaaaatttcaaaataaaaatgactagttaaaattgatattatataggtcttttgttcgtactacttataccaattgaaagctctcttctcttctattattcaatattttcattaaacagttttggatgtcacgaatctacaaacatataatctttttctccaacttccgacactaatcatcaaatcaacttggatttaaataatgttcttctactcattgataggaactaatttaccgaacagattgccgaattgtaatttagagctctttggtaaaactttttaaaaaaaacttaacctaataactcaaataaaaacttttgagtagttcagtgacttaaatgaaaattttgaaataattcagcgagcaaattataacctttgtaattaagtaaccaaaacaaaaatttagccataatttagtgactaattccgtagtttatccaaatttatatttattatcaattcaacacccgtcgatgttattggtgatacaaatgaaatgacgcttaaaatgctttccagatactagctaacccaaaaactttcctgctcatttcattttccaagccgacactcactctccactctcatactgtcgctactctgctctactccacaaccctgtctcgccttaccggccccgcacctccacacgctctatgcttacactgcgccccctgcgtctaccctattattagaggtaaatttattggcttttcactgtttttgtgaggtaaccctagttttttttttcttagatgtggggtaaattattttctgagtttcttaattatattgcttggttttttatttaacggtttctctgtctcattatggcattgttgttgttattgttgccgctgcagttcgtgctatcatttttgctgttgctctcatttttttttacaggttagccatgtttttcgtgttaatcttgtcatgccctgccatacccatacctaagagttctaacttcaaacagactggcgttgtcaatgatgtattgtggcgtgtagtttgtcttgtttctgtctaaaatttgacatgtttaaaatttcgtgccatgttcatgttttagacttttagttatttcaatcatgtttgagttgagatataacacggatacaccgattgctagctctattttgaggccaacccagtgcattgtgtaaatgttttgatctttgcaagtaaaggttgactgaaatatccttcgtaaggcaacagctttgacgattagggtatagtgatcgtacaaccaatttatagcttgagacacttgctgacaacaccatctacaggcattttcatagttagttgttgtcgatcttgtttatttttaagactatgtactactaaatgtcgattttatgacatcttactataggattgtgttagaggatgagttcaagaaaagggaatgggaatccttttgtttctggtggtattaacaacccatcgtccaaggggaaagacatatctggatcctctagctccaaggttgagcagctaagccagggtgtagcagacatgaacctgggtttgcctcaagacgatggtgagtgggaggttattcaaaggaagcctaagaatagaactggaagcagtgctgcaagaccttggggtcctcaaaattccaatggtaaaccgcggggagcgatgcggactaatgctgtatcaggaagagcctctggcaatgcttgggatgctcataatactgattctaggatggcaactggcagaggaaatgcaagaccccaaacatgcaacaaggctattgagaacaacaatgtgccaccacatcctgtcattcgcccaccccttcagtatggatggaattggcaatctagaactggttccaatccatcgggggggttacaagatgatcatggaaaaaacaatgtcaacactgaggttgaagaggtcaatgatattgatgatgttgaggatgactcggatgataatgctattgatgattctgatgatgaacttctaaccgatgactttgattcagattcaagtcaaaagagccacgagacaagaaagaataatagatggtttaagaagtttttctcgagtttagatgcattgagaattgaggaaatcaacgacccagcaaggcagtggcactgcccagcatgccagggtggtcctggtgccattgactggtataggggccttcagcctctgatgacacatgccaaaacaaaaggagcaaaaagggtgaaactccatcgtgaacttgctgaactcttggatgaggaattgtgtagaaggggtacttcagttattccttcaggtgaagcttttggcaaatggaagggtttaaaagatgaagaaaaagatcatgaaatagtctggccacctatggttatgataatgaacacaaggctggaacaagatgagaacgataaggtactgcaatatcttttgcaatttttattttctgatatactaaaataatgaagctaattgtttctattttcagtggaaatactcgtttcctgtctcctgctctaacttttaactttttatttattgtattatacttcagtggattggtatgggaaaccaagagcttcttgattatttcagctcatatgctgctgtgaaggctcgccactcgtatggtccacaggggcatcgtgggatgagtgttctgatttttgagagcacagctaggggttatttagaagctgaacggctacataagcattttgctgagcaaggaacgcatagggaggcttgggaacgacgtagggtcttattttatccaggcgggaagcgccaactttatggttatatggctatgaaggaagacctagacagcttcaaccagcattctcaaggttctctctatttaacagaagacaacgattatattacatgcagggataaaatgcaagatagctttaaatgcatgagatttttctgtatttttttcttcacaaataagtagccctgcagatacttaggcagttgactgacgtgctgtataactgatctgttgattaggcaaatctaggctgaaatttgagatgagatcctatcaagagatggttgttaagcagatcaggcaaatgagtgaggacaaccagcagcttattttttacaagaacaaggttgcaaaagaacaaaggcaaaaagttgctcttgaagagtcttttggtattgtgagtgagaggctccggaagacaatggaggagaacaggattgtaagacaaagaaccaaaatgcagcatgaacagaataaagaagaggtaattacttcaaatcttcacatgcctgttgccggacatttggtcctggtgtattagttagtaaatttatactgtagtacatattagtaacctactggtttgggatatcttataggattgattaataatgcatgtttgccataatcaatattgcttgctgtcttcctttcctggatcatggtttttggttgacatgctcagtatctggacttcaaagttgcgtactacatgcccttgtagcacagcatgtcagcgtcactgccttggttcaatcagttgttatttagtgcactatttatgtattttgtctgttcgaattttattcggtacttatgccatgtttctgccaatccctaattattactagtaaaagatggtggtggtgatcataaaagttgctgcgtatctaaaatgaaagttccaattggcatttgcatattattactacaaccaatgcttacagggtaaatctagctatttgctaggctcgcatttaaggtatttagtcagactatgagcaacttcggcttgatatagattcatgtgcttaaccatctgttgcatgttggctgatgttcaagtagacgaagaagagcatgctattgtcctccctgggaattttctacttgatagaatagtaattcttgttctgcttcatgttaactgtgtttcttcttttgccctttccagatggatttccaagagcaattcttcaaggaacgaatcaaatttatccatgaagccagggatgagaaggaagagagttttgagaagctgcagcagcaacagcgtgagaaggtcaagcagtctaaccccaatccttcaaatacagaggaatacaggcgcaggtacataattttgatacttctgtgaatttccttgtgtaatttgattgatactggtaatcttacagtatatgaccgtttcacattaaaacagatggtttaatctcataagatgaaatgctgctagatatctcttttctgtttacctgttgaagttatatgagatatttgtgtatttttcttttcatatcttttgaaaaattatttgtagggcggatgaaattgcaaaattcataaagttccaggatgaagagatgcaggcttttgtggcagagagggacaagctgatcaaagcacacgaagagaagatggttggcatgagagagaggcattggcaggaagaagttgagcttgaaaaggagtttgatgctgaattgagccacctcatggagaagtacactccggatggctcaaaagtcaaccccggcaatacttgattgtggaattgtaggggaatgcgatggtatgtacacatgtggtaaaaaagactttaatctctctgttccctgaggaaacttctgtgatgacactgaatatttctccatcttgagttacaactcttaaaatagtatgttaaaagattggaatatatgggtaaaaaaaagttaaatctaaagttgcatctatggttgccttattatgcttgtgttgtttgcttagacatggttcaaataagaacttggaatgaatctacgatttctttcctattatgttgcaatgttttggttaaatgacattgctctttctagattatgggctgcatctttcatgccacttgaaaccaaagctaatcatatgttttgtaaagaaggaaatagaaataatgttatttttggct

SEQ ID NO: 523 - DNA, 6040 bp, Gossypium raimondii
  source 1..6040: mol_type = genomic DNA
ctctttgatttatcgaatcatagagtggctagccattaatttgaattgaaggaaatcatttttgcttaaagtattgttttattttggtttagcctttcgaaaattagtttggggtttgagtttcaaaacccgttttgacttaaattagtttggagtttgtattaggggtgtgtaaaattcggataaaaccgaaaaaattcggttaaccgaccgattccgaaaaaattcgattaaccgaccgaattaggttaatcggtcggttaaccaaattttttcggtcgggggtcggttaattattttttgatttttcagttaacggttaattcgcttcgaaaccagtcggttaaccgaattttttcagtttaaccgaaaaattaataaataaaattataatatataaataggtccactattcacctaaacccaatccaaacccaagtattcaacctaacccaattacccaacccaacacaatcataaaaagaacaaataatttaataaataaaaataaaattctaaaacaaaaactaaaactaaagtctaaaagtctaaaaataatttaattatgtagtgattcaattcggttaattctggtaattcggttaattcgggtaattcggttaatttttgatcaaaaataaaaaatatataattttcggttcggttaattttttttgaaaaaatttcggttcggttaaaggttaaaaattttgaaaggtcggttaattcagttaatattattttggggtggttaaccggtcggttaaccgaatgaacacccctagtttataccgtgaaaagtgtaagtttccataattaatataaattcctgttttttaatcttgtaattaccctaaactaataaatttgatataactcctaatttttttttaaaaaagaagttatataaaactatattggttaagttaatttgacatttcatgatgttttccttacactttaatgggttaaccgctcaaaattttcaattataagctgcgaaaattcgtgtgaaatttaacaaaaatttcaaaataaaaatgactagttaaaattgatattatataggtcttttgttcgtactacttataccaattgaaagctctcttctcttctattattcaatattttcattaaacagttttggatgtcacgaatctacaaacatataatctttttctccaacttccgacactaatcatcaaatcaacttggatttaaataatgttcttctactcattgataggaactaatttaccgaacagattgccgaattgtaatttagagctctttggtaaaactttttaaaaaaaacttaacctaataactcaaataaaaacttttgagtagttcagtgacttaaatgaaaattttgaaataattcagcgagcaaattataacctttgtaattaagtaaccaaaacaaaaatttagccataatttagtgactaattccgtagtttatccaaatttatatttattatcaattcaacacccgtcgatgttattggtgatacaaatgaaatgacgcttaaaatgctttccagatactagctaacccaaaaactttcctgctcatttcattttccaagccgacactcactctccactctcatactgtcgctactctgctctactccacaaccctgtctcgccttaccggccccgcacctccacacgctctatgcttacactgcgccccctgcgtctaccctattattagaggtaaatttattggcttttcactgtttttgtgaggtaaccctagttttttttttcttagatgtggggtaaattattttctgagtttcttaattatattgcttggttttttatttaacggtttctctgtctcattatggcattgttgttgttattgttgccgctgcagttcgtgctatcatttttgctgttgctctcatttttttttacaggttagccatgtttttcgtgttaatcttgtcatgccctgccatacccatacctaagagttctaacttcaaacagactggcgttgtcaatgatgtattgtggcgtgtagtttgtcttgtttctgtctaaaatttgacatgtttaaaatttcgtgccatgttcatgttttagacttttagttatttcaatcatgtttgagttgagatataacacggatacaccgattgctagctctattttgaggccaacccagtgcattgtgtaaatgttttgatctttgcaagtaaaggttgactgaaatatccttcgtaaggcaacagctttgacgattagggtatagtgatcgtacaaccaatttatagcttgagacacttgctgacaacaccatctacaggcattttcatagttagttgttgtcgatcttgtttatttttaagactatgtactactaaatgtcgattttatgacatcttactataggattgtgttagaggatgagttcaagaaaagggaatgggaatccttttgtttctggtggtattaacaacccatcgtccaaggggaaagacatatctggatcctctagctccaaggttgagcagctaagccagggtgtagcagacatgaacctgggtttgcctcaagacgatggtgagtgggaggttattcaaaggaagcctaagaatagaactggaagcagtgctgcaagaccttggggtcctcaaaattccaatggtaaaccgcggggagcgatgcggactaatgctgtatcaggaagagcctctggcaatgcttgggatgctcataatactgattctaggatggcaactggcagaggaaatgcaagaccccaaacatgcaacaaggctattgagaacaacaatgtgccaccacatcctgtcattcgcccaccccttcagtatggatggaattggcaatctagaactggttccaatccatcgggggggttacaagatgatcatggaaaaaacaatgtcaacactgaggttgaagaggtcaatgatattgatgatgttgaggatgactcggatgataatgctattgatgattctgatgatgaacttctaaccgatgactttgattcagattcaagtcaaaagagccacgagacaagaaagaataatagatggtttaagaagtttttctcgagtttagatgcattgagaattgaggaaatcaacgacccagcaaggcagtggcactgcccagcatgccagggtggtcctggtgccattgactggtataggggccttcagcctctgatgacacatgccaaaacaaaaggagcaaaaagggtgaaactccatcgtgaacttgctgaactcttggatgaggaattgtgtagaaggggtacttcagttattccttcaggtgaagcttttggcaaatggaagggtttaaaagatgaagaaaaagatcatgaaatagtctggccacctatggttatgataatgaacacaaggctggaacaagatgagaacgataaggtactgcaatatcttttgcaatttttattttctgatatactaaaataatgaagctaattgtttctattttcagtggaaatactcgtttcctgtctcctgctctaacttttaactttttatttattgtattatacttcagtggattggtatgggaaaccaagagcttcttgattatttcagctcatatgctgctgtgaaggctcgccactcgtatggtccacaggggcatcgtgggatgagtgttctgatttttgagagcacagctaggggttatttagaagctgaacggctacataagcattttgctgagcaaggaacgcatagggaggcttgggaacgacgtagggtcttattttatccaggcgggaagcgccaactttatggttatatggctatgaaggaagacctagacagcttcaaccagcattctcaaggttctctctatttaacagaagacaacgattatattacatgcagggataaaatgcaagatagctttaaatgcatgagatttttctgtatttttttcttcacaaataagtagccctgcagatacttaggcagttgactgacgtgctgtataactgatctgttgattaggcaaatctaggctgaaatttgagatgagatcctatcaagagatggttgttaagcagatcaggcaaatgagtgaggacaaccagcagcttattttttacaagaacaaggttgcaaaagaacaaaggcaaaaagttgctcttgaagagtcttttggtattgtgagtgagaggctccggaagacaatggaggagaacaggattgtaagacaaagaaccaaaatgcagcatgaacagaataaagaagaggtaattacttcaaatcttcacatgcctgttgccggacatttggtcctggtgtattagttagtaaatttatactgtagtacatattagtaacctactggtttgggatatcttataggattgattaataatgcatgtttgccataatcaatattgcttgctgtcttcctttcctggatcatggtttttggttgacatgctcagtatctggacttcaaagttgcgtactacatgcccttgtagcacagcatgtcagcgtcactgccttggttcaatcagttgttatttagtgcactatttatgtattttgtctgttcgaattttattcggtacttatgccatgtttctgccaatccctaattattactagtaaaagatggtggtggtgatcataaaagttgctgcgtatctaaaatgaaagttccaattggcatttgcatattattactacaaccaatgcttacagggtaaatctagctatttgctaggctcgcatttaaggtatttagtcagactatgagcaacttcggcttgatatagattcatgtgcttaaccatctgttgcatgttggctgatgttcaagtagacgaagaagagcatgctattgtcctccctgggaattttctacttgatagaatagtaattcttgttctgcttcatgttaactgtgtttcttcttttgccctttccagatggatttccaagagcaattcttcaaggaacgaatcaaatttatccatgaagccagggatgagaaggaagagagttttgagaagctgcagcagcaacagcgtgagaaggtcaagcagtctaaccccaatccttcaaatacagaggaatacaggcgcaggtacataattttgatacttctgtgaatttccttgtgtaatttgattgatactggtaatcttacagtatatgaccgtttcacattaaaacagatggtttaatctcataagatgaaatgctgctagatatctcttttctgtttacctgttgaagttatatgagatatttgtgtatttttcttttcatatcttttgaaaaattatttgtagggcggatgaaattgcaaaattcataaagttccaggatgaagagatgcaggcttttgtggcagagagggacaagctgatcaaagcacacgaagagaagatggttggcatgagagagaggcattggcaggaagaagttgagcttgaaaaggagtttgatgctgaattgagccacctcatggagaagtacactccggatggctcaaaagtcaaccccggcaatacttgattgtggaattgtaggggaatgcgatggtatgtacacatgtggtaaaaaagactttaatctctctgttccctgaggaaacttctgtgatgacactgaatatttctccatcttgagttacaactcttaaaatagtatgttaaaagattggaatatatgggtaaaaaaaagttaaatctaaagttgcatctatggttgccttattatgcttgtgttgtttgcttagacatggttcaaataagaacttggaatgaatctacgatttctttcctattatgttgcaatgttttggttaaatgacattgctctttctagattatgggctgcatctttcatgccacttgaaaccaaagctaatcatatgttttgtaaagaaggaaatagaaataatgttatttttggctcggtacgagggctgaaaatttttgggggtgtagctaactgtcagagtttcgaaaaatattgttttttgcacg

SEQ ID NO: 524 - DNA, 5726 bp, Gossypium raimondii
  source 1..5726: mol_type = genomic DNA
aacggttaattcgcttcgaaaccagtcggttaaccgaattttttcagtttaaccgaaaaattaataaataaaattataatatataaataggtccactattcacctaaacccaatccaaacccaagtattcaacctaacccaattacccaacccaacacaatcataaaaagaacaaataatttaataaataaaaataaaattctaaaacaaaaactaaaactaaagtctaaaagtctaaaaataatttaattatgtagtgattcaattcggttaattctggtaattcggttaattcgggtaattcggttaatttttgatcaaaaataaaaaatatataattttcggttcggttaattttttttgaaaaaatttcggttcggttaaaggttaaaaattttgaaaggtcggttaattcagttaatattattttggggtggttaaccggtcggttaaccgaatgaacacccctagtttataccgtgaaaagtgtaagtttccataattaatataaattcctgttttttaatcttgtaattaccctaaactaataaatttgatataactcctaatttttttttaaaaaagaagttatataaaactatattggttaagttaatttgacatttcatgatgttttccttacactttaatgggttaaccgctcaaaattttcaattataagctgcgaaaattcgtgtgaaatttaacaaaaatttcaaaataaaaatgactagttaaaattgatattatataggtcttttgttcgtactacttataccaattgaaagctctcttctcttctattattcaatattttcattaaacagttttggatgtcacgaatctacaaacatataatctttttctccaacttccgacactaatcatcaaatcaacttggatttaaataatgttcttctactcattgataggaactaatttaccgaacagattgccgaattgtaatttagagctctttggtaaaactttttaaaaaaaacttaacctaataactcaaataaaaacttttgagtagttcagtgacttaaatgaaaattttgaaataattcagcgagcaaattataacctttgtaattaagtaaccaaaacaaaaatttagccataatttagtgactaattccgtagtttatccaaatttatatttattatcaattcaacacccgtcgatgttattggtgatacaaatgaaatgacgcttaaaatgctttccagatactagctaacccaaaaactttcctgctcatttcattttccaagccgacactcactctccactctcatactgtcgctactctgctctactccacaaccctgtctcgccttaccggccccgcacctccacacgctctatgcttacactgcgccccctgcgtctaccctattattagaggtaaatttattggcttttcactgtttttgtgaggtaaccctagttttttttttcttagatgtggggtaaattattttctgagtttcttaattatattgcttggttttttatttaacggtttctctgtctcattatggcattgttgttgttattgttgccgctgcagttcgtgctatcatttttgctgttgctctcatttttttttacaggttagccatgtttttcgtgttaatcttgtcatgccctgccatacccatacctaagagttctaacttcaaacagactggcgttgtcaatgatgtattgtggcgtgtagtttgtcttgtttctgtctaaaatttgacatgtttaaaatttcgtgccatgttcatgttttagacttttagttatttcaatcatgtttgagttgagatataacacggatacaccgattgctagctctattttgaggccaacccagtgcattgtgtaaatgttttgatctttgcaagtaaaggttgactgaaatatccttcgtaaggcaacagctttgacgattagggtatagtgatcgtacaaccaatttatagcttgagacacttgctgacaacaccatctacaggcattttcatagttagttgttgtcgatcttgtttatttttaagactatgtactactaaatgtcgattttatgacatcttactataggattgtgttagaggatgagttcaagaaaagggaatgggaatccttttgtttctggtggtattaacaacccatcgtccaaggggaaagacatatctggatcctctagctccaaggttgagcagctaagccagggtgtagcagacatgaacctgggtttgcctcaagacgatggtgagtgggaggttattcaaaggaagcctaagaatagaactggaagcagtgctgcaagaccttggggtcctcaaaattccaatggtaaaccgcggggagcgatgcggactaatgctgtatcaggaagagcctctggcaatgcttgggatgctcataatactgattctaggatggcaactggcagaggaaatgcaagaccccaaacatgcaacaaggctattgagaacaacaatgtgccaccacatcctgtcattcgcccaccccttcagtatggatggaattggcaatctagaactggttccaatccatcgggggggttacaagatgatcatggaaaaaacaatgtcaacactgaggttgaagaggtcaatgatattgatgatgttgaggatgactcggatgataatgctattgatgattctgatgatgaacttctaaccgatgactttgattcagattcaagtcaaaagagccacgagacaagaaagaataatagatggtttaagaagtttttctcgagtttagatgcattgagaattgaggaaatcaacgacccagcaaggcagtggcactgcccagcatgccagggtggtcctggtgccattgactggtataggggccttcagcctctgatgacacatgccaaaacaaaaggagcaaaaagggtgaaactccatcgtgaacttgctgaactcttggatgaggaattgtgtagaaggggtacttcagttattccttcaggtgaagcttttggcaaatggaagggtttaaaagatgaagaaaaagatcatgaaatagtctggccacctatggttatgataatgaacacaaggctggaacaagatgagaacgataaggtactgcaatatcttttgcaatttttattttctgatatactaaaataatgaagctaattgtttctattttcagtggaaatactcgtttcctgtctcctgctctaacttttaactttttatttattgtattatacttcagtggattggtatgggaaaccaagagcttcttgattatttcagctcatatgctgctgtgaaggctcgccactcgtatggtccacaggggcatcgtgggatgagtgttctgatttttgagagcacagctaggggttatttagaagctgaacggctacataagcattttgctgagcaaggaacgcatagggaggcttgggaacgacgtagggtcttattttatccaggcgggaagcgccaactttatggttatatggctatgaaggaagacctagacagcttcaaccagcattctcaaggttctctctatttaacagaagacaacgattatattacatgcagggataaaatgcaagatagctttaaatgcatgagatttttctgtatttttttcttcacaaataagtagccctgcagatacttaggcagttgactgacgtgctgtataactgatctgttgattaggcaaatctaggctgaaatttgagatgagatcctatcaagagatggttgttaagcagatcaggcaaatgagtgaggacaaccagcagcttattttttacaagaacaaggttgcaaaagaacaaaggcaaaaagttgctcttgaagagtcttttggtattgtgagtgagaggctccggaagacaatggaggagaacaggattgtaagacaaagaaccaaaatgcagcatgaacagaataaagaagaggtaattacttcaaatcttcacatgcctgttgccggacatttggtcctggtgtattagttagtaaatttatactgtagtacatattagtaacctactggtttgggatatcttataggattgattaataatgcatgtttgccataatcaatattgcttgctgtcttcctttcctggatcatggtttttggttgacatgctcagtatctggacttcaaagttgcgtactacatgcccttgtagcacagcatgtcagcgtcactgccttggttcaatcagttgttatttagtgcactatttatgtattttgtctgttcgaattttattcggtacttatgccatgtttctgccaatccctaattattactagtaaaagatggtggtggtgatcataaaagttgctgcgtatctaaaatgaaagttccaattggcatttgcatattattactacaaccaatgcttacagggtaaatctagctatttgctaggctcgcatttaaggtatttagtcagactatgagcaacttcggcttgatatagattcatgtgcttaaccatctgttgcatgttggctgatgttcaagtagacgaagaagagcatgctattgtcctccctgggaattttctacttgatagaatagtaattcttgttctgcttcatgttaactgtgtttcttcttttgccctttccagatggatttccaagagcaattcttcaaggaacgaatcaaatttatccatgaagccagggatgagaaggaagagagttttgagaagctgcagcagcaacagcgtgagaaggtcaagcagtctaaccccaatccttcaaatacagaggaatacaggcgcaggtacataattttgatacttctgtgaatttccttgtgtaatttgattgatactggtaatcttacagtatatgaccgtttcacattaaaacagatggtttaatctcataagatgaaatgctgctagatatctcttttctgtttacctgttgaagttatatgagatatttgtgtatttttcttttcatatcttttgaaaaattatttgtagggcggatgaaattgcaaaattcataaagttccaggatgaagagatgcaggcttttgtggcagagagggacaagctgatcaaagcacacgaagagaagatggttggcatgagagagaggcattggcaggaagaagttgagcttgaaaaggagtttgatgctgaattgagccacctcatggagaagtacactccggatggctcaaaagtcaaccccggcaatacttgattgtggaattgtaggggaatgcgatggtatgtacacatgtggtaaaaaagactttaatctctctgttccctgaggaaacttctgtgatgacactgaatatttctccatcttgagttacaactcttaaaatagtatgttaaaagattggaatatatgggtaaaaaaaagttaaatctaaagttgcatctatggttgccttattatgcttgtgttgtttgcttagacatggttcaaataagaacttggaatgaatctacgatttctttcctattatgttgcaatgttttggttaaatgacattgctctttctagattatgggctgcatctttcatgccacttgaaaccaaagctaatcatatgttttgtaaagaaggaaatagaaataatgttatttttggctcggtacgagggctgaaaatttttgggggtgtagctaactgtcagagtttcgaaaaatattgttttttgcacg

SEQ ID NO: 525 - DNA, 4795 bp, Gossypium raimondii
  source 1..4795: mol_type = genomic DNA
ataattacgaattaacatctaattaatcaataatacgaatagtttaagaaattattttaataatataatattaaataatataataaaaactattttagtggataaatttcaccataatatatgtctcaatttatttgtgctttgtgtgcagatatatattttttaatgtggttttaagataaacggtaaatttattgaaaataaagctatataaatattgaaaacatattaatatgaatattatactatttagttaaaaattttatttaattttgattcatgcatcaaactccttcaaatacaatatatatagttttatatgaattgatatcaatgataaaattaaaaaaaatttataaaacacaattatcttttagatttatattatattaatattttaaagtaatttatatttaatataatattaatttcataaaaaattaataatattgataattttcaaaaagagaatttaatgaaataattgcactagacatcttttaattatgactcgaattcttttcattaaaaaaattaaaagaaatcatggaaacctaaaaaggagataaataacaaagaaaaaaaagggttatatcaaaaaaaaattttaacttagtaacttttttatattagggctgaatttttttttgtgttcaagttaagtcctgagctttataaatactttcatatcgaagtttgaattttttctttttagttaagttaatccttgaaaacttcaatataaaaatagttgttaagctcgagtttcaaatagtgatttaaaaagatgtcatgatcttggtaccctaaaaatttgatgagaacaaagaaaaagaaaatgacaaacaaataaacaaaccacacatgatctcgagacattttcaattgtgtttcccagagtcacttatcactaaatcagaatcaatttttaaattgatcattatatttcaaagcaatttaattgagtttttaaaatattattatcgcatcaatcatgtcattttcttagcttaccgttaacgtgagtcttaaatgtgagttcaattgatgttgagcatatttaaaacacacaaatcaaatgttaaacacattatatctgttatataaacaatttgaatttaacgtgctaactaaaatatattatatcattaaaatcaaaatgacttttttaataagtcaaaatacaagagttaatttgtaaatttatcattttaagggccacctaccattggtgtcaccctcacattaaatctaagctataaatgtcatatatgtgaacatattttaaatttgatccacatattttgaatatgtacaccacgtcatatttgagttgacatttaaaattacgcttaacaattaagttaacaaaaagatccgattgatacgagacagatatttttaaattcaattaaaacattttgaaattaattttaaatttaaatatgtcattggtgacatatgctatataaatatattaattttagaaaatactaaggccttggctttcaaaatttttcttcttgaaggaaaaaaaagaaaaagaaaataaaaactgtcttatttggctctcgaatccctcccattttccgccatggaagcaccttgagaaaccctaactggatccctttcacgttcttcgctaagctcaagcaaacggcaaatgggttctcttgtgcctttccaagacctcaatctctgcccggaaccaccgctaccagccaccgtgaacatctccacctccgccacacctagcgccaccatcaacaggacaaccaccttcaatttcttaacaccgaagattgaacctaagcaagagcctttcgacgaaccaacaccaacacagactattcaccaacaagaaaactttctcttctctgtttccaattctacccctgatttcatccctaatcccgaaactacccctccggctaacgcttcctcttcagccgatgaccaaaacgctctctactccgaatatttccgaatctccgagcttttccgctctgcttttgctaaaaggatacaaaaatacggcgatgtcgaagtacttgacccggattctcgggccatcgtacccgtacccgaacagtctcaactaacccccgaaactagcccaaccgacggttccaacctggaacgagctttatccgtcgtcgtttcgcgtaagaaggcgggaagatccaatgagctggttcgggttacgaatttgggaatcgatgaccagaggcattttcgtgaccttgttcgaagaacccgaatgatgtacgattccctccgcgttttagtcatttcggaggaagaaaagagaaccggaccgggaaacggtcgacgggctcgcggagatttgagggcagctgccgtcatgagggatcgagaactgtggttgaatcgcgataaaaggatagtgggtgcaatcccaggtattgaaattggtgatgtattcttctttagaatggagctttgtgtggtggggttacatggacaaattcaagctgggattgatacattgcctgctagccaaagctcgagcggagagccaattgcaactagcattattatttccggtgggtacgaggatgatgaagattccggtgactcgataatatataccggccaaggtgggcaagataaatttggaaagcaatgtatgcatcagaagcttgaaggagggaatttggcactagaaaggagtatgcattatgggattgaggtaagagtgattagagggtttaaatatgagaatcgagtttcgggcaaagtgtatgtttatgacggtttatataagattcttgattgttggtttgatgtgggaaagtcagggtttggggtttacaagtttaggttgtcgagaattgaagggcaacctgagatgggtagttcgataatgaagtttgctgagagtcttaggactaagcctttgtctactaggccaatggggtatttgactcttgatatttccatgaaaaaggagagagttccgatctttctttataatgatattgataatgatcatgatcctatgtattatgattaccttgtgaacactgtgttccctcttaatgtatttggtcaagggagtaatagtactggatgtgattgtgtttcggggtgcacggaagggtgtttctgtgctatgaagaatgggggtgattttgcttatgattatggtggaattctcttgagagggaaaccggtgatatttgaatgtggaaacttctgtcaatgcccaccatcttgtcggaaccgtgttgcacaacatgggcttagaaacagattggaaatatttaggtcaagggaaacgggttggggagtgaggtccttggacttgatacaagcaggtgcttttatatgtgaatatgcaggggttgttctcacaagggaccaagcggaagttttcaagatgaacggtgatactttgatttaccccaatcgtttttctgaacgatgggccgaatggggggatttgtctaggatatttccagagtacgtgtgtccatcatatccctcaatcccacctttggattttgcaatggatgtatcaaggatgaggaatgctgcttgttatattagccatagttccagtccgaatgtgctggtgcagtgtgtgttgtatgatcacaacaacttgatgttccctcaccttatgctttttgcaatggagaatatccctcctatgagagagcttagcatagattatggtgtagccgacgaatggactgggaagctttctatctgtaactaaatatcttaagaggaatattttggattttgatgtggtgcagccgggcagtgagacatgataaactgaggtgagcttaacttccaagcatttccaattgtatatatatttatttaaaatcataataatttgtggtgtggccttcctatatttagatattgatttttgattttgtatttctcatgctttcttgtagtctagttgcctgccatgcctgtttgtaggagctaggaatgttattcctttgtgcaacttcatggtgtatacctcaagtagtcagccatatgcaggaggatggaacatttggcacttatagttctaaatgaatgcagttgcttatctcctaagtgcatgttttgttctccagagcaatgtactttctttttttttttgtaatatatatgttgttgtattagcccacatcttgtttcgccttccctgtccaactctactgtttatgtctgcctcaattctatgaatttattcttttcaattgttcctgctcgtaaattttaagtgccgtgatcaacaaagttgttatttggttagttcattattggattcttccttgactagccaaacaggtcattcggttttacaagagtttgtgacaaattgatttgtcatctgtaagggaggactttagctgaaggtagcctcataaagtttaaacaaaatttgagtgtttaaagcttcagtactgcttaagaaacatagggttttatgcaacagccttttccaccctgaataatgccattggcaatgtgctattgttactttgttttgattccttgtcctagaattttttgaatctctacaaagttattcatagattagaacaaatcttcatcagttgccttatgagtaaaatgccataggcttgtatctcatgtttatcataaactatctgtttaaaagccataggaacgtgcttatattcagatcttttcctgtttactaagttgatgctataattaaccacatatagtattagagattccacatgttctgttaatttggaaagtgagctgtcgtaaaacgtctgataccggg

SEQ ID NO: 526 - DNA, 14377 bp, Gossypium raimondii
  source 1..14377: mol_type = genomic DNA
aaattatattaataattatcgatttaaattcgtaatatataaacattaaaaggcaattagtaacgatattcaatgatcatatattctcattgaaaatcaatatataattaataacaatattaaaaaaaataaaaaagtaaaaaaatagcaaaaaaactgacttccggacgcgaccctccaaattcgtcacccagtaaggtacgactaagggacgattttcatcaatgttgacgttgtgcaaaagagttggactcatccatagtttcctcaataatgagggcaaattcgtcatctagagatttcactcaattagatatcctggatcgcgctaccgccaactcggcgggtcaagttcggttatgtttgtattcttcaacctgcttatttattcttcaccaaccatttagttgttaattagtttttaaataatatataatttttttgaataaataatatataaatttaaaattatataaaaagataaaaaataatattaattttaaaaaataaaaagtatcctaaattatatacataaaaataccaatgataatatacaaacaatgttataaaataatatataataatataagcagtattttgcataaatatatacaaaaaatatatcataataaataaataaaattatcatggttagatatatatattattttgtaaatcgataattatgaataaatcatatttatattatatacagaggcgaatttaggatgcttgcataagcccagcccaacccccctaaaatgaaaaattactatttagatcatttaatttttttaattttaaattaataaagataaaattgcacattaactcgtataaaattaaaaaaaatttgatttaatcttttaaaagttataaagatatagactataaaaaattaaaatttcgttcagcccctttaaagaattgttctggcttcgccactggttgtatatattaatcatatcaaccatacatccataaaaagcaatatacatcatatacatacgtcaaaattactattttttattataatatttatttcaaataataaataataaataataaaattaaaattattatgattatcacaaatttgttttaattataactattatcatattttttgatttttttaaaattaataattatttttaaatgtaaatttagtaatataatgaaaaataaaatatattttggtaagttccaaattcgtgcttatatattacagttaaataatattttatttaattttaaatttaatatttatttacaaattaacacaaagaataaagaatagaaaaaagagaggataaaaatgaaaacaaatcgggtattttctaaacgaaaaaggggtcagttcgggtttattttttacacccgaacccggcatgattcactaaaagagcgtgtccatttttacacgtccccgaacattgcgtcatcatctgcttctattataaaatgggctcattcattcctagcctctctgtactcaagagtcaagagtgtcgtttgtttcattttttgtcccttctgttttggagtttttgaaattttcatctgtttgcttagttttccaaatttccggcaatgtctggccgaggcggtggtgaacgtggcagtggtcggggtggtggtcgacgtggccgggggcagggccgtggtcgcggtcaaccttcgcagtcttcctctcgcggcggcggcggtagagcaagaggccgtggatcatctggttctactgcaacttataatccccctcctcctcaaatggctccggctcagccacctcctcaaatggctgtagctacgccagttcctccatcgggggcccctttttctcatccttcttcaagttctggtgtaggatcactttccagagaggtatcggagaagcttacaatggagccggtggctgtgactacggcgcctcctcttcctccgtcgtcgtcaaaggcgattaggttccctccaagaccggggttcggcacggtcggtacaaagtgtgtggttagggccaaccattttctcgtagatgttgctaatgccgatcttcatcactacgatgtaactttctttctcgcatgtctccctatttgattttaagcctgtattttttctcgacatttttggcttgttgttctaatcggttttttttttttatatttgttaaaattttctttcttttttgcttgtatatgtctgcttccttccttttgacctatctatggatttaagttttcagtaattactttgaaaaaccgagggaaaccttcactgttaatggcttgcttaaacgaattccacttgtttagatcatattttttgaattctaatgttttcatgtttctgttctcttattcatttaccttgttcatccctgatacttgcattttcttctccaatattttaatcgctagttttccttgtcatttttctgccttgttttaatcgttttatattttggcacttcttagagctctgttttttatccgactttactatacactgaaggttttagtagttgcttttccttaaaaaaacccaagggaaagtttaactgttaatgatttgcttgactgagttgggctttttgttatttattgtctcgttaaattttattttcattggattttaatgtgtattttactcatctgttttcttatttatttacttgtctctttgtccatctctgttacttgcatcttcttctcgtctcttttgatggcctttggtgcttcattgcttataggttactataacgcctgaggtaaccgcaaaaaaggttaacagagcaataatgaagcaacttattgatgtatacaaagagtcgcatcttggacgtcggtgtccagcttatgatggcaggaagagtttgtacactgctggtcctcttcccttcgagtcaaaggagcttgttatcaagctacctgaggaagatcgcagtgctggttcgtctaggcctgcgcggtaatattattgtatcctatgatggtctcatgacattttacattttatccgatgtcattattgcttacctgtgatctttctggttgcctgtcactgcaggaaggagcgacaatttaaggttgcaatcaaattggcctccaagccagaccttcattatctgagggagtttctgagcagaaagcattttgaatgccctcaagaagctattcaagttctggatgttgttcttagagctaaaccatctcagacgtaactgcctgttgattgctgttaaacattgcttgctgttaaattgctgaaaccattttatatgacatcaaattaatacatttgaaacatcatttggcagatatactgaggtgggaaggtcttttttccatacatcattaggtcctagaggagaacttggtaatggaatagaatactggtctggatattatcagagtcttcgacccactcagatgggtttatctcttaatattggtaggtactttgattgctcagtttgtgtagccactttgttcctaatgtttcagtatgaagatttactggttttgctttgcagatgtgtctgctcgatcattctatgagccaattttagtttcagagtttgttgcgaaacatttccgacgatcaaacctgtcaaagccgctgtctgatcaagatcgtattaaagtattattacactgttttcttgcccttcgtatatattgaattcagtgtttattaatcaaaacttgcagaatatttttggaatgcttcttttgctgtattctttaggtgaaaaaggccttgaagggagtaagagttaagctcatctacatggattatgccaaaacttgcaagattattggagtatctagagaccctataagccagttgacgtgagtttgttgttataatactatacgtgctcaaaaatatttttagtaagctacttttatgtggcctgtgtggtagaattgtttttgggttatttgtagtcttgtattcactacttatctaagttccatcttcaaattgagttggtttttttttttttttttgtggttgacagtttttagtatttggcttggttatgtcttgttctaaaatattgtttatgcttgtgcatttgtaaaatcttgtgctatggtatatttgtcccattctgtctcattatgcttctgttcaatttttggcttttttagatttactcatgatgataagagaacaaatgtctctgtggtcaagtatttccgtgagaaatacaatgttgtgcttaaatatccatccttgcctgcacttcaaagtggaagcgaagctagacctgtctacctgccaatggaggtttttactttatatcaagatcttgttttttgttttctttttgtttgttactgattctcttgtatgattttgttttacagctttgtagtatcgttgagggtcaaagatacacaaaaaaactaaatgaacaacaagttagatctctgctgagagcaacttgtcaacgtccgaacattagggaggggaatattacaaaggtactacagttttggatgcttattattttttaaatttgttgataagatgagaattgtgattcatttggcatttcatgtttctgcagatggtccaggtcaataattttgaggtggaggagcttgttactaaagaatttggaatgcatgttcgcaaagaacttgcattgattaatgcacgagttctaaatcctccagtggtacttatatgccaatatgttatattttcaaggatactgtccgtcttataataagattaatgtcggttttggttgctgcagctaaagtatcacgatagtggacgtgacaaaattgttaatcctagctgtgggcaatggaacatgatcaacaaggtgatttttttttcttcccctcttattctttgaagtggcattatttgtaaaatttaaggaattagacctgtctcttcagtctcctcttgttccagagttcttgttcattttttttcaattcatttttaaggtttgcagcgtctcttctttgcagtttagtgtagctgtaagtcttttgggaaaattttgctaggttttaaggttcaacattttttttgcagaaaatggtcaatgggggtaaagttgatttctggtcttgtgtgaacttctcctctgaatataggaatatgtcagaagacttctgtgcggggctggtgaatatgtgtaacagcaaaggaatggtatgctgtgtggtttttttagtgtaggtggatggtacatctgttatttattcatcactagcttgatttccgattttgttactctaggtgtttcgccaaactccttcaattgcaatgcgatcagctcgtgctgatcgaattgatcagactctcatggatgtatacaaagagtctgcaggcttgaataagccacttaagttgttgataattatcttacctgatcagactggctcatatggtaagaaattctgatgttttgtaaataggtaattcctggggtttctttgcgcaactctaatctttttgtttgcaggaaaaataaagcgaatttgtgagacggagctaggtattgtttcacaatgttgtaagcctgcgcaagcttcaaagtttagcaaccaatattttgaaaatgttgctctcaagatcaatgctaaggtatctgttttgcctcactggtggtgatttgatatagtggtttcttgtcttgctatcttcttttaaatcatttgagaattgtaaattctgtaggttggggggagaaatactgtgctgaacgatgctgttttaaggagaattccgcttgtgactgatgtccctacaatcatttttggggcagatgtcactcatccgccgcctggcgaagactctagttcttctatagctgcagtaagcatattcattattctctatcatccccattttgttacttgatcatatttaagaggttattggctggctgcaggtcgttgcttcaatggattggcctgaggtaaccaagtatcgtggaattgtctctgcacagactcaccgggtggaaataatcgaggatctttataaacaaactagggatccacagaagggtttagttgagggtggaatggttaggtagggagatagatttatttcaggcttaaatttttagtttcttctggaagtgctctactttcttaacatttcaagttctctgcagggagttgcttcttgctttctacaggtcaacgaaacaaaagccttctagaattatcttctataggtaatgtttgcttttgaccatccaaatctatgtatatatttctagcagcagtgctgatatctgatttttgatgtgtggcagagatggtgttagtgaaggacaattcagccaagttttgctttatgaaatggatgcgattcggaaggtattgaaatcactgtataatttctattatagttagttcactgtataatggatgcaatgatttttggtgtttgggccttctgacccccgcagttttcttccttccaggcttgttcctcgctacaggaaggatatatgcctcgggttacatttgttgtggttcaaaagaggcatcatactcgcttattccctactgatcgcaacaaaactgataggagtggcaacatattaccaggtgattctaatcttataatagggatttgatcgtattctcttgatcttcattttgttagcatattttaatgtagccaataacttttaggtactgttgtggatactagcatctgtcatccaactgagtttgatttttatctcaatagtcatgctggaatccaggtaaaatgaggccttcccttgaagtgtgatggtttttatgttaattttgtccgatctgatattgatattgatgttgttgtgtaggggacaagcaagcccacacattaccacgttttgttggatgaaaatggcttcagtgctgacatcttgcaagtgctcacaaacaatttatgttacacgtatgtgtttactcctttctctataatcttgaaatggggtgaataaataatgctttagatcagcactagcaattatatagtaataattttactttgtggacaggtatgcgaggtgtaccaagtccgtttccataggtttgtgatgatgtttttttgtcttgttaaatttgttgactaaggttggttttgacagtaatatttggattatatgtttgcagttcctccggcgtactatgctcacctcgctgcttatagggcacgctattatattgaggatgagatgtcggatagtgggtctactggtggaggccgaaagccgaaagacaaggttgtagaggttaggccgctgcccagcataaaggataatgtgaaggaagtgatgttctacgtctgataaattatgtttggttgattgtgggaagttgcgcaagtatagttgcacagtttgtggatgatggtggagtctaattttggagtttttgttttggtggttgagcgacttgttgtctgaagtttgaattattataaatcacacactgtttgtggattacgaaaattacataaatgttctttatttttaagacatgttcttagaaaggagttttggtatcattcttaagcttcttttatatcaccgattaatacaagagacgatgaaattttagagaataatgtctttttattaagagtttttaaatgttcagtacacaaatggtaagatacgctcggaaatcctcactgctcctccttgcaactccaatgaataaaaaagcaaacctaatcaatttactttttaatttaccattttaataaacatagtaaatacaattttattaacttattaaataattttataaatttacatatttttaataatttcataaaagtgtgataattttaaaaacttttattatatataatttttaatctaatgttttcaatagttatattttattatcatatcactttacaattacgtttgaaattaaatatacacctcaccactgtttttattctcactgctattgctgtttttaactttaccgaagataaatgtatcgtccatcccaattaaaccttagtccatttatagtggtttttttacttcgttaaagctagacaaactatgccattaaaattttaatagcttaagtttagattggatgagcgatgcgtttattttcggtgagattaaaaacaacaatggtagttaaattagttactgtagcgatgaaattagatactgtagtagtgatattagaaattgcggtaaggtgtgtgtttagattcaaacgcaactataacgatgagttgagaatagaaaataactattaaagacattagatttatgagttctctctcctttcatcttttttttcacccttaaattctgttgatgaataaaaaatattctttaaatatcaaaggaaagctctcatttaatcctctcatctgattgtatgaaaacagttttgttcattcgtcagttattctgctctatcattgcttttatctgtttcatttttttccaatctaaaactaaaaaataagcaccatcttttccattcatgatgacacagaaggtgaagaaaattataaattttgattcatcaatgggtatgggtggttaaccaaaatagagaagataaaaaaagaagaagcaatgtttaaaataaaagtcattttcctttttttaaaaatatggatgattgataattttaaaaataattttcattattttcaccaaaatgttttgtagaattaaaaaagacgagaacaagagttttttaattttaaatgaacgagttcacaatgggttcaaatccatataaacacaaaaaaataattatttttcaacagtttttttttctaatattgaattcgataccctgatttgaatccatataaatacaaaatttattttattttattaaaacatgtttttatttctatttatcaattttaaaaaaaatagaaaatgaaaatcatgtttctatttaccaaatatttcacaaattaaactgactttaattgtttaaaaaaaagaaaaaaaattctattattttctggtgaagtagaaattaggaaagggaagggatgcttgctatggaaattgtggatggaaaaaaggaagttgtcaataaagaaaaaaaaaaatttttggtatttttttatgtccgttttattgtttatgtttggggttcgtggttgttcttctcaacaatgtcatcttcaatgtttaaatctatgtctcaaattaagaatacaatgtgccttaccattacacccaacacttgttggtaaaaaaaaagtttaaaatttatatgatattttaaaaacatatagataatttaatggtaaaattataattttatttttttgaaggataatgctaatattgtaattatatttattattgtaattttacataaaaattaaattaattaacttgtaacatcaactaagttaaatatttctttaagtattaaattatgtaaaaaatatattaataaataggtgaaatgaggttttggttgaacctgatttcttaagtttaacccttactaccctaactcaacgacattattttttgaaagaactcgatcaagattgctttttccgtagttacttttccttaaaaaaacccaagggaaagtttaactgttaatgatttgcttaaatgagttgggctttttgttatttattgtctcgttaatttttattttcattggattttaatgtgtattttccttttctgttttcttatttatttacttgtctctttgtccatctctgttacttgcatcttcttctcgtctcttttgatggcctttggtgcttcattgcttataggttactgtaacgcctgaggtaaccgcaaaaaaggttaacagagcaataatgaagcaacttattgatgtatacaaagagtcgcatcttggacgtcggtgtccagcttatgatggcaggaagagtttgtacactgctggtcctcttcccttcgagtcaaaggagcttgttatcaagctacctgaggaagatcgcagtgctggttcgtctaggcctgcgcggtaatattattgtatcctatgatggtctcttgacattttacattatatccgatgtcataattgcttacctctgatctttctggttgcctgtcactgcaggaaggagcgacaatttaaggttgcaatcaaactggcctccaagccagaccttcattatctcagggagtttttgagcagaaagcattttgaatgtcctcaagaagctattcaagttctggatgttgttcttagagctaaaccatctcagatgtaactgcctgttgattaatgttaaacatttctggctattaaattgttgaaaccattttatatgacatcaaattaatacatttgaaacatcatttggcagatatactgaggtgggaaggtcttttttctatacatcattaggtcctagaggagaacttggtaatggaacagaatactggtctggatattatcagagtcttcgacccactcagatgggtttatctcttaatattggtaggtactttgattgctcagtttgtgtagccactttgttcctaatgtttcagtatgaagatttactggttttgctttgcagatgtgtctgctcgatcattctatgagccaattttagtttcagagtttgttgtgaaacatttccgacgatcaaacctgtcaaagccgctgtctgatcaagatcgtattaaagtacgtatatattgaattcagtgtttattaatcaaaacttgcagaatttttttgcaatgcttcttttgccgtattttttaggtgaaaaaggccttgaagggagtaagagttaggctcatctacatggattatgccaaaacttgcaagattattggagtatctagagaccctataagccagttgacgtgagtttgttgttataatactatacctgctcataaatatttttagtaagctacttttatgtggcctgtgtggtagaattgtttttgggttatttgtagtcttgtattcactacttatctaagttacatcttaaaattgagttggttttatttttattttttgcagttgacagtttttagtatttggcttggttatgtcttgttctaaaatattgtttatgcttatacatttgtaaaatcttgtgcttatggtacatttgtaccattctgtctcattatgtttctgttcaatttttggctgttttagatttcctcttgatgataagagaacaaatgtctctgtggtcaagtatttccgtgagaaatacaatgttgtgcttaaatatccatccttgcctgcacttcaaagtggaagtgaagctagacctgtctacctgccaatggaggtttttactttatatcaagatgatcttgtttttgttttctttttgtttgttactgattctcctgtatgattttgttttacagctttgtagtatcgttgagggtcaaagatacacaaaaaaactaaatgaacaacaagttagatctctgctgagagcaacttgtcaacgtccgaacattagggaggggaatattacaaaggtactacagttttggatgcttattattttttaaattggttgataagatgagaattttgattcattggcatttcatgtttctgcagatggtccaggtcaataattttgaggtggaggagcttgttactaaagaatttggaatgcatgttcgcaaagaacttgcattgattaatgcacaagttctaaatcctccagtggtacttttaagccaatatgttatattttcaaggatactgtcagtcttataatacgattaatgtctgttttggttgctgcagctaaagtatcacgatagtggacgtgacaaaatcgttaatcctagttgcgggcaatggaacatgatcaacaaggtggtatttttttttcttcccctcttctttgaagtggcattgtttgtaaaatttaaggaatcagacctgtctcttcagtctcctcttgttccagagttcttgttcattttttcaattcatttttaaggtagctataagtcttttgggaaaattttgataggttttaaggttcaacagttttttttttttttttgcagaaaatggtcaattggggtaaagtcgatttctggtcttgtgtgaacttctcctcggaatattggaatatgtcagaagagttctgtgcggagctggtgaatatgtgtaacaacaaaggaatggtatgctgtgtggttttttttagtgtaggtggatggtatatctgttatttatttatcactagcatgatttcccattttgtgactctaggtgttttgccaaactccttcaattgcaatgcgatcagcttgtgctgaccgaattgatcagattctcatggatgtatacaaagagtctgcaggcttgaataagccacttcagttgttgataattatcttacctgatcagactggctcttacggtaagaaattctgatgttttgtaaataggtaattcctggggtttctttgcgcgactcaaatctttttgcttgcaggaaaaataaagcgaatttgtgagacggagctaggtattgtttcacaatgttgtaagcctgtgcaagctgcaaagtttagcaaccaatattttgaaaatgttgctctcaagatcaatgctaaggtatgtgttttgcctcactggtggtgatttgatatagtgttttcttgtcttgttatcttaattcatttgagaattgtaaattctgtaggttggggggcgaaatactgtgctgaacgatgctattttaaggagaattccgcttgtgactgatgtccctacaatcatttttggggcagatgtcactcatccgccgcctggcgaagactctagttcttctatagctgcagtaagcatattcattgttctctacatccccattttgttacttgatcatatttaagaggttattggctggatgcaggtcgttgcttcaatggattggcctgaggtaaccaagtatcgtggaattgtctctgcacagactcaccggatggaaataatccaggatctttataaacaaacaaaggatccacagaagggtttagttgagggtggaatggttaggtagggagatagatttatttcgggcttaattttttagtttcttctggacgtgctctactttcttaacatttcaagttctctgcagggaattgcttgttgctttcttcaagtcaacaagacaaaagccttctagaattatcttctataggtaatgtttgcttttgaccatccaaatatatgtatatacttctagcagcagtgctgacatctgatttttgatgtggcagaggtggtgttagtgaaggacaattcagccaagttttgctttatgaaatggatgcgatttggaaggtattgaaatcactgtataatgtctattatagttggttcactgtataatggatgcttctgacccctgcagttttcttccttccaggcttgttcctcgctacaggaaggatatatgcctcgggttacatttgttgtggttcaaaagaggcatcatactcgcttattccctactgatcgcaacaaaactgatgggagtggcaacatattaccaggtgattctaatcttataatagggatttgatcgtattctcttgatcttcattttgttagcatattttaatgtagccaataaattttaggtactgttgtggatactagcatctgtcatccaaccgagtttgatttttatctcaatagtcatgctggaatcctggttaaatgaggcttcccttgaagtgtgatggtttttatgttaattttgtccgatctgatactgatgttgttgtgtaggggacaagcaaggccacacgttaccacgttttgtttgatgaaaatggcttcagtgctgacatcttgcaagtgctcacaaacagtttatgttacacgtatgtgtttactcctttctctataatcctgtaatggggtgaataaataatgctttagatcagcactagtaattatatagtaataattttactttgtggataggtatgcgaggtgtaccaagtccgtttccataggtttgtgatgatgtttttttgtcttgttaaatttgttaacttaaggttggttttgacagtgaatatttgaattatatgtttgcagtgcctccggcatactatgctcacctcgctgcttatagggcacgctattatattgaggatgagatgtcggatagtgggtctactggtggaggccgaaagccgaaagacaaggttgtagagtttaggccgctccccagcataaaggacaatgtgaaggaagtgtttggttggtggaaagttgcgcaagtatagttgcacagtttgtggatgatggtggagtcttgttgattccattggtggactttgtaattatttaatttt

SEQ ID NO: 527 - DNA, 7706 bp, Gossypium raimondii
  source 1..7706: mol_type = genomic DNA
taaaataaaaaagatattaaattaattgactctaattgaattattataaaaattatattaataattatcgatttaaattcgtaatatataaacattaaaaggcaattagtaacgatattcaatgatcatatattctcattgaaaatcaatatataattaataacaatattaaaaaaaataaaaaagtaaaaaaatagcaaaaaaactgacttccggacgcgaccctccaaattcgtcacccagtaaggtacgactaagggacgattttcatcaatgttgacgttgtgcaaaagagttggactcatccatagtttcctcaataatgagggcaaattcgtcatctagagatttcactcaattagatatcctggatcgcgctaccgccaactcggcgggtcaagttcggttatgtttgtattcttcaacctgcttatttattcttcaccaaccatttagttgttaattagtttttaaataatatataatttttttgaataaataatatataaatttaaaattatataaaaagataaaaaataatattaattttaaaaaataaaaagtatcctaaattatatacataaaaataccaatgataatatacaaacaatgttataaaataatatataataatataagcagtattttgcataaatatatacaaaaaatatatcataataaataaataaaattatcatggttagatatatatattattttgtaaatcgataattatgaataaatcatatttatattatatacagaggcgaatttaggatgcttgcataagcccagcccaacccccctaaaatgaaaaattactatttagatcatttaatttttttaattttaaattaataaagataaaattgcacattaactcgtataaaattaaaaaaaatttgatttaatcttttaaaagttataaagatatagactataaaaaattaaaatttcgttcagcccctttaaagaattgttctggcttcgccactggttgtatatattaatcatatcaaccatacatccataaaaagcaatatacatcatatacatacgtcaaaattactattttttattataatatttatttcaaataataaataataaataataaaattaaaattattatgattatcacaaatttgttttaattataactattatcatattttttgatttttttaaaattaataattatttttaaatgtaaatttagtaatataatgaaaaataaaatatattttggtaagttccaaattcgtgcttatatattacagttaaataatattttatttaattttaaatttaatatttatttacaaattaacacaaagaataaagaatagaaaaaagagaggataaaaatgaaaacaaatcgggtattttctaaacgaaaaaggggtcagttcgggtttattttttacacccgaacccggcatgattcactaaaagagcgtgtccatttttacacgtccccgaacattgcgtcatcatctgcttctattataaaatgggctcattcattcctagcctctctgtactcaagagtcaagagtgtcgtttgtttcattttttgtcccttctgttttggagtttttgaaattttcatctgtttgcttagttttccaaatttccggcaatgtctggccgaggcggtggtgaacgtggcagtggtcggggtggtggtcgacgtggccgggggcagggccgtggtcgcggtcaaccttcgcagtcttcctctcgcggcggcggcggtagagcaagaggccgtggatcatctggttctactgcaacttataatccccctcctcctcaaatggctccggctcagccacctcctcaaatggctgtagctacgccagttcctccatcgggggcccctttttctcatccttcttcaagttctggtgtaggatcactttccagagaggtatcggagaagcttacaatggagccggtggctgtgactacggcgcctcctcttcctccgtcgtcgtcaaaggcgattaggttccctccaagaccggggttcggcacggtcggtacaaagtgtgtggttagggccaaccattttctcgtagatgttgctaatgccgatcttcatcactacgatgtaactttctttctcgcatgtctccctatttgattttaagcctgtattttttctcgacatttttggcttgttgttctaatcggttttttttttttatatttgttaaaattttctttcttttttgcttgtatatgtctgcttccttccttttgacctatctatggatttaagttttcagtaattactttgaaaaaccgagggaaaccttcactgttaatggcttgcttaaacgaattccacttgtttagatcatattttttgaattctaatgttttcatgtttctgttctcttattcatttaccttgttcatccctgatacttgcattttcttctccaatattttaatcgctagttttccttgtcatttttctgccttgttttaatcgttttatattttggcacttcttagagctctgttttttatccgactttactatacactgaaggttttagtagttgcttttccttaaaaaaacccaagggaaagtttaactgttaatgatttgcttgactgagttgggctttttgttatttattgtctcgttaaattttattttcattggattttaatgtgtattttactcatctgttttcttatttatttacttgtctctttgtccatctctgttacttgcatcttcttctcgtctcttttgatggcctttggtgcttcattgcttataggttactataacgcctgaggtaaccgcaaaaaaggttaacagagcaataatgaagcaacttattgatgtatacaaagagtcgcatcttggacgtcggtgtccagcttatgatggcaggaagagtttgtacactgctggtcctcttcccttcgagtcaaaggagcttgttatcaagctacctgaggaagatcgcagtgctggttcgtctaggcctgcgcggtaatattattgtatcctatgatggtctcatgacattttacattttatccgatgtcattattgcttacctgtgatctttctggttgcctgtcactgcaggaaggagcgacaatttaaggttgcaatcaaattggcctccaagccagaccttcattatctgagggagtttctgagcagaaagcattttgaatgccctcaagaagctattcaagttctggatgttgttcttagagctaaaccatctcagacgtaactgcctgttgattgctgttaaacattgcttgctgttaaattgctgaaaccattttatatgacatcaaattaatacatttgaaacatcatttggcagatatactgaggtgggaaggtcttttttccatacatcattaggtcctagaggagaacttggtaatggaatagaatactggtctggatattatcagagtcttcgacccactcagatgggtttatctcttaatattggtaggtactttgattgctcagtttgtgtagccactttgttcctaatgtttcagtatgaagatttactggttttgctttgcagatgtgtctgctcgatcattctatgagccaattttagtttcagagtttgttgcgaaacatttccgacgatcaaacctgtcaaagccgctgtctgatcaagatcgtattaaagtattattacactgttttcttgcccttcgtatatattgaattcagtgtttattaatcaaaacttgcagaatatttttggaatgcttcttttgctgtattctttaggtgaaaaaggccttgaagggagtaagagttaagctcatctacatggattatgccaaaacttgcaagattattggagtatctagagaccctataagccagttgacgtgagtttgttgttataatactatacgtgctcaaaaatatttttagtaagctacttttatgtggcctgtgtggtagaattgtttttgggttatttgtagtcttgtattcactacttatctaagttccatcttcaaattgagttggtttttttttttttttttgtggttgacagtttttagtatttggcttggttatgtcttgttctaaaatattgtttatgcttgtgcatttgtaaaatcttgtgctatggtatatttgtcccattctgtctcattatgcttctgttcaatttttggcttttttagatttactcatgatgataagagaacaaatgtctctgtggtcaagtatttccgtgagaaatacaatgttgtgcttaaatatccatccttgcctgcacttcaaagtggaagcgaagctagacctgtctacctgccaatggaggtttttactttatatcaagatcttgttttttgttttctttttgtttgttactgattctcttgtatgattttgttttacagctttgtagtatcgttgagggtcaaagatacacaaaaaaactaaatgaacaacaagttagatctctgctgagagcaacttgtcaacgtccgaacattagggaggggaatattacaaaggtactacagttttggatgcttattattttttaaatttgttgataagatgagaattgtgattcatttggcatttcatgtttctgcagatggtccaggtcaataattttgaggtggaggagcttgttactaaagaatttggaatgcatgttcgcaaagaacttgcattgattaatgcacgagttctaaatcctccagtggtacttatatgccaatatgttatattttcaaggatactgtccgtcttataataagattaatgtcggttttggttgctgcagctaaagtatcacgatagtggacgtgacaaaattgttaatcctagctgtgggcaatggaacatgatcaacaaggtgatttttttttcttcccctcttattctttgaagtggcattatttgtaaaatttaaggaattagacctgtctcttcagtctcctcttgttccagagttcttgttcattttttttcaattcatttttaaggtttgcagcgtctcttctttgcagtttagtgtagctgtaagtcttttgggaaaattttgctaggttttaaggttcaacattttttttgcagaaaatggtcaatgggggtaaagttgatttctggtcttgtgtgaacttctcctctgaatataggaatatgtcagaagacttctgtgcggggctggtgaatatgtgtaacagcaaaggaatggtatgctgtgtggtttttttagtgtaggtggatggtacatctgttatttattcatcactagcttgatttccgattttgttactctaggtgtttcgccaaactccttcaattgcaatgcgatcagctcgtgctgatcgaattgatcagactctcatggatgtatacaaagagtctgcaggcttgaataagccacttaagttgttgataattatcttacctgatcagactggctcatatggtaagaaattctgatgttttgtaaataggtaattcctggggtttctttgcgcaactctaatctttttgtttgcaggaaaaataaagcgaatttgtgagacggagctaggtattgtttcacaatgttgtaagcctgcgcaagcttcaaagtttagcaaccaatattttgaaaatgttgctctcaagatcaatgctaaggtatctgttttgcctcactggtggtgatttgatatagtggtttcttgtcttgctatcttcttttaaatcatttgagaattgtaaattctgtaggttggggggagaaatactgtgctgaacgatgctgttttaaggagaattccgcttgtgactgatgtccctacaatcatttttggggcagatgtcactcatccgccgcctggcgaagactctagttcttctatagctgcagtaagcatattcattattctctatcatccccattttgttacttgatcatatttaagaggttattggctggctgcaggtcgttgcttcaatggattggcctgaggtaaccaagtatcgtggaattgtctctgcacagactcaccgggtggaaataatcgaggatctttataaacaaactagggatccacagaagggtttagttgagggtggaatggttaggtagggagatagatttatttcaggcttaaatttttagtttcttctggaagtgctctactttcttaacatttcaagttctctgcagggagttgcttcttgctttctacaggtcaacgaaacaaaagccttctagaattatcttctataggtaatgtttgcttttgaccatccaaatctatgtatatatttctagcagcagtgctgatatctgatttttgatgtgtggcagagatggtgttagtgaaggacaattcagccaagttttgctttatgaaatggatgcgattcggaaggtattgaaatcactgtataatttctattatagttagttcactgtataatggatgcaatgatttttggtgtttgggccttctgacccccgcagttttcttccttccaggcttgttcctcgctacaggaaggatatatgcctcgggttacatttgttgtggttcaaaagaggcatcatactcgcttattccctactgatcgcaacaaaactgataggagtggcaacatattaccaggtgattctaatcttataatagggatttgatcgtattctcttgatcttcattttgttagcatattttaatgtagccaataacttttaggtactgttgtggatactagcatctgtcatccaactgagtttgatttttatctcaatagtcatgctggaatccaggtaaaatgaggccttcccttgaagtgtgatggtttttatgttaattttgtccgatctgatattgatattgatgttgttgtgtaggggacaagcaagcccacacattaccacgttttgttggatgaaaatggcttcagtgctgacatcttgcaagtgctcacaaacaatttatgttacacgtatgtgtttactcctttctctataatcttgaaatggggtgaataaataatgctttagatcagcactagcaattatatagtaataattttactttgtggacaggtatgcgaggtgtaccaagtccgtttccataggtttgtgatgatgtttttttgtcttgttaaatttgttgactaaggttggttttgacagtaatatttggattatatgtttgcagttcctccggcgtactatgctcacctcgctgcttatagggcacgctattatattgaggatgagatgtcggatagtgggtctactggtggaggccgaaagccgaaagacaaggttgtagaggttaggccgctgcccagcataaaggataatgtgaaggaagtgatgttctacgtctgataaattatgtttggttgattgtgggaagttgcgcaagtatagttgcacagtttgtggatgatggtggagtctaattttggagtttttgttttggtggttgagcgacttgttgtctgaagtttgaattattataaatcacacactgtttgtggattacgaaaattacataaatgttctttatttttaagacatgttcttagaaaggagttttggtatcattcttaagcttcttttatatcaccgattaatacaagagacgatgaaattttagagaataatgtctttttattaagagtttttaaatgttcagtacacaaatggtaa

SEQ ID NO: 528 - DNA, 7610 bp, Gossypium raimondii
  source 1..7610: mol_type = genomic DNA
aaattatattaataattatcgatttaaattcgtaatatataaacattaaaaggcaattagtaacgatattcaatgatcatatattctcattgaaaatcaatatataattaataacaatattaaaaaaaataaaaaagtaaaaaaatagcaaaaaaactgacttccggacgcgaccctccaaattcgtcacccagtaaggtacgactaagggacgattttcatcaatgttgacgttgtgcaaaagagttggactcatccatagtttcctcaataatgagggcaaattcgtcatctagagatttcactcaattagatatcctggatcgcgctaccgccaactcggcgggtcaagttcggttatgtttgtattcttcaacctgcttatttattcttcaccaaccatttagttgttaattagtttttaaataatatataatttttttgaataaataatatataaatttaaaattatataaaaagataaaaaataatattaattttaaaaaataaaaagtatcctaaattatatacataaaaataccaatgataatatacaaacaatgttataaaataatatataataatataagcagtattttgcataaatatatacaaaaaatatatcataataaataaataaaattatcatggttagatatatatattattttgtaaatcgataattatgaataaatcatatttatattatatacagaggcgaatttaggatgcttgcataagcccagcccaacccccctaaaatgaaaaattactatttagatcatttaatttttttaattttaaattaataaagataaaattgcacattaactcgtataaaattaaaaaaaatttgatttaatcttttaaaagttataaagatatagactataaaaaattaaaatttcgttcagcccctttaaagaattgttctggcttcgccactggttgtatatattaatcatatcaaccatacatccataaaaagcaatatacatcatatacatacgtcaaaattactattttttattataatatttatttcaaataataaataataaataataaaattaaaattattatgattatcacaaatttgttttaattataactattatcatattttttgatttttttaaaattaataattatttttaaatgtaaatttagtaatataatgaaaaataaaatatattttggtaagttccaaattcgtgcttatatattacagttaaataatattttatttaattttaaatttaatatttatttacaaattaacacaaagaataaagaatagaaaaaagagaggataaaaatgaaaacaaatcgggtattttctaaacgaaaaaggggtcagttcgggtttattttttacacccgaacccggcatgattcactaaaagagcgtgtccatttttacacgtccccgaacattgcgtcatcatctgcttctattataaaatgggctcattcattcctagcctctctgtactcaagagtcaagagtgtcgtttgtttcattttttgtcccttctgttttggagtttttgaaattttcatctgtttgcttagttttccaaatttccggcaatgtctggccgaggcggtggtgaacgtggcagtggtcggggtggtggtcgacgtggccgggggcagggccgtggtcgcggtcaaccttcgcagtcttcctctcgcggcggcggcggtagagcaagaggccgtggatcatctggttctactgcaacttataatccccctcctcctcaaatggctccggctcagccacctcctcaaatggctgtagctacgccagttcctccatcgggggcccctttttctcatccttcttcaagttctggtgtaggatcactttccagagaggtatcggagaagcttacaatggagccggtggctgtgactacggcgcctcctcttcctccgtcgtcgtcaaaggcgattaggttccctccaagaccggggttcggcacggtcggtacaaagtgtgtggttagggccaaccattttctcgtagatgttgctaatgccgatcttcatcactacgatgtaactttctttctcgcatgtctccctatttgattttaagcctgtattttttctcgacatttttggcttgttgttctaatcggttttttttttttatatttgttaaaattttctttcttttttgcttgtatatgtctgcttccttccttttgacctatctatggatttaagttttcagtaattactttgaaaaaccgagggaaaccttcactgttaatggcttgcttaaacgaattccacttgtttagatcatattttttgaattctaatgttttcatgtttctgttctcttattcatttaccttgttcatccctgatacttgcattttcttctccaatattttaatcgctagttttccttgtcatttttctgccttgttttaatcgttttatattttggcacttcttagagctctgttttttatccgactttactatacactgaaggttttagtagttgcttttccttaaaaaaacccaagggaaagtttaactgttaatgatttgcttgactgagttgggctttttgttatttattgtctcgttaaattttattttcattggattttaatgtgtattttactcatctgttttcttatttatttacttgtctctttgtccatctctgttacttgcatcttcttctcgtctcttttgatggcctttggtgcttcattgcttataggttactataacgcctgaggtaaccgcaaaaaaggttaacagagcaataatgaagcaacttattgatgtatacaaagagtcgcatcttggacgtcggtgtccagcttatgatggcaggaagagtttgtacactgctggtcctcttcccttcgagtcaaaggagcttgttatcaagctacctgaggaagatcgcagtgctggttcgtctaggcctgcgcggtaatattattgtatcctatgatggtctcatgacattttacattttatccgatgtcattattgcttacctgtgatctttctggttgcctgtcactgcaggaaggagcgacaatttaaggttgcaatcaaattggcctccaagccagaccttcattatctgagggagtttctgagcagaaagcattttgaatgccctcaagaagctattcaagttctggatgttgttcttagagctaaaccatctcagacgtaactgcctgttgattgctgttaaacattgcttgctgttaaattgctgaaaccattttatatgacatcaaattaatacatttgaaacatcatttggcagatatactgaggtgggaaggtcttttttccatacatcattaggtcctagaggagaacttggtaatggaatagaatactggtctggatattatcagagtcttcgacccactcagatgggtttatctcttaatattggtaggtactttgattgctcagtttgtgtagccactttgttcctaatgtttcagtatgaagatttactggttttgctttgcagatgtgtctgctcgatcattctatgagccaattttagtttcagagtttgttgcgaaacatttccgacgatcaaacctgtcaaagccgctgtctgatcaagatcgtattaaagtattattacactgttttcttgcccttcgtatatattgaattcagtgtttattaatcaaaacttgcagaatatttttggaatgcttcttttgctgtattctttaggtgaaaaaggccttgaagggagtaagagttaagctcatctacatggattatgccaaaacttgcaagattattggagtatctagagaccctataagccagttgacgtgagtttgttgttataatactatacgtgctcaaaaatatttttagtaagctacttttatgtggcctgtgtggtagaattgtttttgggttatttgtagtcttgtattcactacttatctaagttccatcttcaaattgagttggtttttttttttttttttgtggttgacagtttttagtatttggcttggttatgtcttgttctaaaatattgtttatgcttgtgcatttgtaaaatcttgtgctatggtatatttgtcccattctgtctcattatgcttctgttcaatttttggcttttttagatttactcatgatgataagagaacaaatgtctctgtggtcaagtatttccgtgagaaatacaatgttgtgcttaaatatccatccttgcctgcacttcaaagtggaagcgaagctagacctgtctacctgccaatggaggtttttactttatatcaagatcttgttttttgttttctttttgtttgttactgattctcttgtatgattttgttttacagctttgtagtatcgttgagggtcaaagatacacaaaaaaactaaatgaacaacaagttagatctctgctgagagcaacttgtcaacgtccgaacattagggaggggaatattacaaaggtactacagttttggatgcttattattttttaaatttgttgataagatgagaattgtgattcatttggcatttcatgtttctgcagatggtccaggtcaataattttgaggtggaggagcttgttactaaagaatttggaatgcatgttcgcaaagaacttgcattgattaatgcacgagttctaaatcctccagtggtacttatatgccaatatgttatattttcaaggatactgtccgtcttataataagattaatgtcggttttggttgctgcagctaaagtatcacgatagtggacgtgacaaaattgttaatcctagctgtgggcaatggaacatgatcaacaaggtgatttttttttcttcccctcttattctttgaagtggcattatttgtaaaatttaaggaattagacctgtctcttcagtctcctcttgttccagagttcttgttcattttttttcaattcatttttaaggtttgcagcgtctcttctttgcagtttagtgtagctgtaagtcttttgggaaaattttgctaggttttaaggttcaacattttttttgcagaaaatggtcaatgggggtaaagttgatttctggtcttgtgtgaacttctcctctgaatataggaatatgtcagaagacttctgtgcggggctggtgaatatgtgtaacagcaaaggaatggtatgctgtgtggtttttttagtgtaggtggatggtacatctgttatttattcatcactagcttgatttccgattttgttactctaggtgtttcgccaaactccttcaattgcaatgcgatcagctcgtgctgatcgaattgatcagactctcatggatgtatacaaagagtctgcaggcttgaataagccacttaagttgttgataattatcttacctgatcagactggctcatatggtaagaaattctgatgttttgtaaataggtaattcctggggtttctttgcgcaactctaatctttttgtttgcaggaaaaataaagcgaatttgtgagacggagctaggtattgtttcacaatgttgtaagcctgcgcaagcttcaaagtttagcaaccaatattttgaaaatgttgctctcaagatcaatgctaaggtatctgttttgcctcactggtggtgatttgatatagtggtttcttgtcttgctatcttcttttaaatcatttgagaattgtaaattctgtaggttggggggagaaatactgtgctgaacgatgctgttttaaggagaattccgcttgtgactgatgtccctacaatcatttttggggcagatgtcactcatccgccgcctggcgaagactctagttcttctatagctgcagtaagcatattcattattctctatcatccccattttgttacttgatcatatttaagaggttattggctggctgcaggtcgttgcttcaatggattggcctgaggtaaccaagtatcgtggaattgtctctgcacagactcaccgggtggaaataatcgaggatctttataaacaaactagggatccacagaagggtttagttgagggtggaatggttaggtagggagatagatttatttcaggcttaaatttttagtttcttctggaagtgctctactttcttaacatttcaagttctctgcagggagttgcttcttgctttctacaggtcaacgaaacaaaagccttctagaattatcttctataggtaatgtttgcttttgaccatccaaatctatgtatatatttctagcagcagtgctgatatctgatttttgatgtgtggcagagatggtgttagtgaaggacaattcagccaagttttgctttatgaaatggatgcgattcggaaggtattgaaatcactgtataatttctattatagttagttcactgtataatggatgcaatgatttttggtgtttgggccttctgacccccgcagttttcttccttccaggcttgttcctcgctacaggaaggatatatgcctcgggttacatttgttgtggttcaaaagaggcatcatactcgcttattccctactgatcgcaacaaaactgataggagtggcaacatattaccaggtgattctaatcttataatagggatttgatcgtattctcttgatcttcattttgttagcatattttaatgtagccaataacttttaggtactgttgtggatactagcatctgtcatccaactgagtttgatttttatctcaatagtcatgctggaatccaggtaaaatgaggccttcccttgaagtgtgatggtttttatgttaattttgtccgatctgatattgatattgatgttgttgtgtaggggacaagcaagcccacacattaccacgttttgttggatgaaaatggcttcagtgctgacatcttgcaagtgctcacaaacaatttatgttacacgtatgtgtttactcctttctctataatcttgaaatggggtgaataaataatgctttagatcagcactagcaattatatagtaataattttactttgtggacaggtatgcgaggtgtaccaagtccgtttccataggtttgtgatgatgtttttttgtcttgttaaatttgttgactaaggttggttttgacagtaatatttggattatatgtttgcagttcctccggcgtactatgctcacctcgctgcttatagggcacgctattatattgaggatgagatgtcggatagtgggtctactggtggaggccgaaagccgaaagacaaggttgtagaggttaggccgctgcccagcataaaggataatgtgaaggaagtgatgttctacgtctgataaattatgtttggttgattgtgggaagttgcgcaagtatagttgcacagtttgtggatgatggtggagtctaattttggagtttttgttttggtggttgagcgacttgttgtctgaagtttgaattattataaatcacacactgtttgtggattacgaaaattacataaatgttctttatttttaagacatgttcttagaaaggagttttggtatcattcttaagcttcttttatatcaccgattaatacaagagacgatgaaattttagagaata

SEQ ID NO: 529 - DNA, 7610 bp, Gossypium raimondii; identical to SEQ ID NO: 528
  source 1..7610: mol_type = genomic DNA

SEQ ID NO: 530 - DNA, 14610 bp, Gossypium raimondii
  source 1..14610: mol_type = genomic DNA
ttaaattaattgactctaattgaattattataaaaattatattaataattatcgatttaaattcgtaatatataaacattaaaaggcaattagtaacgatattcaatgatcatatattctcattgaaaatcaatatataattaataacaatattaaaaaaaataaaaaagtaaaaaaatagcaaaaaaactgacttccggacgcgaccctccaaattcgtcacccagtaaggtacgactaagggacgattttcatcaatgttgacgttgtgcaaaagagttggactcatccatagtttcctcaataatgagggcaaattcgtcatctagagatttcactcaattagatatcctggatcgcgctaccgccaactcggcgggtcaagttcggttatgtttgtattcttcaacctgcttatttattcttcaccaaccatttagttgttaattagtttttaaataatatataatttttttgaataaataatatataaatttaaaattatataaaaagataaaaaataatattaattttaaaaaataaaaagtatcctaaattatatacataaaaataccaatgataatatacaaacaatgttataaaataatatataataatataagcagtattttgcataaatatatacaaaaaatatatcataataaataaataaaattatcatggttagatatatatattattttgtaaatcgataattatgaataaatcatatttatattatatacagaggcgaatttaggatgcttgcataagcccagcccaacccccctaaaatgaaaaattactatttagatcatttaatttttttaattttaaattaataaagataaaattgcacattaactcgtataaaattaaaaaaaatttgatttaatcttttaaaagttataaagatatagactataaaaaattaaaatttcgttcagcccctttaaagaattgttctggcttcgccactggttgtatatattaatcatatcaaccatacatccataaaaagcaatatacatcatatacatacgtcaaaattactattttttattataatatttatttcaaataataaataataaataataaaattaaaattattatgattatcacaaatttgttttaattataactattatcatattttttgatttttttaaaattaataattatttttaaatgtaaatttagtaatataatgaaaaataaaatatattttggtaagttccaaattcgtgcttatatattacagttaaataatattttatttaattttaaatttaatatttatttacaaattaacacaaagaataaagaatagaaaaaagagaggataaaaatgaaaacaaatcgggtattttctaaacgaaaaaggggtcagttcgggtttattttttacacccgaacccggcatgattcactaaaagagcgtgtccatttttacacgtccccgaacattgcgtcatcatctgcttctattataaaatgggctcattcattcctagcctctctgtactcaagagtcaagagtgtcgtttgtttcattttttgtcccttctgttttggagtttttgaaattttcatctgtttgcttagttttccaaatttccggcaatgtctggccgaggcggtggtgaacgtggcagtggtcggggtggtggtcgacgtggccgggggcagggccgtggtcgcggtcaaccttcgcagtcttcctctcgcggcggcggcggtagagcaagaggccgtggatcatctggttctactgcaacttataatccccctcctcctcaaatggctccggctcagccacctcctcaaatggctgtagctacgccagttcctccatcgggggcccctttttctcatccttcttcaagttctggtgtaggatcactttccagagaggtatcggagaagcttacaatggagccggtggctgtgactacggcgcctcctcttcctccgtcgtcgtcaaaggcgattaggttccctccaagaccggggttcggcacggtcggtacaaagtgtgtggttagggccaaccattttctcgtagatgttgctaatgccgatcttcatcactacgatgtaactttctttctcgcatgtctccctatttgattttaagcctgtattttttctcgacatttttggcttgttgttctaatcggttttttttttttatatttgttaaaattttctttcttttttgcttgtatatgtctgcttccttccttttgacctatctatggatttaagttttcagtaattactttgaaaaaccgagggaaaccttcactgttaatggcttgcttaaacgaattccacttgtttagatcatattttttgaattctaatgttttcatgtttctgttctcttattcatttaccttgttcatccctgatacttgcattttcttctccaatattttaatcgctagttttccttgtcatttttctgccttgttttaatcgttttatattttggcacttcttagagctctgttttttatccgactttactatacactgaaggttttagtagttgcttttccttaaaaaaacccaagggaaagtttaactgttaatgatttgcttgactgagttgggctttttgttatttattgtctcgttaaattttattttcattggattttaatgtgtattttactcatctgttttcttatttatttacttgtctctttgtccatctctgttacttgcatcttcttctcgtctcttttgatggcctttggtgcttcattgcttataggttactataacgcctgaggtaaccgcaaaaaaggttaacagagcaataatgaagcaacttattgatgtatacaaagagtcgcatcttggacgtcggtgtccagcttatgatggcaggaagagtttgtacactgctggtcctcttcccttcgagtcaaaggagcttgttatcaagctacctgaggaagatcgcagtgctggttcgtctaggcctgcgcggtaatattattgtatcctatgatggtctcatgacattttacattttatccgatgtcattattgcttacctgtgatctttctggttgcctgtcactgcaggaaggagcgacaatttaaggttgcaatcaaattggcctccaagccagaccttcattatctgagggagtttctgagcagaaagcattttgaatgccctcaagaagctattcaagttctggatgttgttcttagagctaaaccatctcagacgtaactgcctgttgattgctgttaaacattgcttgctgttaaattgctgaaaccattttatatgacatcaaattaatacatttgaaacatcatttggcagatatactgaggtgggaaggtcttttttccatacatcattaggtcctagaggagaacttggtaatggaatagaatactggtctggatattatcagagtcttcgacccactcagatgggtttatctcttaatattggtaggtactttgattgctcagtttgtgtagccactttgttcctaatgtttcagtatgaagatttactggttttgctttgcagatgtgtctgctcgatcattctatgagccaattttagtttcagagtttgttgcgaaacatttccgacgatcaaacctgtcaaagccgctgtctgatcaagatcgtattaaagtattattacactgttttcttgcccttcgtatatattgaattcagtgtttattaatcaaaacttgcagaatatttttggaatgcttcttttgctgtattctttaggtgaaaaaggccttgaagggagtaagagttaagctcatctacatggattatgccaaaacttgcaagattattggagtatctagagaccctataagccagttgacgtgagtttgttgttataatactatacgtgctcaaaaatatttttagtaagctacttttatgtggcctgtgtggtagaattgtttttgggttatttgtagtcttgtattcactacttatctaagttccatcttcaaattgagttggtttttttttttttttttgtggttgacagtttttagtatttggcttggttatgtcttgttctaaaatattgtttatgcttgtgcatttgtaaaatcttgtgctatggtatatttgtcccattctgtctcattatgcttctgttcaatttttggcttttttagatttactcatgatgataagagaacaaatgtctctgtggtcaagtatttccgtgagaaatacaatgttgtgcttaaatatccatccttgcctgcacttcaaagtggaagcgaagctagacctgtctacctgccaatggaggtttttactttatatcaagatcttgttttttgttttctttttgtttgttactgattctcttgtatgattttgttttacagctttgtagtatcgttgagggtcaaagatacacaaaaaaactaaatgaacaacaagttagatctctgctgagagcaacttgtcaacgtccgaacattagggaggggaatattacaaaggtactacagttttggatgcttattattttttaaatttgttgataagatgagaattgtgattcatttggcatttcatgtttctgcagatggtccaggtcaataattttgaggtggaggagcttgttactaaagaatttggaatgcatgttcgcaaagaacttgcattgattaatgcacgagttctaaatcctccagtggtacttatatgccaatatgttatattttcaaggatactgtccgtcttataataagattaatgtcggttttggttgctgcagctaaagtatcacgatagtggacgtgacaaaattgttaatcctagctgtgggcaatggaacatgatcaacaaggtgatttttttttcttcccctcttattctttgaagtggcattatttgtaaaatttaaggaattagacctgtctcttcagtctcctcttgttccagagttcttgttcattttttttcaattcatttttaaggtttgcagcgtctcttctttgcagtttagtgtagctgtaagtcttttgggaaaattttgctaggttttaaggttcaacattttttttgcagaaaatggtcaatgggggtaaagttgatttctggtcttgtgtgaacttctcctctgaatataggaatatgtcagaagacttctgtgcggggctggtgaatatgtgtaacagcaaaggaatggtatgctgtgtggtttttttagtgtaggtggatggtacatctgttatttattcatcactagcttgatttccgattttgttactctaggtgtttcgccaaactccttcaattgcaatgcgatcagctcgtgctgatcgaattgatcagactctcatggatgtatacaaagagtctgcaggcttgaataagccacttaagttgttgataattatcttacctgatcagactggctcatatggtaagaaattctgatgttttgtaaataggtaattcctggggtttctttgcgcaactctaatctttttgtttgcaggaaaaataaagcgaatttgtgagacggagctaggtattgtttcacaatgttgtaagcctgcgcaagcttcaaagtttagcaaccaatattttgaaaatgttgctctcaagatcaatgctaaggtatctgttttgcctcactggtggtgatttgatatagtggtttcttgtcttgctatcttcttttaaatcatttgagaattgtaaattctgtaggttggggggagaaatactgtgctgaacgatgctgttttaaggagaattccgcttgtgactgatgtccctacaatcatttttggggcagatgtcactcatccgccgcctggcgaagactctagttcttctatagctgcagtaagcatattcattattctctatcatccccattttgttacttgatcatatttaagaggttattggctggctgcaggtcgttgcttcaatggattggcctgaggtaaccaagtatcgtggaattgtctctgcacagactcaccgggtggaaataatcgaggatctttataaacaaactagggatccacagaagggtttagttgagggtggaatggttaggtagggagatagatttatttcaggcttaaatttttagtttcttctggaagtgctctactttcttaacatttcaagttctctgcagggagttgcttcttgctttctacaggtcaacgaaacaaaagccttctagaattatcttctataggtaatgtttgcttttgaccatccaaatctatgtatatatttctagcagcagtgctgatatctgatttttgatgtgtggcagagatggtgttagtgaaggacaattcagccaagttttgctttatgaaatggatgcgattcggaaggtattgaaatcactgtataatttctattatagttagttcactgtataatggatgcaatgatttttggtgtttgggccttctgacccccgcagttttcttccttccaggcttgttcctcgctacaggaaggatatatgcctcgggttacatttgttgtggttcaaaagaggcatcatactcgcttattccctactgatcgcaacaaaactgataggagtggcaacatattaccaggtgattctaatcttataatagggatttgatcgtattctcttgatcttcattttgttagcatattttaatgtagccaataacttttaggtactgttgtggatactagcatctgtcatccaactgagtttgatttttatctcaatagtcatgctggaatccaggtaaaatgaggccttcccttgaagtgtgatggtttttatgttaattttgtccgatctgatattgatattgatgttgttgtgtaggggacaagcaagcccacacattaccacgttttgttggatgaaaatggcttcagtgctgacatcttgcaagtgctcacaaacaatttatgttacacgtatgtgtttactcctttctctataatcttgaaatggggtgaataaataatgctttagatcagcactagcaattatatagtaataattttactttgtggacaggtatgcgaggtgtaccaagtccgtttccataggtttgtgatgatgtttttttgtcttgttaaatttgttgactaaggttggttttgacagtaatatttggattatatgtttgcagttcctccggcgtactatgctcacctcgctgcttatagggcacgctattatattgaggatgagatgtcggatagtgggtctactggtggaggccgaaagccgaaagacaaggttgtagaggttaggccgctgcccagcataaaggataatgtgaaggaagtgatgttctacgtctgataaattatgtttggttgattgtgggaagttgcgcaagtatagttgcacagtttgtggatgatggtggagtctaattttggagtttttgttttggtggttgagcgacttgttgtctgaagtttgaattattataaatcacacactgtttgtggattacgaaaattacataaatgttctttatttttaagacatgttcttagaaaggagttttggtatcattcttaagcttcttttatatcaccgattaatacaagagacgatgaaattttagagaataatgtctttttattaagagtttttaaatgttcagtacacaaatggtaagatacgctcggaaatcctcactgctcctccttgcaactccaatgaataaaaaagcaaacctaatcaatttactttttaatttaccattttaataaacatagtaaatacaattttattaacttattaaataattttataaatttacatatttttaataatttcataaaagtgtgataattttaaaaacttttattatatataatttttaatctaatgttttcaatagttatattttattatcatatcactttacaattacgtttgaaattaaatatacacctcaccactgtttttattctcactgctattgctgtttttaactttaccgaagataaatgtatcgtccatcccaattaaaccttagtccatttatagtggtttttttacttcgttaaagctagacaaactatgccattaaaattttaatagcttaagtttagattggatgagcgatgcgtttattttcggtgagattaaaaacaacaatggtagttaaattagttactgtagcgatgaaattagatactgtagtagtgatattagaaattgcggtaaggtgtgtgtttagattcaaacgcaactataacgatgagttgagaatagaaaataactattaaagacattagatttatgagttctctctcctttcatcttttttttcacccttaaattctgttgatgaataaaaaatattctttaaatatcaaaggaaagctctcatttaatcctctcatctgattgtatgaaaacagttttgttcattcgtcagttattctgctctatcattgcttttatctgtttcatttttttccaatctaaaactaaaaaataagcaccatcttttccattcatgatgacacagaaggtgaagaaaattataaattttgattcatcaatgggtatgggtggttaaccaaaatagagaagataaaaaaagaagaagcaatgtttaaaataaaagtcattttcctttttttaaaaatatggatgattgataattttaaaaataattttcattattttcaccaaaatgttttgtagaattaaaaaagacgagaacaagagttttttaattttaaatgaacgagttcacaatgggttcaaatccatataaacacaaaaaaataattatttttcaacagtttttttttctaatattgaattcgataccctgatttgaatccatataaatacaaaatttattttattttattaaaacatgtttttatttctatttatcaattttaaaaaaaatagaaaatgaaaatcatgtttctatttaccaaatatttcacaaattaaactgactttaattgtttaaaaaaaagaaaaaaaattctattattttctggtgaagtagaaattaggaaagggaagggatgcttgctatggaaattgtggatggaaaaaaggaagttgtcaataaagaaaaaaaaaaatttttggtatttttttatgtccgttttattgtttatgtttggggttcgtggttgttcttctcaacaatgtcatcttcaatgtttaaatctatgtctcaaattaagaatacaatgtgccttaccattacacccaacacttgttggtaaaaaaaaagtttaaaatttatatgatattttaaaaacatatagataatttaatggtaaaattataattttatttttttgaaggataatgctaatattgtaattatatttattattgtaattttacataaaaattaaattaattaacttgtaacatcaactaagttaaatatttctttaagtattaaattatgtaaaaaatatattaataaataggtgaaatgaggttttggttgaacctgatttcttaagtttaacccttactaccctaactcaacgacattattttttgaaagaactcgatcaagattgctttttccgtagttacttttccttaaaaaaacccaagggaaagtttaactgttaatgatttgcttaaatgagttgggctttttgttatttattgtctcgttaatttttattttcattggattttaatgtgtattttccttttctgttttcttatttatttacttgtctctttgtccatctctgttacttgcatcttcttctcgtctcttttgatggcctttggtgcttcattgcttataggttactgtaacgcctgaggtaaccgcaaaaaaggttaacagagcaataatgaagcaacttattgatgtatacaaagagtcgcatcttggacgtcggtgtccagcttatgatggcaggaagagtttgtacactgctggtcctcttcccttcgagtcaaaggagcttgttatcaagctacctgaggaagatcgcagtgctggttcgtctaggcctgcgcggtaatattattgtatcctatgatggtctcttgacattttacattatatccgatgtcataattgcttacctctgatctttctggttgcctgtcactgcaggaaggagcgacaatttaaggttgcaatcaaactggcctccaagccagaccttcattatctcagggagtttttgagcagaaagcattttgaatgtcctcaagaagctattcaagttctggatgttgttcttagagctaaaccatctcagatgtaactgcctgttgattaatgttaaacatttctggctattaaattgttgaaaccattttatatgacatcaaattaatacatttgaaacatcatttggcagatatactgaggtgggaaggtcttttttctatacatcattaggtcctagaggagaacttggtaatggaacagaatactggtctggatattatcagagtcttcgacccactcagatgggtttatctcttaatattggtaggtactttgattgctcagtttgtgtagccactttgttcctaatgtttcagtatgaagatttactggttttgctttgcagatgtgtctgctcgatcattctatgagccaattttagtttcagagtttgttgtgaaacatttccgacgatcaaacctgtcaaagccgctgtctgatcaagatcgtattaaagtacgtatatattgaattcagtgtttattaatcaaaacttgcagaatttttttgcaatgcttcttttgccgtattttttaggtgaaaaaggccttgaagggagtaagagttaggctcatctacatggattatgccaaaacttgcaagattattggagtatctagagaccctataagccagttgacgtgagtttgttgttataatactatacctgctcataaatatttttagtaagctacttttatgtggcctgtgtggtagaattgtttttgggttatttgtagtcttgtattcactacttatctaagttacatcttaaaattgagttggttttatttttattttttgcagttgacagtttttagtatttggcttggttatgtcttgttctaaaatattgtttatgcttatacatttgtaaaatcttgtgcttatggtacatttgtaccattctgtctcattatgtttctgttcaatttttggctgttttagatttcctcttgatgataagagaacaaatgtctctgtggtcaagtatttccgtgagaaatacaatgttgtgcttaaatatccatccttgcctgcacttcaaagtggaagtgaagctagacctgtctacctgccaatggaggtttttactttatatcaagatgatcttgtttttgttttctttttgtttgttactgattctcctgtatgattttgttttacagctttgtagtatcgttgagggtcaaagatacacaaaaaaactaaatgaacaacaagttagatctctgctgagagcaacttgtcaacgtccgaacattagggaggggaatattacaaaggtactacagttttggatgcttattattttttaaattggttgataagatgagaattttgattcattggcatttcatgtttctgcagatggtccaggtcaataattttgaggtggaggagcttgttactaaagaatttggaatgcatgttcgcaaagaacttgcattgattaatgcacaagttctaaatcctccagtggtacttttaagccaatatgttatattttcaaggatactgtcagtcttataatacgattaatgtctgttttggttgctgcagctaaagtatcacgatagtggacgtgacaaaatcgttaatcctagttgcgggcaatggaacatgatcaacaaggtggtatttttttttcttcccctcttctttgaagtggcattgtttgtaaaatttaaggaatcagacctgtctcttcagtctcctcttgttccagagttcttgttcattttttcaattcatttttaaggtagctataagtcttttgggaaaattttgataggttttaaggttcaacagttttttttttttttttgcagaaaatggtcaattggggtaaagtcgatttctggtcttgtgtgaacttctcctcggaatattggaatatgtcagaagagttctgtgcggagctggtgaatatgtgtaacaacaaaggaatggtatgctgtgtggttttttttagtgtaggtggatggtatatctgttatttatttatcactagcatgatttcccattttgtgactctaggtgttttgccaaactccttcaattgcaatgcgatcagcttgtgctgaccgaattgatcagattctcatggatgtatacaaagagtctgcaggcttgaataagccacttcagttgttgataattatcttacctgatcagactggctcttacggtaagaaattctgatgttttgtaaataggtaattcctggggtttctttgcgcgactcaaatctttttgcttgcaggaaaaataaagcgaatttgtgagacggagctaggtattgtttcacaatgttgtaagcctgtgcaagctgcaaagtttagcaaccaatattttgaaaatgttgctctcaagatcaatgctaaggtatgtgttttgcctcactggtggtgatttgatatagtgttttcttgtcttgttatcttaattcatttgagaattgtaaattctgtaggttggggggcgaaatactgtgctgaacgatgctattttaaggagaattccgcttgtgactgatgtccctacaatcatttttggggcagatgtcactcatccgccgcctggcgaagactctagttcttctatagctgcagtaagcatattcattgttctctacatccccattttgttacttgatcatatttaagaggttattggctggatgcaggtcgttgcttcaatggattggcctgaggtaaccaagtatcgtggaattgtctctgcacagactcaccggatggaaataatccaggatctttataaacaaacaaaggatccacagaagggtttagttgagggtggaatggttaggtagggagatagatttatttcgggcttaattttttagtttcttctggacgtgctctactttcttaacatttcaagttctctgcagggaattgcttgttgctttcttcaagtcaacaagacaaaagccttctagaattatcttctataggtaatgtttgcttttgaccatccaaatatatgtatatacttctagcagcagtgctgacatctgatttttgatgtggcagaggtggtgttagtgaaggacaattcagccaagttttgctttatgaaatggatgcgatttggaaggtattgaaatcactgtataatgtctattatagttggttcactgtataatggatgcttctgacccctgcagttttcttccttccaggcttgttcctcgctacaggaaggatatatgcctcgggttacatttgttgtggttcaaaagaggcatcatactcgcttattccctactgatcgcaacaaaactgatgggagtggcaacatattaccaggtgattctaatcttataatagggatttgatcgtattctcttgatcttcattttgttagcatattttaatgtagccaataaattttaggtactgttgtggatactagcatctgtcatccaaccgagtttgatttttatctcaatagtcatgctggaatcctggttaaatgaggcttcccttgaagtgtgatggtttttatgttaattttgtccgatctgatactgatgttgttgtgtaggggacaagcaaggccacacgttaccacgttttgtttgatgaaaatggcttcagtgctgacatcttgcaagtgctcacaaacagtttatgttacacgtatgtgtttactcctttctctataatcctgtaatggggtgaataaataatgctttagatcagcactagtaattatatagtaataattttactttgtggataggtatgcgaggtgtaccaagtccgtttccataggtttgtgatgatgtttttttgtcttgttaaatttgttaacttaaggttggttttgacagtgaatatttgaattatatgtttgcagtgcctccggcatactatgctcacctcgctgcttatagggcacgctattatattgaggatgagatgtcggatagtgggtctactggtggaggccgaaagccgaaagacaaggttgtagagtttaggccgctccccagcataaaggacaatgtgaaggaagtgtttggttggtggaaagttgcgcaagtatagttgcacagtttgtggatgatggtggagtcttgttgattccattggtggactttgtaattatttaattttggagtttctgttttggtggttgagcgaattgtcgtctgaagtttggattaccataatgcacacactgtttgtggattacgaaaatttcagaaatgtcctgtattttcaagaaaagttcttagaaaggatttttagtattatttttaagtttcttttagatcaccaattaatacaagtgatgatgaaattttaaagaataa

SEQ ID NO: 531 - DNA, 14580 bp, Gossypium raimondii
  source 1..14580: mol_type = genomic DNA
aaattatattaataattatcgatttaaattcgtaatatataaacattaaaaggcaattagtaacgatattcaatgatcatatattctcattgaaaatcaatatataattaataacaatattaaaaaaaataaaaaagtaaaaaaatagcaaaaaaactgacttccggacgcgaccctccaaattcgtcacccagtaaggtacgactaagggacgattttcatcaatgttgacgttgtgcaaaagagttggactcatccatagtttcctcaataatgagggcaaattcgtcatctagagatttcactcaattagatatcctggatcgcgctaccgccaactcggcgggtcaagttcggttatgtttgtattcttcaacctgcttatttattcttcaccaaccatttagttgttaattagtttttaaataatatataatttttttgaataaataatatataaatttaaaattatataaaaagataaaaaataatattaattttaaaaaataaaaagtatcctaaattatatacataaaaataccaatgataatatacaaacaatgttataaaataatatataataatataagcagtattttgcataaatatatacaaaaaatatatcataataaataaataaaattatcatggttagatatatatattattttgtaaatcgataattatgaataaatcatatttatattatatacagaggcgaatttaggatgcttgcataagcccagcccaacccccctaaaatgaaaaattactatttagatcatttaatttttttaattttaaattaataaagataaaattgcacattaactcgtataaaattaaaaaaaatttgatttaatcttttaaaagttataaagatatagactataaaaaattaaaatttcgttcagcccctttaaagaattgttctggcttcgccactggttgtatatattaatcatatcaaccatacatccataaaaagcaatatacatcatatacatacgtcaaaattactattttttattataatatttatttcaaataataaataataaataataaaattaaaattattatgattatcacaaatttgttttaattataactattatcatattttttgatttttttaaaattaataattatttttaaatgtaaatttagtaatataatgaaaaataaaatatattttggtaagttccaaattcgtgcttatatattacagttaaataatattttatttaattttaaatttaatatttatttacaaattaacacaaagaataaagaatagaaaaaagagaggataaaaatgaaaacaaatcgggtattttctaaacgaaaaaggggtcagttcgggtttattttttacacccgaacccggcatgattcactaaaagagcgtgtccatttttacacgtccccgaacattgcgtcatcatctgcttctattataaaatgggctcattcattcctagcctctctgtactcaagagtcaagagtgtcgtttgtttcattttttgtcccttctgttttggagtttttgaaattttcatctgtttgcttagttttccaaatttccggcaatgtctggccgaggcggtggtgaacgtggcagtggtcggggtggtggtcgacgtggccgggggcagggccgtggtcgcggtcaaccttcgcagtcttcctctcgcggcggcggcggtagagcaagaggccgtggatcatctggttctactgcaacttataatccccctcctcctcaaatggctccggctcagccacctcctcaaatggctgtagctacgccagttcctccatcgggggcccctttttctcatccttcttcaagttctggtgtaggatcactttccagagaggtatcggagaagcttacaatggagccggtggctgtgactacggcgcctcctcttcctccgtcgtcgtcaaaggcgattaggttccctccaagaccggggttcggcacggtcggtacaaagtgtgtggttagggccaaccattttctcgtagatgttgctaatgccgatcttcatcactacgatgtaactttctttctcgcatgtctccctatttgattttaagcctgtattttttctcgacatttttggcttgttgttctaatcggttttttttttttatatttgttaaaattttctttcttttttgcttgtatatgtctgcttccttccttttgacctatctatggatttaagttttcagtaattactttgaaaaaccgagggaaaccttcactgttaatggcttgcttaaacgaattccacttgtttagatcatattttttgaattctaatgttttcatgtttctgttctcttattcatttaccttgttcatccctgatacttgcattttcttctccaatattttaatcgctagttttccttgtcatttttctgccttgttttaatcgttttatattttggcacttcttagagctctgttttttatccgactttactatacactgaaggttttagtagttgcttttccttaaaaaaacccaagggaaagtttaactgttaatgatttgcttgactgagttgggctttttgttatttattgtctcgttaaattttattttcattggattttaatgtgtattttactcatctgttttcttatttatttacttgtctctttgtccatctctgttacttgcatcttcttctcgtctcttttgatggcctttggtgcttcattgcttataggttactataacgcctgaggtaaccgcaaaaaaggttaacagagcaataatgaagcaacttattgatgtatacaaagagtcgcatcttggacgtcggtgtccagcttatgatggcaggaagagtttgtacactgctggtcctcttcccttcgagtcaaaggagcttgttatcaagctacctgaggaagatcgcagtgctggttcgtctaggcctgcgcggtaatattattgtatcctatgatggtctcatgacattttacattttatccgatgtcattattgcttacctgtgatctttctggttgcctgtcactgcaggaaggagcgacaatttaaggttgcaatcaaattggcctccaagccagaccttcattatctgagggagtttctgagcagaaagcattttgaatgccctcaagaagctattcaagttctggatgttgttcttagagctaaaccatctcagacgtaactgcctgttgattgctgttaaacattgcttgctgttaaattgctgaaaccattttatatgacatcaaattaatacatttgaaacatcatttggcagatatactgaggtgggaaggtcttttttccatacatcattaggtcctagaggagaacttggtaatggaatagaatactggtctggatattatcagagtcttcgacccactcagatgggtttatctcttaatattggtaggtactttgattgctcagtttgtgtagccactttgttcctaatgtttcagtatgaagatttactggttttgctttgcagatgtgtctgctcgatcattctatgagccaattttagtttcagagtttgttgcgaaacatttccgacgatcaaacctgtcaaagccgctgtctgatcaagatcgtattaaagtattattacactgttttcttgcccttcgtatatattgaattcagtgtttattaatcaaaacttgcagaatatttttggaatgcttcttttgctgtattctttaggtgaaaaaggccttgaagggagtaagagttaagctcatctacatggattatgccaaaacttgcaagattattggagtatctagagaccctataagccagttgacgtgagtttgttgttataatactatacgtgctcaaaaatatttttagtaagctacttttatgtggcctgtgtggtagaattgtttttgggttatttgtagtcttgtattcactacttatctaagttccatcttcaaattgagttggtttttttttttttttttgtggttgacagtttttagtatttggcttggttatgtcttgttctaaaatattgtttatgcttgtgcatttgtaaaatcttgtgctatggtatatttgtcccattctgtctcattatgcttctgttcaatttttggcttttttagatttactcatgatgataagagaacaaatgtctctgtggtcaagtatttccgtgagaaatacaatgttgtgcttaaatatccatccttgcctgcacttcaaagtggaagcgaagctagacctgtctacctgccaatggaggtttttactttatatcaagatcttgttttttgttttctttttgtttgttactgattctcttgtatgattttgttttacagctttgtagtatcgttgagggtcaaagatacacaaaaaaactaaatgaacaacaagttagatctctgctgagagcaacttgtcaacgtccgaacattagggaggggaatattacaaaggtactacagttttggatgcttattattttttaaatttgttgataagatgagaattgtgattcatttggcatttcatgtttctgcagatggtccaggtcaataattttgaggtggaggagcttgttactaaagaatttggaatgcatgttcgcaaagaacttgcattgattaatgcacgagttctaaatcctccagtggtacttatatgccaatatgttatattttcaaggatactgtccgtcttataataagattaatgtcggttttggttgctgcagctaaagtatcacgatagtggacgtgacaaaattgttaatcctagctgtgggcaatggaacatgatcaacaaggtgatttttttttcttcccctcttattctttgaagtggcattatttgtaaaatttaaggaattagacctgtctcttcagtctcctcttgttccagagttcttgttcattttttttcaattcatttttaaggtttgcagcgtctcttctttgcagtttagtgtagctgtaagtcttttgggaaaattttgctaggttttaaggttcaacattttttttgcagaaaatggtcaatgggggtaaagttgatttctggtcttgtgtgaacttctcctctgaatataggaatatgtcagaagacttctgtgcggggctggtgaatatgtgtaacagcaaaggaatggtatgctgtgtggtttttttagtgtaggtggatggtacatctgttatttattcatcactagcttgatttccgattttgttactctaggtgtttcgccaaactccttcaattgcaatgcgatcagctcgtgctgatcgaattgatcagactctcatggatgtatacaaagagtctgcaggcttgaataagccacttaagttgttgataattatcttacctgatcagactggctcatatggtaagaaattctgatgttttgtaaataggtaattcctggggtttctttgcgcaactctaatctttttgtttgcaggaaaaataaagcgaatttgtgagacggagctaggtattgtttcacaatgttgtaagcctgcgcaagcttcaaagtttagcaaccaatattttgaaaatgttgctctcaagatcaatgctaaggtatctgttttgcctcactggtggtgatttgatatagtggtttcttgtcttgctatcttcttttaaatcatttgagaattgtaaattctgtaggttggggggagaaatactgtgctgaacgatgctgttttaaggagaattccgcttgtgactgatgtccctacaatcatttttggggcagatgtcactcatccgccgcctggcgaagactctagttcttctatagctgcagtaagcatattcattattctctatcatccccattttgttacttgatcatatttaagaggttattggctggctgcaggtcgttgcttcaatggattggcctgaggtaaccaagtatcgtggaattgtctctgcacagactcaccgggtggaaataatcgaggatctttataaacaaactagggatccacagaagggtttagttgagggtggaatggttaggtagggagatagatttatttcaggcttaaatttttagtttcttctggaagtgctctactttcttaacatttcaagttctctgcagggagttgcttcttgctttctacaggtcaacgaaacaaaagccttctagaattatcttctataggtaatgtttgcttttgaccatccaaatctatgtatatatttctagcagcagtgctgatatctgatttttgatgtgtggcagagatggtgttagtgaaggacaattcagccaagttttgctttatgaaatggatgcgattcggaaggtattgaaatcactgtataatttctattatagttagttcactgtataatggatgcaatgatttttggtgtttgggccttctgacccccgcagttttcttccttccaggcttgttcctcgctacaggaaggatatatgcctcgggttacatttgttgtggttcaaaagaggcatcatactcgcttattccctactgatcgcaacaaaactgataggagtggcaacatattaccaggtgattctaatcttataatagggatttgatcgtattctcttgatcttcattttgttagcatattttaatgtagccaataacttttaggtactgttgtggatactagcatctgtcatccaactgagtttgatttttatctcaatagtcatgctggaatccaggtaaaatgaggccttcccttgaagtgtgatggtttttatgttaattttgtccgatctgatattgatattgatgttgttgtgtaggggacaagcaagcccacacattaccacgttttgttggatgaaaatggcttcagtgctgacatcttgcaagtgctcacaaacaatttatgttacacgtatgtgtttactcctttctctataatcttgaaatggggtgaataaataatgctttagatcagcactagcaattatatagtaataattttactttgtggacaggtatgcgaggtgtaccaagtccgtttccataggtttgtgatgatgtttttttgtcttgttaaatttgttgactaaggttggttttgacagtaatatttggattatatgtttgcagttcctccggcgtactatgctcacctcgctgcttatagggcacgctattatattgaggatgagatgtcggatagtgggtctactggtggaggccgaaagccgaaagacaaggttgtagaggttaggccgctgcccagcataaaggataatgtgaaggaagtgatgttctacgtctgataaattatgtttggttgattgtgggaagttgcgcaagtatagttgcacagtttgtggatgatggtggagtctaattttggagtttttgttttggtggttgagcgacttgttgtctgaagtttgaattattataaatcacacactgtttgtggattacgaaaattacataaatgttctttatttttaagacatgttcttagaaaggagttttggtatcattcttaagcttcttttatatcaccgattaatacaagagacgatgaaattttagagaataatgtctttttattaagagtttttaaatgttcagtacacaaatggtaagatacgctcggaaatcctcactgctcctccttgcaactccaatgaataaaaaagcaaacctaatcaatttactttttaatttaccattttaataaacatagtaaatacaattttattaacttattaaataattttataaatttacatatttttaataatttcataaaagtgtgataattttaaaaacttttattatatataatttttaatctaatgttttcaatagttatattttattatcatatcactttacaattacgtttgaaattaaatatacacctcaccactgtttttattctcactgctattgctgtttttaactttaccgaagataaatgtatcgtccatcccaattaaaccttagtccatttatagtggtttttttacttcgttaaagctagacaaactatgccattaaaattttaatagcttaagtttagattggatgagcgatgcgtttattttcggtgagattaaaaacaacaatggtagttaaattagttactgtagcgatgaaattagatactgtagtagtgatattagaaattgcggtaaggtgtgtgtttagattcaaacgcaactataacgatgagttgagaatagaaaataactattaaagacattagatttatgagttctctctcctttcatcttttttttcacccttaaattctgttgatgaataaaaaatattctttaaatatcaaaggaaagctctcatttaatcctctcatctgattgtatgaaaacagttttgttcattcgtcagttattctgctctatcattgcttttatctgtttcatttttttccaatctaaaactaaaaaataagcaccatcttttccattcatgatgacacagaaggtgaagaaaattataaattttgattcatcaatgggtatgggtggttaaccaaaatagagaagataaaaaaagaagaagcaatgtttaaaataaaagtcattttcctttttttaaaaatatggatgattgataattttaaaaataattttcattattttcaccaaaatgttttgtagaattaaaaaagacgagaacaagagttttttaattttaaatgaacgagttcacaatgggttcaaatccatataaacacaaaaaaataattatttttcaacagtttttttttctaatattgaattcgataccctgatttgaatccatataaatacaaaatttattttattttattaaaacatgtttttatttctatttatcaattttaaaaaaaatagaaaatgaaaatcatgtttctatttaccaaatatttcacaaattaaactgactttaattgtttaaaaaaaagaaaaaaaattctattattttctggtgaagtagaaattaggaaagggaagggatgcttgctatggaaattgtggatggaaaaaaggaagttgtcaataaagaaaaaaaaaaatttttggtatttttttatgtccgttttattgtttatgtttggggttcgtggttgttcttctcaacaatgtcatcttcaatgtttaaatctatgtctcaaattaagaatacaatgtgccttaccattacacccaacacttgttggtaaaaaaaaagtttaaaatttatatgatattttaaaaacatatagataatttaatggtaaaattataattttatttttttgaaggataatgctaatattgtaattatatttattattgtaattttacataaaaattaaattaattaacttgtaacatcaactaagttaaatatttctttaagtattaaattatgtaaaaaatatattaataaataggtgaaatgaggttttggttgaacctgatttcttaagtttaacccttactaccctaactcaacgacattattttttgaaagaactcgatcaagattgctttttccgtagttacttttccttaaaaaaacccaagggaaagtttaactgttaatgatttgcttaaatgagttgggctttttgttatttattgtctcgttaatttttattttcattggattttaatgtgtattttccttttctgttttcttatttatttacttgtctctttgtccatctctgttacttgcatcttcttctcgtctcttttgatggcctttggtgcttcattgcttataggttactgtaacgcctgaggtaaccgcaaaaaaggttaacagagcaataatgaagcaacttattgatgtatacaaagagtcgcatcttggacgtcggtgtccagcttatgatggcaggaagagtttgtacactgctggtcctcttcccttcgagtcaaaggagcttgttatcaagctacctgaggaagatcgcagtgctggttcgtctaggcctgcgcggtaatattattgtatcctatgatggtctcttgacattttacattatatccgatgtcataattgcttacctctgatctttctggttgcctgtcactgcaggaaggagcgacaatttaaggttgcaatcaaactggcctccaagccagaccttcattatctcagggagtttttgagcagaaagcattttgaatgtcctcaagaagctattcaagttctggatgttgttcttagagctaaaccatctcagatgtaactgcctgttgattaatgttaaacatttctggctattaaattgttgaaaccattttatatgacatcaaattaatacatttgaaacatcatttggcagatatactgaggtgggaaggtcttttttctatacatcattaggtcctagaggagaacttggtaatggaacagaatactggtctggatattatcagagtcttcgacccactcagatgggtttatctcttaatattggtaggtactttgattgctcagtttgtgtagccactttgttcctaatgtttcagtatgaagatttactggttttgctttgcagatgtgtctgctcgatcattctatgagccaattttagtttcagagtttgttgtgaaacatttccgacgatcaaacctgtcaaagccgctgtctgatcaagatcgtattaaagtacgtatatattgaattcagtgtttattaatcaaaacttgcagaatttttttgcaatgcttcttttgccgtattttttaggtgaaaaaggccttgaagggagtaagagttaggctcatctacatggattatgccaaaacttgcaagattattggagtatctagagaccctataagccagttgacgtgagtttgttgttataatactatacctgctcataaatatttttagtaagctacttttatgtggcctgtgtggtagaattgtttttgggttatttgtagtcttgtattcactacttatctaagttacatcttaaaattgagttggttttatttttattttttgcagttgacagtttttagtatttggcttggttatgtcttgttctaaaatattgtttatgcttatacatttgtaaaatcttgtgcttatggtacatttgtaccattctgtctcattatgtttctgttcaatttttggctgttttagatttcctcttgatgataagagaacaaatgtctctgtggtcaagtatttccgtgagaaatacaatgttgtgcttaaatatccatccttgcctgcacttcaaagtggaagtgaagctagacctgtctacctgccaatggaggtttttactttatatcaagatgatcttgtttttgttttctttttgtttgttactgattctcctgtatgattttgttttacagctttgtagtatcgttgagggtcaaagatacacaaaaaaactaaatgaacaacaagttagatctctgctgagagcaacttgtcaacgtccgaacattagggaggggaatattacaaaggtactacagttttggatgcttattattttttaaattggttgataagatgagaattttgattcattggcatttcatgtttctgcagatggtccaggtcaataattttgaggtggaggagcttgttactaaagaatttggaatgcatgttcgcaaagaacttgcattgattaatgcacaagttctaaatcctccagtggtacttttaagccaatatgttatattttcaaggatactgtcagtcttataatacgattaatgtctgttttggttgctgcagctaaagtatcacgatagtggacgtgacaaaatcgttaatcctagttgcgggcaatggaacatgatcaacaaggtggtatttttttttcttcccctcttctttgaagtggcattgtttgtaaaatttaaggaatcagacctgtctcttcagtctcctcttgttccagagttcttgttcattttttcaattcatttttaaggtagctataagtcttttgggaaaattttgataggttttaaggttcaacagttttttttttttttttgcagaaaatggtcaattggggtaaagtcgatttctggtcttgtgtgaacttctcctcggaatattggaatatgtcagaagagttctgtgcggagctggtgaatatgtgtaacaacaaaggaatggtatgctgtgtggttttttttagtgtaggtggatggtatatctgttatttatttatcactagcatgatttcccattttgtgactctaggtgttttgccaaactccttcaattgcaatgcgatcagcttgtgctgaccgaattgatcagattctcatggatgtatacaaagagtctgcaggcttgaataagccacttcagttgttgataattatcttacctgatcagactggctcttacggtaagaaattctgatgttttgtaaataggtaattcctggggtttctttgcgcgactcaaatctttttgcttgcaggaaaaataaagcgaatttgtgagacggagctaggtattgtttcacaatgttgtaagcctgtgcaagctgcaaagtttagcaaccaatattttgaaaatgttgctctcaagatcaatgctaaggtatgtgttttgcctcactggtggtgatttgatatagtgttttcttgtcttgttatcttaattcatttgagaattgtaaattctgtaggttggggggcgaaatactgtgctgaacgatgctattttaaggagaattccgcttgtgactgatgtccctacaatcatttttggggcagatgtcactcatccgccgcctggcgaagactctagttcttctatagctgcagtaagcatattcattgttctctacatccccattttgttacttgatcatatttaagaggttattggctggatgcaggtcgttgcttcaatggattggcctgaggtaaccaagtatcgtggaattgtctctgcacagactcaccggatggaaataatccaggatctttataaacaaacaaaggatccacagaagggtttagttgagggtggaatggttaggtagggagatagatttatttcgggcttaattttttagtttcttctggacgtgctctactttcttaacatttcaagttctctgcagggaattgcttgttgctttcttcaagtcaacaagacaaaagccttctagaattatcttctataggtaatgtttgcttttgaccatccaaatatatgtatatacttctagcagcagtgctgacatctgatttttgatgtggcagaggtggtgttagtgaaggacaattcagccaagttttgctttatgaaatggatgcgatttggaaggtattgaaatcactgtataatgtctattatagttggttcactgtataatggatgcttctgacccctgcagttttcttccttccaggcttgttcctcgctacaggaaggatatatgcctcgggttacatttgttgtggttcaaaagaggcatcatactcgcttattccctactgatcgcaacaaaactgatgggagtggcaacatattaccaggtgattctaatcttataatagggatttgatcgtattctcttgatcttcattttgttagcatattttaatgtagccaataaattttaggtactgttgtggatactagcatctgtcatccaaccgagtttgatttttatctcaatagtcatgctggaatcctggttaaatgaggcttcccttgaagtgtgatggtttttatgttaattttgtccgatctgatactgatgttgttgtgtaggggacaagcaaggccacacgttaccacgttttgtttgatgaaaatggcttcagtgctgacatcttgcaagtgctcacaaacagtttatgttacacgtatgtgtttactcctttctctataatcctgtaatggggtgaataaataatgctttagatcagcactagtaattatatagtaataattttactttgtggataggtatgcgaggtgtaccaagtccgtttccataggtttgtgatgatgtttttttgtcttgttaaatttgttaacttaaggttggttttgacagtgaatatttgaattatatgtttgcagtgcctccggcatactatgctcacctcgctgcttatagggcacgctattatattgaggatgagatgtcggatagtgggtctactggtggaggccgaaagccgaaagacaaggttgtagagtttaggccgctccccagcataaaggacaatgtgaaggaagtgtttggttggtggaaagttgcgcaagtatagttgcacagtttgtggatgatggtggagtcttgttgattccattggtggactttgtaattatttaattttggagtttctgttttggtggttgagcgaattgtcgtctgaagtttggattaccataatgcacacactgtttgtggattacgaaaatttcagaaatgtcctgtattttcaagaaaagttcttagaaaggatttttagtattatttttaagtttcttttagatcaccaattaatacaagtgatgatgaaattttaaagaataatgt

SEQ ID NO: 532 - DNA, 14580 bp, Gossypium raimondii; identical to SEQ ID NO: 531
  source 1..14580: mol_type = genomic DNA

SEQ ID NO: 533 - DNA, 14580 bp, Gossypium raimondii; identical to SEQ ID NO: 531
  source 1..14580: mol_type = genomic DNA

SEQ ID NO: 534 - DNA, 14234 bp, Gossypium raimondii
  source 1..14234: mol_type = genomic DNA
aaattatattaataattatcgatttaaattcgtaatatataaacattaaaaggcaattagtaacgatattcaatgatcatatattctcattgaaaatcaatatataattaataacaatattaaaaaaaataaaaaagtaaaaaaatagcaaaaaaactgacttccggacgcgaccctccaaattcgtcacccagtaaggtacgactaagggacgattttcatcaatgttgacgttgtgcaaaagagttggactcatccatagtttcctcaataatgagggcaaattcgtcatctagagatttcactcaattagatatcctggatcgcgctaccgccaactcggcgggtcaagttcggttatgtttgtattcttcaacctgcttatttattcttcaccaaccatttagttgttaattagtttttaaataatatataatttttttgaataaataatatataaatttaaaattatataaaaagataaaaaataatattaattttaaaaaataaaaagtatcctaaattatatacataaaaataccaatgataatatacaaacaatgttataaaataatatataataatataagcagtattttgcataaatatatacaaaaaatatatcataataaataaataaaattatcatggttagatatatatattattttgtaaatcgataattatgaataaatcatatttatattatatacagaggcgaatttaggatgcttgcataagcccagcccaacccccctaaaatgaaaaattactatttagatcatttaatttttttaattttaaattaataaagataaaattgcacattaactcgtataaaattaaaaaaaatttgatttaatcttttaaaagttataaagatatagactataaaaaattaaaatttcgttcagcccctttaaagaattgttctggcttcgccactggttgtatatattaatcatatcaaccatacatccataaaaagcaatatacatcatatacatacgtcaaaattactattttttattataatatttatttcaaataataaataataaataataaaattaaaattattatgattatcacaaatttgttttaattataactattatcatattttttgatttttttaaaattaataattatttttaaatgtaaatttagtaatataatgaaaaataaaatatattttggtaagttccaaattcgtgcttatatattacagttaaataatattttatttaattttaaatttaatatttatttacaaattaacacaaagaataaagaatagaaaaaagagaggataaaaatgaaaacaaatcgggtattttctaaacgaaaaaggggtcagttcgggtttattttttacacccgaacccggcatgattcactaaaagagcgtgtccatttttacacgtccccgaacattgcgtcatcatctgcttctattataaaatgggctcattcattcctagcctctctgtactcaagagtcaagagtgtcgtttgtttcattttttgtcccttctgttttggagtttttgaaattttcatctgtttgcttagttttccaaatttccggcaatgtctggccgaggcggtggtgaacgtggcagtggtcggggtggtggtcgacgtggccgggggcagggccgtggtcgcggtcaaccttcgcagtcttcctctcgcggcggcggcggtagagcaagaggccgtggatcatctggttctactgcaacttataatccccctcctcctcaaatggctccggctcagccacctcctcaaatggctgtagctacgccagttcctccatcgggggcccctttttctcatccttcttcaagttctggtgtaggatcactttccagagaggtatcggagaagcttacaatggagccggtggctgtgactacggcgcctcctcttcctccgtcgtcgtcaaaggcgattaggttccctccaagaccggggttcggcacggtcggtacaaagtgtgtggttagggccaaccattttctcgtagatgttgctaatgccgatcttcatcactacgatgtaactttctttctcgcatgtctccctatttgattttaagcctgtattttttctcgacatttttggcttgttgttctaatcggttttttttttttatatttgttaaaattttctttcttttttgcttgtatatgtctgcttccttccttttgacctatctatggatttaagttttcagtaattactttgaaaaaccgagggaaaccttcactgttaatggcttgcttaaacgaattccacttgtttagatcatattttttgaattctaatgttttcatgtttctgttctcttattcatttaccttgttcatccctgatacttgcattttcttctccaatattttaatcgctagttttccttgtcatttttctgccttgttttaatcgttttatattttggcacttcttagagctctgttttttatccgactttactatacactgaaggttttagtagttgcttttccttaaaaaaacccaagggaaagtttaactgttaatgatttgcttgactgagttgggctttttgttatttattgtctcgttaaattttattttcattggattttaatgtgtattttactcatctgttttcttatttatttacttgtctctttgtccatctctgttacttgcatcttcttctcgtctcttttgatggcctttggtgcttcattgcttataggttactataacgcctgaggtaaccgcaaaaaaggttaacagagcaataatgaagcaacttattgatgtatacaaagagtcgcatcttggacgtcggtgtccagcttatgatggcaggaagagtttgtacactgctggtcctcttcccttcgagtcaaaggagcttgttatcaagctacctgaggaagatcgcagtgctggttcgtctaggcctgcgcggtaatattattgtatcctatgatggtctcatgacattttacattttatccgatgtcattattgcttacctgtgatctttctggttgcctgtcactgcaggaaggagcgacaatttaaggttgcaatcaaattggcctccaagccagaccttcattatctgagggagtttctgagcagaaagcattttgaatgccctcaagaagctattcaagttctggatgttgttcttagagctaaaccatctcagacgtaactgcctgttgattgctgttaaacattgcttgctgttaaattgctgaaaccattttatatgacatcaaattaatacatttgaaacatcatttggcagatatactgaggtgggaaggtcttttttccatacatcattaggtcctagaggagaacttggtaatggaatagaatactggtctggatattatcagagtcttcgacccactcagatgggtttatctcttaatattggtaggtactttgattgctcagtttgtgtagccactttgttcctaatgtttcagtatgaagatttactggttttgctttgcagatgtgtctgctcgatcattctatgagccaattttagtttcagagtttgttgcgaaacatttccgacgatcaaacctgtcaaagccgctgtctgatcaagatcgtattaaagtattattacactgttttcttgcccttcgtatatattgaattcagtgtttattaatcaaaacttgcagaatatttttggaatgcttcttttgctgtattctttaggtgaaaaaggccttgaagggagtaagagttaagctcatctacatggattatgccaaaacttgcaagattattggagtatctagagaccctataagccagttgacgtgagtttgttgttataatactatacgtgctcaaaaatatttttagtaagctacttttatgtggcctgtgtggtagaattgtttttgggttatttgtagtcttgtattcactacttatctaagttccatcttcaaattgagttggtttttttttttttttttgtggttgacagtttttagtatttggcttggttatgtcttgttctaaaatattgtttatgcttgtgcatttgtaaaatcttgtgctatggtatatttgtcccattctgtctcattatgcttctgttcaatttttggcttttttagatttactcatgatgataagagaacaaatgtctctgtggtcaagtatttccgtgagaaatacaatgttgtgcttaaatatccatccttgcctgcacttcaaagtggaagcgaagctagacctgtctacctgccaatggaggtttttactttatatcaagatcttgttttttgttttctttttgtttgttactgattctcttgtatgattttgttttacagctttgtagtatcgttgagggtcaaagatacacaaaaaaactaaatgaacaacaagttagatctctgctgagagcaacttgtcaacgtccgaacattagggaggggaatattacaaaggtactacagttttggatgcttattattttttaaatttgttgataagatgagaattgtgattcatttggcatttcatgtttctgcagatggtccaggtcaataattttgaggtggaggagcttgttactaaagaatttggaatgcatgttcgcaaagaacttgcattgattaatgcacgagttctaaatcctccagtggtacttatatgccaatatgttatattttcaaggatactgtccgtcttataataagattaatgtcggttttggttgctgcagctaaagtatcacgatagtggacgtgacaaaattgttaatcctagctgtgggcaatggaacatgatcaacaaggtgatttttttttcttcccctcttattctttgaagtggcattatttgtaaaatttaaggaattagacctgtctcttcagtctcctcttgttccagagttcttgttcattttttttcaattcatttttaaggtttgcagcgtctcttctttgcagtttagtgtagctgtaagtcttttgggaaaattttgctaggttttaaggttcaacattttttttgcagaaaatggtcaatgggggtaaagttgatttctggtcttgtgtgaacttctcctctgaatataggaatatgtcagaagacttctgtgcggggctggtgaatatgtgtaacagcaaaggaatggtatgctgtgtggtttttttagtgtaggtggatggtacatctgttatttattcatcactagcttgatttccgattttgttactctaggtgtttcgccaaactccttcaattgcaatgcgatcagctcgtgctgatcgaattgatcagactctcatggatgtatacaaagagtctgcaggcttgaataagccacttaagttgttgataattatcttacctgatcagactggctcatatggtaagaaattctgatgttttgtaaataggtaattcctggggtttctttgcgcaactctaatctttttgtttgcaggaaaaataaagcgaatttgtgagacggagctaggtattgtttcacaatgttgtaagcctgcgcaagcttcaaagtttagcaaccaatattttgaaaatgttgctctcaagatcaatgctaaggtatctgttttgcctcactggtggtgatttgatatagtggtttcttgtcttgctatcttcttttaaatcatttgagaattgtaaattctgtaggttggggggagaaatactgtgctgaacgatgctgttttaaggagaattccgcttgtgactgatgtccctacaatcatttttggggcagatgtcactcatccgccgcctggcgaagactctagttcttctatagctgcagtaagcatattcattattctctatcatccccattttgttacttgatcatatttaagaggttattggctggctgcaggtcgttgcttcaatggattggcctgaggtaaccaagtatcgtggaattgtctctgcacagactcaccgggtggaaataatcgaggatctttataaacaaactagggatccacagaagggtttagttgagggtggaatggttaggtagggagatagatttatttcaggcttaaatttttagtttcttctggaagtgctctactttcttaacatttcaagttctctgcagggagttgcttcttgctttctacaggtcaacgaaacaaaagccttctagaattatcttctataggtaatgtttgcttttgaccatccaaatctatgtatatatttctagcagcagtgctgatatctgatttttgatgtgtggcagagatggtgttagtgaaggacaattcagccaagttttgctttatgaaatggatgcgattcggaaggtattgaaatcactgtataatttctattatagttagttcactgtataatggatgcaatgatttttggtgtttgggccttctgacccccgcagttttcttccttccaggcttgttcctcgctacaggaaggatatatgcctcgggttacatttgttgtggttcaaaagaggcatcatactcgcttattccctactgatcgcaacaaaactgataggagtggcaacatattaccaggtgattctaatcttataatagggatttgatcgtattctcttgatcttcattttgttagcatattttaatgtagccaataacttttaggtactgttgtggatactagcatctgtcatccaactgagtttgatttttatctcaatagtcatgctggaatccaggtaaaatgaggccttcccttgaagtgtgatggtttttatgttaattttgtccgatctgatattgatattgatgttgttgtgtaggggacaagcaagcccacacattaccacgttttgttggatgaaaatggcttcagtgctgacatcttgcaagtgctcacaaacaatttatgttacacgtatgtgtttactcctttctctataatcttgaaatggggtgaataaataatgctttagatcagcactagcaattatatagtaataattttactttgtggacaggtatgcgaggtgtaccaagtccgtttccataggtttgtgatgatgtttttttgtcttgttaaatttgttgactaaggttggttttgacagtaatatttggattatatgtttgcagttcctccggcgtactatgctcacctcgctgcttatagggcacgctattatattgaggatgagatgtcggatagtgggtctactggtggaggccgaaagccgaaagacaaggttgtagaggttaggccgctgcccagcataaaggataatgtgaaggaagtgatgttctacgtctgataaattatgtttggttgattgtgggaagttgcgcaagtatagttgcacagtttgtggatgatggtggagtctaattttggagtttttgttttggtggttgagcgacttgttgtctgaagtttgaattattataaatcacacactgtttgtggattacgaaaattacataaatgttctttatttttaagacatgttcttagaaaggagttttggtatcattcttaagcttcttttatatcaccgattaatacaagagacgatgaaattttagagaataatgtctttttattaagagtttttaaatgttcagtacacaaatggtaagatacgctcggaaatcctcactgctcctccttgcaactccaatgaataaaaaagcaaacctaatcaatttactttttaatttaccattttaataaacatagtaaatacaattttattaacttattaaataattttataaatttacatatttttaataatttcataaaagtgtgataattttaaaaacttttattatatataatttttaatctaatgttttcaatagttatattttattatcatatcactttacaattacgtttgaaattaaatatacacctcaccactgtttttattctcactgctattgctgtttttaactttaccgaagataaatgtatcgtccatcccaattaaaccttagtccatttatagtggtttttttacttcgttaaagctagacaaactatgccattaaaattttaatagcttaagtttagattggatgagcgatgcgtttattttcggtgagattaaaaacaacaatggtagttaaattagttactgtagcgatgaaattagatactgtagtagtgatattagaaattgcggtaaggtgtgtgtttagattcaaacgcaactataacgatgagttgagaatagaaaataactattaaagacattagatttatgagttctctctcctttcatcttttttttcacccttaaattctgttgatgaataaaaaatattctttaaatatcaaaggaaagctctcatttaatcctctcatctgattgtatgaaaacagttttgttcattcgtcagttattctgctctatcattgcttttatctgtttcatttttttccaatctaaaactaaaaaataagcaccatcttttccattcatgatgacacagaaggtgaagaaaattataaattttgattcatcaatgggtatgggtggttaaccaaaatagagaagataaaaaaagaagaagcaatgtttaaaataaaagtcattttcctttttttaaaaatatggatgattgataattttaaaaataattttcattattttcaccaaaatgttttgtagaattaaaaaagacgagaacaagagttttttaattttaaatgaacgagttcacaatgggttcaaatccatataaacacaaaaaaataattatttttcaacagtttttttttctaatattgaattcgataccctgatttgaatccatataaatacaaaatttattttattttattaaaacatgtttttatttctatttatcaattttaaaaaaaatagaaaatgaaaatcatgtttctatttaccaaatatttcacaaattaaactgactttaattgtttaaaaaaaagaaaaaaaattctattattttctggtgaagtagaaattaggaaagggaagggatgcttgctatggaaattgtggatggaaaaaaggaagttgtcaataaagaaaaaaaaaaatttttggtatttttttatgtccgttttattgtttatgtttggggttcgtggttgttcttctcaacaatgtcatcttcaatgtttaaatctatgtctcaaattaagaatacaatgtgccttaccattacacccaacacttgttggtaaaaaaaaagtttaaaatttatatgatattttaaaaacatatagataatttaatggtaaaattataattttatttttttgaaggataatgctaatattgtaattatatttattattgtaattttacataaaaattaaattaattaacttgtaacatcaactaagttaaatatttctttaagtattaaattatgtaaaaaatatattaataaataggtgaaatgaggttttggttgaacctgatttcttaagtttaacccttactaccctaactcaacgacattattttttgaaagaactcgatcaagattgctttttccgtagttacttttccttaaaaaaacccaagggaaagtttaactgttaatgatttgcttaaatgagttgggctttttgttatttattgtctcgttaatttttattttcattggattttaatgtgtattttccttttctgttttcttatttatttacttgtctctttgtccatctctgttacttgcatcttcttctcgtctcttttgatggcctttggtgcttcattgcttataggttactgtaacgcctgaggtaaccgcaaaaaaggttaacagagcaataatgaagcaacttattgatgtatacaaagagtcgcatcttggacgtcggtgtccagcttatgatggcaggaagagtttgtacactgctggtcctcttcccttcgagtcaaaggagcttgttatcaagctacctgaggaagatcgcagtgctggttcgtctaggcctgcgcggtaatattattgtatcctatgatggtctcttgacattttacattatatccgatgtcataattgcttacctctgatctttctggttgcctgtcactgcaggaaggagcgacaatttaaggttgcaatcaaactggcctccaagccagaccttcattatctcagggagtttttgagcagaaagcattttgaatgtcctcaagaagctattcaagttctggatgttgttcttagagctaaaccatctcagatgtaactgcctgttgattaatgttaaacatttctggctattaaattgttgaaaccattttatatgacatcaaattaatacatttgaaacatcatttggcagatatactgaggtgggaaggtcttttttctatacatcattaggtcctagaggagaacttggtaatggaacagaatactggtctggatattatcagagtcttcgacccactcagatgggtttatctcttaatattggtaggtactttgattgctcagtttgtgtagccactttgttcctaatgtttcagtatgaagatttactggttttgctttgcagatgtgtctgctcgatcattctatgagccaattttagtttcagagtttgttgtgaaacatttccgacgatcaaacctgtcaaagccgctgtctgatcaagatcgtattaaagtacgtatatattgaattcagtgtttattaatcaaaacttgcagaatttttttgcaatgcttcttttgccgtattttttaggtgaaaaaggccttgaagggagtaagagttaggctcatctacatggattatgccaaaacttgcaagattattggagtatctagagaccctataagccagttgacgtgagtttgttgttataatactatacctgctcataaatatttttagtaagctacttttatgtggcctgtgtggtagaattgtttttgggttatttgtagtcttgtattcactacttatctaagttacatcttaaaattgagttggttttatttttattttttgcagttgacagtttttagtatttggcttggttatgtcttgttctaaaatattgtttatgcttatacatttgtaaaatcttgtgcttatggtacatttgtaccattctgtctcattatgtttctgttcaatttttggctgttttagatttcctcttgatgataagagaacaaatgtctctgtggtcaagtatttccgtgagaaatacaatgttgtgcttaaatatccatccttgcctgcacttcaaagtggaagtgaagctagacctgtctacctgccaatggaggtttttactttatatcaagatgatcttgtttttgttttctttttgtttgttactgattctcctgtatgattttgttttacagctttgtagtatcgttgagggtcaaagatacacaaaaaaactaaatgaacaacaagttagatctctgctgagagcaacttgtcaacgtccgaacattagggaggggaatattacaaaggtactacagttttggatgcttattattttttaaattggttgataagatgagaattttgattcattggcatttcatgtttctgcagatggtccaggtcaataattttgaggtggaggagcttgttactaaagaatttggaatgcatgttcgcaaagaacttgcattgattaatgcacaagttctaaatcctccagtggtacttttaagccaatatgttatattttcaaggatactgtcagtcttataatacgattaatgtctgttttggttgctgcagctaaagtatcacgatagtggacgtgacaaaatcgttaatcctagttgcgggcaatggaacatgatcaacaaggtggtatttttttttcttcccctcttctttgaagtggcattgtttgtaaaatttaaggaatcagacctgtctcttcagtctcctcttgttccagagttcttgttcattttttcaattcatttttaaggtagctataagtcttttgggaaaattttgataggttttaaggttcaacagttttttttttttttttgcagaaaatggtcaattggggtaaagtcgatttctggtcttgtgtgaacttctcctcggaatattggaatatgtcagaagagttctgtgcggagctggtgaatatgtgtaacaacaaaggaatggtatgctgtgtggttttttttagtgtaggtggatggtatatctgttatttatttatcactagcatgatttcccattttgtgactctaggtgttttgccaaactccttcaattgcaatgcgatcagcttgtgctgaccgaattgatcagattctcatggatgtatacaaagagtctgcaggcttgaataagccacttcagttgttgataattatcttacctgatcagactggctcttacggtaagaaattctgatgttttgtaaataggtaattcctggggtttctttgcgcgactcaaatctttttgcttgcaggaaaaataaagcgaatttgtgagacggagctaggtattgtttcacaatgttgtaagcctgtgcaagctgcaaagtttagcaaccaatattttgaaaatgttgctctcaagatcaatgctaaggtatgtgttttgcctcactggtggtgatttgatatagtgttttcttgtcttgttatcttaattcatttgagaattgtaaattctgtaggttggggggcgaaatactgtgctgaacgatgctattttaaggagaattccgcttgtgactgatgtccctacaatcatttttggggcagatgtcactcatccgccgcctggcgaagactctagttcttctatagctgcagtaagcatattcattgttctctacatccccattttgttacttgatcatatttaagaggttattggctggatgcaggtcgttgcttcaatggattggcctgaggtaaccaagtatcgtggaattgtctctgcacagactcaccggatggaaataatccaggatctttataaacaaacaaaggatccacagaagggtttagttgagggtggaatggttaggtagggagatagatttatttcgggcttaattttttagtttcttctggacgtgctctactttcttaacatttcaagttctctgcagggaattgcttgttgctttcttcaagtcaacaagacaaaagccttctagaattatcttctataggtaatgtttgcttttgaccatccaaatatatgtatatacttctagcagcagtgctgacatctgatttttgatgtggcagaggtggtgttagtgaaggacaattcagccaagttttgctttatgaaatggatgcgatttggaaggtattgaaatcactgtataatgtctattatagttggttcactgtataatggatgcttctgacccctgcagttttcttccttccaggcttgttcctcgctacaggaaggatatatgcctcgggttacatttgttgtggttcaaaagaggcatcatactcgcttattccctactgatcgcaacaaaactgatgggagtggcaacatattaccaggtgattctaatcttataatagggatttgatcgtattctcttgatcttcattttgttagcatattttaatgtagccaataaattttaggtactgttgtggatactagcatctgtcatccaaccgagtttgatttttatctcaatagtcatgctggaatcctggttaaatgaggcttcccttgaagtgtgatggtttttatgttaattttgtccgatctgatactgatgttgttgtgtaggggacaagcaaggccacacgttaccacgttttgtttgatgaaaatggcttcagtgctgacatcttgcaagtgctcacaaacagtttatgttacacgtatgtgtttactcctttctctataatcctgtaatggggtgaataaataatgctttagatcagcactagtaattatatagtaataattttactttgtggataggtatgcgaggtgtaccaagtccgtttccataggtttgtgatgatgtttttttgtcttgttaaatttgttaacttaaggttggttttgacagtgaatatttgaattatatgtttgcagtgcctccggcatactatgctcacctcgctgcttatagggcacgctattatattgaggatgagatgtcggatagtgggtctactggtggaggccgaaagccgaaagacaaggttgtag

SEQ ID NO: 535 - DNA, 6579 bp, Gossypium raimondii
  source 1..6579: mol_type = genomic DNA
cgtccatcccaattaaaccttagtccatttatagtggtttttttacttcgttaaagctagacaaactatgccattaaaattttaatagcttaagtttagattggatgagcgatgcgtttattttcggtgagattaaaaacaacaatggtagttaaattagttactgtagcgatgaaattagatactgtagtagtgatattagaaattgcggtaaggtgtgtgtttagattcaaacgcaactataacgatgagttgagaatagaaaataactattaaagacattagatttatgagttctctctcctttcatcttttttttcacccttaaattctgttgatgaataaaaaatattctttaaatatcaaaggaaagctctcatttaatcctctcatctgattgtatgaaaacagttttgttcattcgtcagttattctgctctatcattgcttttatctgtttcatttttttccaatctaaaactaaaaaataagcaccatcttttccattcatgatgacacagaaggtgaagaaaattataaattttgattcatcaatgggtatgggtggttaaccaaaatagagaagataaaaaaagaagaagcaatgtttaaaataaaagtcattttcctttttttaaaaatatggatgattgataattttaaaaataattttcattattttcaccaaaatgttttgtagaattaaaaaagacgagaacaagagttttttaattttaaatgaacgagttcacaatgggttcaaatccatataaacacaaaaaaataattatttttcaacagtttttttttctaatattgaattcgataccctgatttgaatccatataaatacaaaatttattttattttattaaaacatgtttttatttctatttatcaattttaaaaaaaatagaaaatgaaaatcatgtttctatttaccaaatatttcacaaattaaactgactttaattgtttaaaaaaaagaaaaaaaattctattattttctggtgaagtagaaattaggaaagggaagggatgcttgctatggaaattgtggatggaaaaaaggaagttgtcaataaagaaaaaaaaaaatttttggtatttttttatgtccgttttattgtttatgtttggggttcgtggttgttcttctcaacaatgtcatcttcaatgtttaaatctatgtctcaaattaagaatacaatgtgccttaccattacacccaacacttgttggtaaaaaaaaagtttaaaatttatatgatattttaaaaacatatagataatttaatggtaaaattataattttatttttttgaaggataatgctaatattgtaattatatttattattgtaattttacataaaaattaaattaattaacttgtaacatcaactaagttaaatatttctttaagtattaaattatgtaaaaaatatattaataaataggtgaaatgaggttttggttgaacctgatttcttaagtttaacccttactaccctaactcaacgacattattttttgaaagaactcgatcaagattgctttttccgtagttacttttccttaaaaaaacccaagggaaagtttaactgttaatgatttgcttaaatgagttgggctttttgttatttattgtctcgttaatttttattttcattggattttaatgtgtattttccttttctgttttcttatttatttacttgtctctttgtccatctctgttacttgcatcttcttctcgtctcttttgatggcctttggtgcttcattgcttataggttactgtaacgcctgaggtaaccgcaaaaaaggttaacagagcaataatgaagcaacttattgatgtatacaaagagtcgcatcttggacgtcggtgtccagcttatgatggcaggaagagtttgtacactgctggtcctcttcccttcgagtcaaaggagcttgttatcaagctacctgaggaagatcgcagtgctggttcgtctaggcctgcgcggtaatattattgtatcctatgatggtctcttgacattttacattatatccgatgtcataattgcttacctctgatctttctggttgcctgtcactgcaggaaggagcgacaatttaaggttgcaatcaaactggcctccaagccagaccttcattatctcagggagtttttgagcagaaagcattttgaatgtcctcaagaagctattcaagttctggatgttgttcttagagctaaaccatctcagatgtaactgcctgttgattaatgttaaacatttctggctattaaattgttgaaaccattttatatgacatcaaattaatacatttgaaacatcatttggcagatatactgaggtgggaaggtcttttttctatacatcattaggtcctagaggagaacttggtaatggaacagaatactggtctggatattatcagagtcttcgacccactcagatgggtttatctcttaatattggtaggtactttgattgctcagtttgtgtagccactttgttcctaatgtttcagtatgaagatttactggttttgctttgcagatgtgtctgctcgatcattctatgagccaattttagtttcagagtttgttgtgaaacatttccgacgatcaaacctgtcaaagccgctgtctgatcaagatcgtattaaagtacgtatatattgaattcagtgtttattaatcaaaacttgcagaatttttttgcaatgcttcttttgccgtattttttaggtgaaaaaggccttgaagggagtaagagttaggctcatctacatggattatgccaaaacttgcaagattattggagtatctagagaccctataagccagttgacgtgagtttgttgttataatactatacctgctcataaatatttttagtaagctacttttatgtggcctgtgtggtagaattgtttttgggttatttgtagtcttgtattcactacttatctaagttacatcttaaaattgagttggttttatttttattttttgcagttgacagtttttagtatttggcttggttatgtcttgttctaaaatattgtttatgcttatacatttgtaaaatcttgtgcttatggtacatttgtaccattctgtctcattatgtttctgttcaatttttggctgttttagatttcctcttgatgataagagaacaaatgtctctgtggtcaagtatttccgtgagaaatacaatgttgtgcttaaatatccatccttgcctgcacttcaaagtggaagtgaagctagacctgtctacctgccaatggaggtttttactttatatcaagatgatcttgtttttgttttctttttgtttgttactgattctcctgtatgattttgttttacagctttgtagtatcgttgagggtcaaagatacacaaaaaaactaaatgaacaacaagttagatctctgctgagagcaacttgtcaacgtccgaacattagggaggggaatattacaaaggtactacagttttggatgcttattattttttaaattggttgataagatgagaattttgattcattggcatttcatgtttctgcagatggtccaggtcaataattttgaggtggaggagcttgttactaaagaatttggaatgcatgttcgcaaagaacttgcattgattaatgcacaagttctaaatcctccagtggtacttttaagccaatatgttatattttcaaggatactgtcagtcttataatacgattaatgtctgttttggttgctgcagctaaagtatcacgatagtggacgtgacaaaatcgttaatcctagttgcgggcaatggaacatgatcaacaaggtggtatttttttttcttcccctcttctttgaagtggcattgtttgtaaaatttaaggaatcagacctgtctcttcagtctcctcttgttccagagttcttgttcattttttcaattcatttttaaggtagctataagtcttttgggaaaattttgataggttttaaggttcaacagttttttttttttttttgcagaaaatggtcaattggggtaaagtcgatttctggtcttgtgtgaacttctcctcggaatattggaatatgtcagaagagttctgtgcggagctggtgaatatgtgtaacaacaaaggaatggtatgctgtgtggttttttttagtgtaggtggatggtatatctgttatttatttatcactagcatgatttcccattttgtgactctaggtgttttgccaaactccttcaattgcaatgcgatcagcttgtgctgaccgaattgatcagattctcatggatgtatacaaagagtctgcaggcttgaataagccacttcagttgttgataattatcttacctgatcagactggctcttacggtaagaaattctgatgttttgtaaataggtaattcctggggtttctttgcgcgactcaaatctttttgcttgcaggaaaaataaagcgaatttgtgagacggagctaggtattgtttcacaatgttgtaagcctgtgcaagctgcaaagtttagcaaccaatattttgaaaatgttgctctcaagatcaatgctaaggtatgtgttttgcctcactggtggtgatttgatatagtgttttcttgtcttgttatcttaattcatttgagaattgtaaattctgtaggttggggggcgaaatactgtgctgaacgatgctattttaaggagaattccgcttgtgactgatgtccctacaatcatttttggggcagatgtcactcatccgccgcctggcgaagactctagttcttctatagctgcagtaagcatattcattgttctctacatccccattttgttacttgatcatatttaagaggttattggctggatgcaggtcgttgcttcaatggattggcctgaggtaaccaagtatcgtggaattgtctctgcacagactcaccggatggaaataatccaggatctttataaacaaacaaaggatccacagaagggtttagttgagggtggaatggttaggtagggagatagatttatttcgggcttaattttttagtttcttctggacgtgctctactttcttaacatttcaagttctctgcagggaattgcttgttgctttcttcaagtcaacaagacaaaagccttctagaattatcttctataggtaatgtttgcttttgaccatccaaatatatgtatatacttctagcagcagtgctgacatctgatttttgatgtggcagaggtggtgttagtgaaggacaattcagccaagttttgctttatgaaatggatgcgatttggaaggtattgaaatcactgtataatgtctattatagttggttcactgtataatggatgcttctgacccctgcagttttcttccttccaggcttgttcctcgctacaggaaggatatatgcctcgggttacatttgttgtggttcaaaagaggcatcatactcgcttattccctactgatcgcaacaaaactgatgggagtggcaacatattaccaggtgattctaatcttataatagggatttgatcgtattctcttgatcttcattttgttagcatattttaatgtagccaataaattttaggtactgttgtggatactagcatctgtcatccaaccgagtttgatttttatctcaatagtcatgctggaatcctggttaaatgaggcttcccttgaagtgtgatggtttttatgttaattttgtccgatctgatactgatgttgttgtgtaggggacaagcaaggccacacgttaccacgttttgtttgatgaaaatggcttcagtgctgacatcttgcaagtgctcacaaacagtttatgttacacgtatgtgtttactcctttctctataatcctgtaatggggtgaataaataatgctttagatcagcactagtaattatatagtaataattttactttgtggataggtatgcgaggtgtaccaagtccgtttccataggtttgtgatgatgtttttttgtcttgttaaatttgttaacttaaggttggttttgacagtgaatatttgaattatatgtttgcagtgcctccggcatactatgctcacctcgctgcttatagggcacgctattatattgaggatgagatgtcggatagtgggtctactggtggaggccgaaagccgaaagacaaggttgtagagtttaggccgctccccagcataaaggacaatgtgaaggaagtgtttggttggtggaaagttgcgcaagtatagttgcacagtttgtggatgatggtggagtcttgttgattccattggtggactttgtaattatttaattttggagtttctgttttggtggttgagcgaattgtcgtctgaagtttggattaccataatgcacacactgtttgtggattacgaaaatttcagaaatgtcctgtattttcaagaaaagttcttagaaaggatttttagtattatttttaagtttcttttagatcaccaattaatacaagtgatgatgaaattttaaagaataa

SEQ ID NO: 536 - DNA, 2967 bp, Gossypium raimondii
  source 1..2967: mol_type = genomic DNA
atgggttttcaaatttttggatttcaaaaggttgtttttcaatatgtgaagtgttttgagatacttcttctgaaaagtgtggcacaccgagtctccggcgccgaattcgtaagtttctgaaactgttgtttgttttcattgaaaagcagtagatagagatactgtgattttttagacattagactgtattgctacacttaaacttacagcatgtttggttgggtgtattggcatactaatcagtgggccccacttaagacacctctattccgttgtttggttcatggtaatgctattacgcttgtaacacaatactaacctaatcggtgaaatccaccgatttgtaatacatcccatttgctcagattaggtgctgcatcgtttgccctccctgttttaccctcccgattggcttccccattgcgtctcctcttccttccttctaccttctgcccatttgctcaagtttcgatcgatttgctccctctgtctctcaaccttttcttttgtttttctttacaaccagtcactctttcttttctttttctctctgtcactccttcgattggccttctcaaccagtcgacctttttcttttctttttctctctgtcactctttcgattgctctcaattggtgggtttccaggttactgctactgaaaggtaaaggttactgccttgttagtgcattgacttcttcatcaattattgcagtgttaacctaatcagtttccccttttttgattacaggttcttcttcattgcactcttccccgatttgctcattacaggttagtttctccgattgcatgtttatcttcaactttttgagcttcgaagttgctggagttacggactaaagccaagatttttgttcaaaaaggaaggtctatgatgggatgtctggatgaaactagaaccttgaattatggccaagtttttgtgcagttttctggctctagatctaaccaacgtgatattgttcagggtaaggtaattgttgccaaaaacccctacttgcacccaggcgatgtacgtgtattaagggctgtcaatgtgcctgatttgcaccatatggtcgattgtgttgttttccatagaaaggaaccaggtacgtaaagggcatactctacgttttcttgctactttgagaaagtgtttgttcttcattatactttgcaaaagctgccttttattttgttcctatcgttttagtgtatgattctagcttcttcttttttgtcccttattggtggacttatcattgattgttatgcagtagtaaaatgcatgtttcttttcatcttggtggaacttgttgagcatttcctttacaagcagagtattattgaattgcagattagctatacttgtattcttttgcatatttgtgttaaatcctgcccaatttatggaagctatctggtgtttttcagtgtctttacacataataacaagatggtaggcttgattgtattctgtaatatttcacaatgcatggtgatttgctgacactaaatagaatcaaatttttagacctcatcccaatgaatgctctggaactgatctggatggtgatacttactttctctgttgggaccctgaattgattccatataagcaaatcgatgctatggattattcacccgctccaacaaccaaattggatcatgaagttaccattgaggtaatagctttttaggtattgaagtatttagttatattccacttgaatttatctaatagttatgacttttgattatcctcttctcttgttatagtttcttgatgctgaaatgcatgattcttgctctctcccccctccaacatttttttcggttccaagatgtcattggtttaacattcttctagattcttacaagtttattctgtcaattagcactcgtataatagttataatgacttgaactgtgtgttattttgagagttgttttcaacattatttttcgttgggtattttgtataaatccgcttggaatatgtgctgaaaagtttcttgatacttaagttcacattacgaaggctctaaactagtgaaatttttactcaggctcaagtttattatttgtatttgtattatgttgtaatccattctttgtgcttgcgtccttttttgaactgatatctattgggtttgctttactgtattttgttgggctgtgtagatataattatgagatttttgataattgctacatgttggtgtaggaaattgaagaatacttcacaaactacatagtcaatgacaatttgggaataatttcaaatgctcatactgcttttgctgatagagaacctgacaaagttgttttctattgcagttgactttccgaaaacgggtgtaccagctgaaataccacaagacttgagggtcaaagaatttccgaatttcatggagaaaccagacaagccaagttatcaatcacacaatgttattggaaagctttttcgagaggtgaagaaccttgcacccaatgaatgctcgattaagttcttaactcgggaaaagatgcagaggttttatgatcccgacatggaagttgaaggctttgaggattatatcgacgatgctttcttctacaaaagtaaatacgattacaaattggggaatttgatggactattgcagggtcaaaacggaggctgaaatactcagtgggggtatcatgaaaatgtcgagatcttttacgaagaaaagagatgcagaagcgatcagcatggcagtgagatcattgagaaaggaagctaggtcatggttcaatgaaaaaagaagtgagttggatgaagaaatagatgatgcatatgcaaaagcctcagcttggtactatgtcacatatcatccaagttattggggtcagtataatgagggaatgaatagggatcatttcttgagctttccttggtgtgtttatgacaagttggtccagatcaagaaagaaaatgca

SEQ ID NO: 537 - DNA, 6192 bp, Gossypium raimondii
  source 1..6192: mol_type = genomic DNA
aaacaaaatcgctgacgtggccaaaagccattcgctattagatagggaagccaatggaaaattggaaaaatatataataatttaatgttaaacgtgtgacgtggccagccgaagcgatttgcagaacatcctgcaatgtggggtgcgacggaggaaatcacggcatttttcttcgtctatttgagtaaattgactaaaatagttgacaatccaggattctaagtaaagttggagtcttttatgttactctcactctaatatcaatggagtttgggtttagttatcgttatgactgatcattcatcttcttcttctctttggtaaagcctctttcttttctttcttctcttaataatgattgaaactagacgttcaatttgaaactgagttacaatttatttttctttgataaacgttaaaatctttcttcttcatggatattgggcgcagcctttttctcttattctgctttttaaatactgatttccttttcttttttctgttttgaaagtgtttgtttgggcagagggactgcaaatcctcattcgcattcatgtaaaatccacatatgtctgtgctataaaatttatcttctagtgatttagccattagttatggtaccgtgttagataggagtgactgcccggcatgagttctgttgaaatccgtttaactatttgaatgtgatcctgtagttggtgaagttcgcttttatatatctggagaatattctatatccatatttcatttattaaggggtaggacttgtcaagatcgaacttaaatatatagttcaatatatatatatatatatatatatatatatgatatggataatttaggaaaaatgaaaaaaaaaatggataacataggccattacaggtaaaaagctttgattgttttgttgcttcttttccttgttctttatgaaagtttgattgttgtttctttgaacagcagcttaacttgtctcccatgttggtgcatttgaaggtttttatttatatattggtctctggtttttgcagttaattaattgtatgctgtaaggtggtaagagcacagagtgaattgagacaatgggtaagacgattcaggtttatgggttcctctcaaatgtgtctgcaggagaagtaaagacatttttagagggatatacgggcagagaaactgtttatgccctgaagatcaggcagcataaaaagggtggaagagcatatgctattgtgcagtttaccagaagctctgctgcagagctaattataaggttggctaatcaaaggctatactatgggagatcatatcttaaggctcgagaaatggagaccgacatcgtgccaaagccgagagcctttttgcacacaatggaacgtgttacggtgaattttggctgtcaagtctctgtagaaaaattttatgttctctggaaagcagaaaatgttactctaaattttgggactggaatgcggaaattggaatttctagtgtcgtattgtaggtcaaaatacaagcttgagctcttctatgagaacatctggcagattgagctgcgttgtcctgacagtcaaacctcaaagcatcttctgattcaggttgctttgctaaactttcatcataaattcatcattagtctctattgtattatccttgcttcctagaaataagagttcaacataacatcattgcttccagataacaggcgtcctcaatcagtcagctgcatatatcatatttcttttgctgatcattagtcttctattaaatcattgagatgccaacttggtaattggatgacattattatatccatgtaaattatatagagtttttcatttctgttgatctagggcgctagatctttttggcaatcgaaaactaataactggtgcaaatcaatatatactcgagaaggggtacagatcagcccatattttactgttaagattaataggcagttcaaaatggtgatagctagatggatttaatattgtcttatgaaacttgtctcatgcaaggttgttgatggactattcagtagccatacctgaggaactaacttcttcattgcaagaagtttctgctattcttttgatgctcaatgcaatttcttaaagttttatctcttacaaatgataattgcttgtgttgctttgtggtttccttttaatttttattttagttatttggcgctccccggatatatgagaaagaagtgcgtgcttctgaacttgtatttgatgatcccttgcttaactatttcaaggatgtgcctgatgatcaatgggtaaggacaacggatttcactcgttctaattgtattggacaatcttctgtattatgcttggagcttcctcacaacctccgacttccaaattttcgggagaactttgcttattacaaagaaaatgaaagcagattggttttggaaagtggttcttcttactcctgcaatcttagtctagtcccaattgtatgccctttgcgggtaattgacttgccatttgaaatcttgttcaaggttaatctgttggtgcaaaatgggtgcatcccaggaccagcacttgatgatactttttatcgattggttgatccttgtagaatggacaaagtctacatagaccatgcgctggagaaactttattatctaagagaatgctgctatgaaccttcgaggtggctctttgaggagtacaaaaatttctcaagatcgaggaaatatcaaggttcacctgctatatccttagatgaaggtttggtatatgtaagaagggttcagataacgccttctagggtctacttttgtggtcctgagattaatgtttcaaaccgtgtgctacgccaattccataatgatattgataattttcttcgcatcagttttgttgatgaagagttggagaagatccattcaataaatgtgcaggcaaggggtaggagaactagtatttacgaaaggattctttctactcttagaaatggcgtactgattggggataagagatttgaatttcttgccttttcatcaagtcaattacgggagaactcagcctggatgtttgcttcaagaaaggggctcactgcagcagatataaggtcatggatgggaaattttagtaaaataagaaatgtggcaaaatatgctgctagactgggccaatctttcagttcatcaactgaaactcttagtgtttctaaagatgaaatcaaccttattccagatatagaaattatgaaggatgggattaaatacgtcttttcagatggaattggaaaaatatcagctaaatttgctaagaaggtggcagctaaatgtcggttgaagggttgcactccatctgcctttcagattcggattggtggattcaagggtgttgtggctattgacccgacctcatcttggaaattatccctcagaaagagtatggaaaagtatgaatcagagaacactaaactggatgttttggcttggagtaagtatcagccatgttttctgaaccgccagttgattaccctgttatctactcttggagttccagaccgtgcttttgagaaaaaacaaagagaagtaattgagcaactcaatgctctcctgacggatcctttagaggctcaggaggctctggagttaatgtctccaggagaaaatactaacattctgaaggaaatgctcttgtgtggttataagcctgatgctgaaccattcctttcaatgatgttggaagcttttcgagcttcgaagttgctggagttgcggactaaagccaggatttttgttcaaaaaggaaggtctatgatgggatgtctggatgaaactagaaccttgaattatggccaagtttttgtgcagttttctggctctagatctgagcaacgttgtattgttcagggtaaggtaattgttgccaaaaacccctgcttgcacccaggcgatgtgcgtgtattaagggctgtcaatgtgcctgatttgcaccatatggtcgattgtgttgtttttccacagaaaggaaccaggtacgtaaagggcatactctaccttttcttgctactctgagaaagtgtttgttcttcattatactttgcaaaagctgccttttattttgtttctatcgttttagtgtatgattctagcttcttcttttttgtcccttattggtggagttatcattgattgttatgcagtagtaaaatgcatgtttcttttcttcttggtggaacttgttgagcatttcctttacaagcagagtattactgaattgcagatttgctatacctgtattcttttgcatatttgtgttaaatcctgcccaatttatggaagctatctggtgcttttcagtgtctttacacataataacaagatggtaggcttgattgtattctgtaatatttcacactgcatggtgatttgctgacactaaaatggaatcaaatttttagacctcatcccaatgaatgctctggaagtgatctggatggtgatatttactttgtctgttgggaccctgaattgattccatataagcaaatggatcctatggattattcacccgctccaacaaccatattggatcatgaagttaccattgaggtaatagtttttttaggtattgaaatattcagttatataccacttgaatttatctaatagttatgacttttgattatcttgttctcttgttatagtttcttgatgctgaaatgcatgattcttgctctctccccccctccaacatttttttcggttccaggatgtcattggtttaacattcttccagattcttacaagttcattctgtcaattggcactagtataatagttataatgacttgaactgtgtgttattttgagagctgttttcaacattatttttcgttgggtattttgtataaatccgcttggaatatgtgcagaaaagtttcttgatacttaagttcacattacgaaggttctaaactagtgaaatttttactcaggctcaagtttattatttgtatttgtattatgttgtaatccattccttgtgcttgcgaccttttttgaactgatatctattgggtttgctttactgtattttgttgggttgtgtagatataattatgagatttttgataattgctacatgctggtgcaggaaattgaagaatacttcacaaactacatagtcaatgacagtttgggaataatttcaaatgctcatactgcttttgctgatagagaacctggcaaagcaatgtgccacccgtgcctggagcttgcaaagctgttttcaattgcagttgactttccgaaaacgggtgtaccagctgaaataccacaagaactgagggtcaaagaatatccggatttcatggagaaaccagacaagccaagttatcaatcacacaatgttattggaaagcttttccgagaggtgaagaaccttgcacccaatgaatgctcgattaagttcttaactcgggaaaagatgcagaggttttatgatcccgacatggaagttgaaggctttgaggattatatcgacgatgctttcttccacaaaagtaaatacgattacaaattggggaatttgatggactattacggggtcaaaacggaggctgaaatactcagtgggggtatcttgaaaatgtcgagatcttttacgaagaaaagggatgcagaagcgatcagtatggcagtgagatcattgagaaaggaagctaggtcatggttcaatgaagaaagaagtgagttggatgaagaaatagatgatgcatatgcaaaagcctcagcttggtactatgtcacatatcatccaagttattggggtcagtataatgagggaatgaatagggatcatttcctgagctttccttggtgtgtttatgacaagttgatccagatcaagaaagaaaaagcagctgttcgggaagctttggatttgtcgtctctggaacatcgctttcaacgtagattgcatttgcattgaggtgttctggcttatgtttcctgtttactgtagtaggtaaatgtgggtagctcatgtttcctaacgacactgaatgttatatatataatgtataaacatatccagtttagtttggattgtgcatgttttggacctgttgtaaaaataagagatcggattagtttggttgaatcgaaaacgtgtgatctgcatatttagtgtgtatcatttaaaatcctttgaac

SEQ ID NO: 538 - DNA, 2242 bp, Gossypium raimondii
  source 1..2242: mol_type = genomic DNA
ttagtttctccgattgcatatttatcttcaacttttcgagcttcgaagttgctgaagttgcggactaaagccaggatttttgttcaaaaaggaaggtctatgatgggatgtctggatgaaactagaaccttgaattatggccaagtttttgtgcagttttctggctctagatctgaccaacgtgatattgttcagggtaaggtaattgttgccaaaaacccctgcttgcacccgggcgatgtgcgtgtattaagggctgtcaatgtgcctgatttgcaccatatggtcgattgtgttgtttttccatagaaaggaaccaggtacgtaaagggcatactctacgttttcttgctactctgagaaagtgtttgttcttcattatactttgcaaaagctgccttttattttgttcctatcattttagtgtatgattctagcttcttcttttttgtcccttattggtggacttatcattgattgttatgcagtagtaaaatgcatgtttcttttcttcttggtggaacttgttgagcatttcctttacaagcagagtattactgaattgcagattagctatacctgtgttcttttgcatatttgtgttaaatcctgcccaatttatagaagctatctggtgttttttagtgtctttacacataataacaagatggtaggcttgattgtattctgtaatatttcacaatgcatggtgatttgctgacactaaatagaatcaaatttttagacctcatcccaatgaatgctctggaagtgatctggatagtgatacttactttgtctgttgggaccctgaattgattccatataagcaaatcaatgctatggattattcacccgctccaacaaccaaattggatcatgaagttaccattgaggtaatagcttttcaggtattgaagtattcagttatattccacttgaatttatctaatagttatgacttttgattatcctcttctcttgttatagtttcttgatgctgaaatgcatgattcttgctttctccctcctccaacatttttttcggttccaggatgtcattggtttaacattcttctagattcttacaagttcattctgtcaattggcactagtataatagttataatgacttgaactgtgtgttattttgagagttgttttcaacattatttttcgttgggtattttgtataaatccgcttggaatatgtgcagaaaagtttcttgatacttaagttcacattacgaaggctctaagctagtgaaatttttactcaggctcaagtttattatttgtatttgtattatgttgtaatccattctttgtgcttgcgtccttttttgaactgatatctattgggtttgctttattgtattttgttgggctgtgtagatataattatgagatttttgataattgctacatgctggtgcaggaaattgaagaatacttcacaaactacatagtcaatgacagtttgggaataatttcaaatgctcatactgcttttgctgatagagaacctgacaaagctattttcaattgcagttgactttccgaaaacgggtgtaccagctgaaataccacaagacttgagggtcaaagaattttcggatttcatggagaaaccagacaagccaagttatcaatcacacaatgttattggaaagcttttccgagaggtgaagaaccttgcacccaatgaatgctcgattaagttcttaactcgggaaaagatgcagaggttttatgatcccgacatggaagttgaaggctttgaggattatattgacgatgctttcttctacaaaagtaaatacgattacaaattggggaatgtgatggactattacagggtcaaaacggaggctgaaatactcagtgggggtatcatgaaaatgtcgagatcttttacgaagaaaagagatgcagaagcgatcagcatagcagtgagatcattgagaaaggaagctgggtcatggttcaatgaaaaaggaagcgagttggatgaagaaatagatgatgcatatgcaaaagcctcagcttggtactatgtcacatatcatccaagttattggggtcagtataatgagggaatgaatagggatcattcctgagctttccttggtgtgtttatgacaagttggtccagataagaaagaaaatgcagctgtttcgggaagctttggatttgtcgtctccggaacatcgctttcaacatggattgcatttgcattga

SEQ ID NO: 539 - DNA, 15035 bp, Gossypium raimondii
  source 1..15035: mol_type = genomic DNA
tccgatggtgttcttcgagtcttttcttcaatcttctctgaatacccccttagatattcttctagttgatatttgtagactttagaatgttcaaaaagcctaaaaattagttttttccgcgtgtttgggaaatgaggtgcgatatcgacatgggctggcacatgggcgtgtggccagcccatgtggaagtgcccaggccgtgtggattctggaaacagctctatttgtccgattttttctcgtttttcgttccttttgctcccaaatgttctcctaagtatagaaacgtgaatttaagatattaggagcatcaaattcactaatttacattattaatcatccaaaaatgcattaaaaatgagattaaatatgttacttttatagcttatcaatttctctaagtccttggtgatttatggtccatagagtttctacaaaaactcgatttgtttggagctcttttgcatccgttgtttcaagtaagagatgtttccactaccacatgagcaatgatttgtatggagatttgctacatcgtgatttttattgatggttgagagtgtcgtttggctgaaagggttgtgataacatgccagcgtctttaattatttatgatttaaataaggaggccaaattcaaacaaagaaagcttgttttattcctcataaattttaagttatttttccttttggggctatgtttagttcgagaccgaaatctgcgactactttctccgttttatataactagatttttgactttgctggccattgtgtatacgatggcaaagttttctaactccacaaataaaaaaaactgctacttgtcttatttaattagtttttattttttaaagtatagttttattttttaaagtatcatataattatcgataaaaaatatttaaaagtaaagtaactttaggagttgtttaaattacaaattaagtaattgatttttaggttaaattttgctattaatcctcgtattttgtaaaagttatggattgagttctaatactttaatttgatcatttttaatttttatactttttaaaatttaaaattgatgataactgttaaattcattaagttaatttttattatttctaaaatttaatgcgctaaacataatatcacatgtgtaatgtcatgtcagcttgttattttcacatattgtttactaaaaatctagttaatggattaacaattgtcatttgggttgagattgaaattttaaaatttgcgatttagaatgattcaattgaaaaatatgaattaaatctataattgtagaagactaataattaaattgaaacaaataaatataatggttattatttaatttagactaaaatttcaaaattaaagaaaaaaataggggaatttaatatattgtttattaatttgttttagagaataaaagaaaccattctccactgtttaattttgattttatttatgaaatttcggatttccgagtgggagacgagattcggcagttcgactcattaataagcgaacaaatgtaatgataaaaaattgttggaagaggagttaccagatttgactttccattgaccgagcacaattcattacaagaaatcctaggagaccgctctgcttagtaaaccgaatgggatttcgacatctatttgtccatttgatcaaagcaaacaaaaatctttttttctttttgcttagcggttgagacttggaaaataagcaatttttaccagtcttctcaccgctgtggctataattccctcgttgatgccgggcggcgaattgtccaccgacgggaccgagccgttcatggcctctaaagttaaagccttttctactccgtcgccgatcgttgaaatcagccgaaaagatgaacctataatggaaaagaaagagaaggatccacgaaaaattgctagaaagttagtctctctttcacttccctatacatgtaaatatctatgcttatttgctccggttttttctttatgcaatgtggctttgccttggttctctttatttatttttttatttctttgcacgagttcagttaaattaaacgagagctatctgtttggcttgagggaagtgggaagatgggggaagggggttggagggaaaacatgaaaaataaaaaaccttgttagatgtttctgtttcaaaaacatcgaaagccaaaaaaaaaaaaaaatgcactgtttatttggagtgctgtttccgacaacctgtgagaagcttttatatatttaatttagtttttatatatttaaaaatcacgtcgggttttatgctttcatttaaggtatcaactggagttatgcaagaaagccatggaagagaacataattgtttatttggagactggttgtgggaagacccacatcgcagttctgcttatttatgagcttggccatttgatacggaaacctcagaatagggtatgcatttttcttgctcccacagtggctcttgttcagcaggtgagctactttctatgattttctgcattaatactctattgtcgggaattattagtttataatattgttttggctaagtttgggatttaggaaccaacttggatcatcattcgtcaattgtggattctttgcagcagtggaccatgcatggtttttaatggaatttgttattgttttatagcaagcccgggttatagaagattctcttgatttcaaggttgggacttattgtggtaactgcagacacttgaagaaccatcatgactgggaaatagagatcaaagaatatgaggttattatgttctttgattgacacaagtttataatttatccacgtgttgttcaacatcctatgttgtccacgtgtcattcgacatcctatgttgaaagcttaactataaagagatatgtcttatgaagtttaccaattttaatttattacacttgaccaaatatgttatcggtttttcttcctccacccccctcccccttatagaagatttttaattaggattatggaccctcgagctttcatcatcctcgccttatatttctattcatgttgaattttttgtacaggttcttgttatgactccccaaatactacttcgtagcttatatcactgcttcatcaggatggacttaatcgctcttctgatatttgatgagtgtcatcatgctcaaataaaaagcaaccatccttatgcagaaatcatgaaagtaaagtgctacatgaagtcacatttgtattctcaatgataaatttatattagtctttatcagttgatgtattttgattctgtagattacttgacaatcatgtaggttttttatgataaagctactgcatcaatgcttcctcgtatatttggaatgacagcatctcccgttgttggtaaaggtaattaaaaattgcatttcttttgaaacaaaagtctgaattattacatggatcagccatctccttttcaattcctttcggtacaaaaacttttcccattggaagtacgagaaattaaaggtgttttgaaatgtgttgtgtgtaaaggcagaatcaatcaagaaaataaattcgaatgcctacttttttatggaaaatgtgtttggtaaatgaaaaaaaatgttcttttctaaaaatgtccgtgaaatatgtttgatatcactaaacatttaaaaatgagaggaaaggttaaagaaataaataaaatatccaatgatattattcttgatttcaaatttctcaactttttcttttgtaattttataagcttttgttaaagagatttgagtagacaggaacaaatgagattgtaaatagttcaagatgcctctagagacaaaaaaggaaaaagaaagcagttaagggaataattactgctaatggcttctagttataaatattaacatatattattaattaatggcttcaaatagtgtttaattatgagtcaacttaacttgcaaagtgccaagcaaagaagtaatggacatcccgcgttttcaaaattgaaaagatgtcttttttttttggttgtttattctcatatttgaacccattttcattattgttttctaaaaacttgtttccgttttcaattatgctacgcttttcagtttatatgatacaaatatattggatgatattgcatcttgtagtgctcttcaatgatatattttcctctttaatcgataggctgttttagttattagttgttatctcatcttttgatagctacttctttgattaccttatcttacgcattcagatgcttccagtcaagtaaatttacctaaaagcatcaacagcctcgaaaacttgcttgatgctaaggtgagtctttgaaactttcactttgtgaaatctggtttggtgcaatctcttgttttccttctaaaaactaattatggttgaagatagggagctaagttcaatcataattcctacatgatgaataaaactcgtaaacagcatttcatgtatgtcatgggaagatgtttggtgcctaaacgtttccttgttaaattagaataaatgtagcttgtgaagatactattcttagtttatgtagctgggtttttgtaatgctgtttgaaaatgctatgcctacttaacttgtgtttgttagcctgaattgaggactttggttcagtcaaccttttccagactttcataagctggagtagtggcaggtcataattcatcttgatttagtgagtcaatgaggacaagaagatctatttggctttctgccttctcacttgagtgcaactgatcccaatttacttgatctcactaacatatatgtttagctataggagaactgtctgtttcttccgtttggtggacaaatgtgtttggtcctcttcataattgcgctaatcagtcttccagtagaactgcttaggttgaagtacagaaatatcttaccttgagtcattgtggtcagtaatgttactataactgttttaaggattcaagcaaccactgtaattttggccaggtggagtaatgtttattgttgtcatatcgtcgtaatcattttctttctcttcctcttccccttgctctgtgtgactgtgctaccatatatctttggagatgcaaaaaccaaagtttccttttcaatgaggaatgtttccataaactagactttttagttataatcaaaaccggggagggggggggggcggattcttttcttaaaccaatttctgttctgatatagatgctcagagtagtcaattttctaatatttcacatgccgcaaattgtaggtatattcagttggagataaggaggaattggaaagctttgtagcatctcctgtggttagagtatatgattatggtcctgtcaattttggttcttcttgttccaccattatctattgtagtaaacttgaggagattaagcgccaggtgtgtttcagtgacacatttgcactctcttgattatcttggaagaagttgtatttatttattcatttattttttctgtttctttatggcaagagcagtgcataccttttgtcaggaagaatggtgatattcaatctgccaggaacacaaaaaagctgctcaacagaatgcatgataatataatcttttgcttggaaaatttgggcatttggggagcattgcaagtaagatcttgtgaaaacaattgaatttcttggttctgttaatttgcagttgagagcctttcccttgcaattaaataatctgctattagtgttactttgattcttatttcatattctgcaacttttttctatttatctgaattatattcacaaactctgtactctggcaaaatcatgttggagaataccaaatagagtagaacattagattcacatgctatttaataaggctttatttttataaggtgtcgtattcataggtcattacttgctacttttttttttgtgcactgccaataagcagtgactaattattttttattctttcatttaatttgtatcagttctagcttgttgcagacttgcaggtagttgctgattaaagtatccaaggaaattctgatttatttccaccttctgcattttgtaggcttgccgacttcttttaactggtaataactctgagaggaatgaattgatagaagatgaagggattttaagtgacgactctgtatgtgatcgatatcttgttcatgctgctgatgtttttgcttcagattgtacgagaggtataatctttttaggccttttaaattctagcttcaacttcgttgtagctattgtctggtttcttggtggctctatacccaattatgtgttcatcaaagttcagttatgcaggagagatatgggatcagtgtagggactttttagtagtagcttcaacttaattctgccttctgtctctgttaattgatggccgcattacgatttgctacaccattgtaacttgtatgtattaaacttctagtaatcagtgggattttttttttgggtaaatggagatccttagatttttgaatttatatgctctgcttattgtttcagtcaacttgagtaagaatctgagctattagtctttgttgctgatattgtagatggatctgcaaacgatttatctgatgtagagattttgaaggaaccatttttctcgaaaaagctgctacgtcttgttggaattctttccaccttcaggtttgtattcaagcatgtatagtggtttttggttattttatagatatattgcatggaaactctatcggaccatttcaatggttatagtacttggtaaacaaatattatgacttatgtagttcttgcaacactaggaggcaagagaagggacttaatgcatgaggggtgatgtactgatgttaattcattttaactatgttgacacgtctcatttctttctatctggttactttcaaacaaactctactgctgcattttttcatgcctttaagctttttgcttttctcattatttaactaacaaggtgtatcatacacatatttctctcacaaacttctataattacttttacaggttacagccaaatatgaaatgcataatttttgtgaataggattgttactgcaagatccttgtcatacatactgcaaaaccttaagttcctattattttggaagtgccattttcttgtgggagtccactctggacttaaaagtatgtcaagaaagacaatgaaaaacattcttgagaagttcagaacaggagaggtaacccttctgttagtgttaatattccttggtcactcagctccttccaattcgtgaattttcacatcattgaattgttacttttatctctgcattttagcggactagctcagtttatcctttaggcacaatgtgggcagattttgtgttttttgacatccacatatcatttctataaatgttttcctaaggaagtgcatttcctaatgtctcgaagttattatgagacagaagctcattcattcagtctttgttcttgtaatttgagcctctagttctagttggttgtagcttatgtgatgtttgaaggataatggtaacaattaggaaaaccttgtgtaagtattgttaacggttctgtgtcagttgaattaatttattccaatgtttaaaaaactggactagacgtcaaaccagtgagacctccgtttattggttcaactgggcagactggttgaactggctagttgtgctaaataattattgaatatagtaaatatctaataaaactgatttaatgttgattcaagggaataaatgctctaatctcatcacatacgataaaatttagaaaagtccaacatctgtttttacgttttttactggttaaatgggttttatatactggaccagacaggcaattggttcctggttcaaccagtttgcctggcaggtctgtctggtttttttacactaatttatttttgattccttgaatgctgacttggcagttgaatcttttgattgcaactaaagtcggtgaagaaggacttgacattcagacatgctgccttgtgatacgttttgaccttccagaaactgttgcgagctttatccaatcaagaggacgtgcaagaatgcctctctctgagtatgcatttctggtgaacaggtgctattcataaaagtatatgctatttgaaggtctgtcaatttggttctctttctgtaattgggaaaaaataagatctctttctcttaactttgcagtgggaacgagaaggaactagatttgattaaaaattttaagaaagatgaagatcgtatgaatgtggaaatttctttcagaacatctactgaggtttctattggtcttgaggagagaatctatatggttgattcatctggtgcttccatcagttcaggatatagtatctctctacttcatcattactgctcaaaactgccccatgatgagtatgccttactttttcgttcttacctgcttttgaacttataatgtcactatatatgtttcttgtggaaattcatttactaatttagattatccacgtgaatataattttcaggtactttttccccaagccaagcttttattattttgaagattcaggaggaacaatctgcaatataatattaccttcgaatgctccaataaatcaaattgccagtacacctcaatcttcagttaatgctgccaaaaaagatgcttgtctaaaagcaattgaagaattgcataaattgggagccttgactgaccatctcttgccactgcaaaacagtgttcttgaggaggaaacattgctggtgtcttctgattctgggagctctgaaggttgatgcagagcaactttgtagtcttattcttttcttcttctttttggttgggtgactggtatagaattaatcacttttgctcgtctttaatctcagcaaaatttgattttggttttcagcagatgaggattcacgaggtgaactacatgagatgcttgttcctgctgtgcttaaagaatcatggactaacttagagaactgtgtcctcctttatgcttactatataaaatttaatccgaatcctaaggacaggagctataaagagtttgctctctttgtcaagtctcctctccctaaggaggctgagagaatggagctggatcttcacctatctcggcgtaggtcggtgatgacaaagcttaccccatctggagttgcagaatttaagagagaagaggtaacaatgttttgtttctgtcagactttgttctaattatcttactaccaaaactcactgtgtatctgtgcatatgcagatcatgcaggcacagcattttcaagaaatgttcttcaaggtcatccttgatagatcagaactcctttctgaatttattactttaggaaatgtctttctttcatcaagctcctcaacattctatttattgcttcctgttattctctccaattgtgagaataaagtgacagtggattgggggattgtccaaagatgtttgtcgtctccactttttaagcctcctgttgcagctgcaaagattgaaaatttcccttcagatgtttgcttgcaccttgtaaatggttgtaggagtataagagacattgagaatagtttggtgtatgccacacacaagagggccttttactttattactagcattgttggtgaaaaaaatggttacagcccatatagagattcaggcactttaaatcacgtggagcacttaaacatgttggtagctccactcttgattcacaactgttattaacgttatcagaatagtttatggggaggttatgctcaccaagttgtttagattaggtttttatctagtattcaattgataaagtgttaacttgaatgttgtcaatcaggtctggcattcatcttaagtaccctgaacaacctcttctgcatgcaaaaccactttttaagttgcacaatttgctccacaaccgaaagccggaggattcaggtagcttctcgtttgctttgctttcattcttgtcattgttcccttttcactaagtatgttgcttgttatactggattatttgtgttcaagatatgatattctagaccttgctaccatcttcatgggtatattgctatttgttttgtcagattgcattattttttcatgatgggaacaagatttatggttcattattgatagattagtgctacattgcctgtaattgacatgaaatgcctgatttattgttaattatttgttaatgattgtccttttctgatttttcttcttcttcatcagaaaacactagaaaacaagaaattaccaatttgaagtagtcttatagccatgcagcttatttgatgtgcaagagatatcttgaactgtattcttttggaaatgagaaatgctcaagttgggcgattgagtgagactatgagttctcacatggcggtgaagattgaggattaatctttcttttccaatcctagacttaaggattactagctagtaagtagaatcaggctattgcaacaataaaacgctttacaaccggccttgctggccattctttaatctgcttcagcacttggattaatggggctattggtttttgtctgaatcttccctggaaatatactagtatatcgttaaaatgttatctttaatacaacctttttagtatcaaaagcttgagtcattctggatcccccctgccccccaaaggaaaaaaaggtccttctcattttctctatcagtaaatcaaacaaaagggaaatatgttttgttgattttctctgtcttttcatttcttaaggctgttctttgttgtaaacagaagcaaatgaactggaagaatacttcattgatttgcctcctgagctttgtcagctgaaaataataggcttctccaaagagatagggagttcgctttctttgttaccatcaattatgcatcgcctggagaacttgcttgtggctattgaactgaagcatgttttttctgcttcatttgccgagggagctgaagttactgcccttagggtaagacctaagtccacgtgatattatgactagtgcttttggttaagtgtctgttaagttagttactgtgctagtccaatcatttaatcaagaaatgcaagcatctccatgaatgttatctatgactaacagtttgaaatggtgttaggtcctagaagcacttactacagagaagtgtcaagagcgtttttctcttgaaaggcttgagacacttggtgattccttcctcaagtttgctgtggcccgccatctttttcttttacatgatgcacttgatgaaggggaattgactaggagaaggtctaatgttgtaaataattctaatttattcaagctggcaacaaggcgaaatttacaggtttgattgtgttttagaaagtgatattcttatacagaagttttgacttctgttatgaatagcataattgttatatttttgagaaattttacctgttggtcaacatactatttcaaacatagaacatttttacgattccagtctgccattcttcactgctaacaaatgtggagtagttgcattaaatgctaaggtgcatgttcatgtcactcatccaatatggataaattatcttagacctgtagacatagaagattatagaaaaatgtggtatttactaaaatgattaaactaagaaacaatgtgtgtagttagaaccctctccttgattttggaattgttagcatcagccgttgaaggagtttcgggtgtattcaaatgctttacgttcatgccacttggaatggataatttgaacctaagaagatttaatatgtctatgtctatttggtgttttaagataaataattaatatttacggttctgtgtttccactaaatttcaggtttacatacgtgatcaaccttttgatccttatcagttctttcccttgggccatccctgcccagtaatttgtacaaaagaaactaaaggaactgttcacccacaatctagttgtcaagtagatcatacaaagagtgaagtcaaatgtagtagaaatcaccattggctacataaggacacaatttctgatgtggttgaggctcttgtaggagcatttatagttgataggggcttccaagcggcaacagcatttcttagatggataggcatacgagtggacttccaaggttctcaacttaatagtatttgcgctgcaagcaagagatttatgccactttcctccctattggatattggagatcttgaaaatttgttgggttaccagtttcttcataagggtctcctccttcaggcgattgtgcatccttcttttaataggcatgggggaggctgctaccaggtatgcaatatgtctgcttttctacttaaggaaatcagactctctttatgttttgtatttttcacctgccttgtcatttttataacattctattttctgatgcaacaattaataatactttgatacttttccagagattggagtttcttggagatgctgtcttagattatttaattacatcatatctgttttcactgtatccaaagttgaaacctggtcagttgactgatttgagatcagtgtcagtgaacaacaagtcctttgccaatgttgcagtggacagacgcttacacaaatttcttatgtgtgactcttgtcacctcaacgaggccatagaaaaatatgttgacttcatcacatcatcatcaccagacaggggattgtttgaagggccaaaatgtccgaaggtaagaattactagctgttgtatcttatgccccctgatgcatgctttcctctttccccccaagatataatgaattttagccatctttatataatgcaagttacaaatgcaaagctttattcctaacctatgatcattggattttctttttccttttaatttaagttaacgaggtctaggtggaatacaatattctaattaaagcttgcaactaaattatgttcatgcttattgtcttatttgtttaagagaatacatatgctggattatgataaatttaaaaaataattatgagcatttggtagaatgcagtataataatcgaagcaaatcttttttggagctgattatgctattttcttgtttgaggacgaagatgtgggtggctgattttgattctttgagtttgatttatgagagctaggtggaactgatattatgataaaagcaaatctgtgtaagaacacaatgctgctgcacaatacttcaagaagggtttttaatttaatagctttaatgtattgatacaggctcttggtgacttggtagagtcttgtttcggtgctattctccttgatacagggttcaacttgaaccgtgtttggaagataatgctatccattctggatccaatcaagagcctttcaagtgtgcagctcaatcctatcagggaagtacaggagctttcccagtgttataactgggatttgcagtttctagttgcaaaagttggtagaaatttttcagtggatgcaaaggtaaatgcaggagatgtacctctatgtgtttcttacagcaacattaatagaaaagaagctatcagaactactgcacatcaactatatgtaaagttaaaggtaacaggtgccctgcatactttcctattccctcttcttgatgccattaaaacatgatgctttttgaatatgtactcatatttggttccttttagaagttaatatcatttatagcccagtcttagtgtaggtatattccaaacttgtgaagcttgccttatattgcaggtcgataaatgattgtgaatttgcgacttaatccccgtctcttcttgtctttgaatgtacaggctctaggatatgcacccaaatcaaagtccttggaagaagttttgaagggaagccccaagaatgaagccaagctgattggatacgatgaaacacccattgatgtcagtgttactgacatagttggatttgaaaacatgaaattgcaagaatctcttgtgaatgatttcaaccccaaaactcgttctattaaaaggacaacttctagcggtgtatcttgcatctcacctggtagcagacctccaccttcttttgaagtaaaagcagcaaggggttcagcctctggtattgaagccaaaggcaaaccccccaattgctccattgtggatcctagttgtgggattgactcgccatccaaaggtaaatgattgttacactttttgtgactagtcagtgtggagcaattatcttatttgcctcttaatttctcaggtgaatcacatggtcgtactgctagatcacagttatacgaaatctgtgctatcaattgctggaaaccccctttgtttgaatgttgcaaagaggaaggaccaagtcatttgagatcgtaagtacacgacgcatatatactagaaaagacagctgaaaagtctccattaggacagttcgaaagatgggaacttcaaactacatccctcttgaataattttactcaaatcctatatattcaaaatcttttgcagattcacttacagggtaatagttgaaatcgaagaagctccagatatgatattggagtgcttcagcagtcctcggaccacaaagaaggcagcagccgagcatgcagcggaaggtgcactctggtatttaaaacatggaggatacttacaataggtcaacttaaccgactgaacctcattgctagacataatggagatcaaggtttgaatttagtcattttgctatctcagttcaatggctctagtctctctcttcatcccctatttaatgaacttaaaaaccagcattttctttaaaagtcgaataaaagatgatttaacaacaaaattaaaattttgcttcgaacttgttaacgtggcatttttggtatgtccatgtatccaacaaggagcccaatttaattcaatccatgtatctggtgctgtgtcatgaaagtgtaaagattaaatttattaaactcgagatagaggattaaagctattcaattgagataataagatgatcgaatttagatttcaaactcaaatatgtttgatgatgtctatattgatggctgtta

SEQ ID NO: 540 - DNA, 13863 bp, Gossypium raimondii
  source 1..13863: mol_type = genomic DNA
tgtaatgtcatgtcagcttgttattttcacatattgtttactaaaaatctagttaatggattaacaattgtcatttgggttgagattgaaattttaaaatttgcgatttagaatgattcaattgaaaaatatgaattaaatctataattgtagaagactaataattaaattgaaacaaataaatataatggttattatttaatttagactaaaatttcaaaattaaagaaaaaaataggggaatttaatatattgtttattaatttgttttagagaataaaagaaaccattctccactgtttaattttgattttatttatgaaatttcggatttccgagtgggagacgagattcggcagttcgactcattaataagcgaacaaatgtaatgataaaaaattgttggaagaggagttaccagatttgactttccattgaccgagcacaattcattacaagaaatcctaggagaccgctctgcttagtaaaccgaatgggatttcgacatctatttgtccatttgatcaaagcaaacaaaaatctttttttctttttgcttagcggttgagacttggaaaataagcaatttttaccagtcttctcaccgctgtggctataattccctcgttgatgccgggcggcgaattgtccaccgacgggaccgagccgttcatggcctctaaagttaaagccttttctactccgtcgccgatcgttgaaatcagccgaaaagatgaacctataatggaaaagaaagagaaggatccacgaaaaattgctagaaagttagtctctctttcacttccctatacatgtaaatatctatgcttatttgctccggttttttctttatgcaatgtggctttgccttggttctctttatttatttttttatttctttgcacgagttcagttaaattaaacgagagctatctgtttggcttgagggaagtgggaagatgggggaagggggttggagggaaaacatgaaaaataaaaaaccttgttagatgtttctgtttcaaaaacatcgaaagccaaaaaaaaaaaaaaatgcactgtttatttggagtgctgtttccgacaacctgtgagaagcttttatatatttaatttagtttttatatatttaaaaatcacgtcgggttttatgctttcatttaaggtatcaactggagttatgcaagaaagccatggaagagaacataattgtttatttggagactggttgtgggaagacccacatcgcagttctgcttatttatgagcttggccatttgatacggaaacctcagaatagggtatgcatttttcttgctcccacagtggctcttgttcagcaggtgagctactttctatgattttctgcattaatactctattgtcgggaattattagtttataatattgttttggctaagtttgggatttaggaaccaacttggatcatcattcgtcaattgtggattctttgcagcagtggaccatgcatggtttttaatggaatttgttattgttttatagcaagcccgggttatagaagattctcttgatttcaaggttgggacttattgtggtaactgcagacacttgaagaaccatcatgactgggaaatagagatcaaagaatatgaggttattatgttctttgattgacacaagtttataatttatccacgtgttgttcaacatcctatgttgtccacgtgtcattcgacatcctatgttgaaagcttaactataaagagatatgtcttatgaagtttaccaattttaatttattacacttgaccaaatatgttatcggtttttcttcctccacccccctcccccttatagaagatttttaattaggattatggaccctcgagctttcatcatcctcgccttatatttctattcatgttgaattttttgtacaggttcttgttatgactccccaaatactacttcgtagcttatatcactgcttcatcaggatggacttaatcgctcttctgatatttgatgagtgtcatcatgctcaaataaaaagcaaccatccttatgcagaaatcatgaaagtaaagtgctacatgaagtcacatttgtattctcaatgataaatttatattagtctttatcagttgatgtattttgattctgtagattacttgacaatcatgtaggttttttatgataaagctactgcatcaatgcttcctcgtatatttggaatgacagcatctcccgttgttggtaaaggtaattaaaaattgcatttcttttgaaacaaaagtctgaattattacatggatcagccatctccttttcaattcctttcggtacaaaaacttttcccattggaagtacgagaaattaaaggtgttttgaaatgtgttgtgtgtaaaggcagaatcaatcaagaaaataaattcgaatgcctacttttttatggaaaatgtgtttggtaaatgaaaaaaaatgttcttttctaaaaatgtccgtgaaatatgtttgatatcactaaacatttaaaaatgagaggaaaggttaaagaaataaataaaatatccaatgatattattcttgatttcaaatttctcaactttttcttttgtaattttataagcttttgttaaagagatttgagtagacaggaacaaatgagattgtaaatagttcaagatgcctctagagacaaaaaaggaaaaagaaagcagttaagggaataattactgctaatggcttctagttataaatattaacatatattattaattaatggcttcaaatagtgtttaattatgagtcaacttaacttgcaaagtgccaagcaaagaagtaatggacatcccgcgttttcaaaattgaaaagatgtcttttttttttggttgtttattctcatatttgaacccattttcattattgttttctaaaaacttgtttccgttttcaattatgctacgcttttcagtttatatgatacaaatatattggatgatattgcatcttgtagtgctcttcaatgatatattttcctctttaatcgataggctgttttagttattagttgttatctcatcttttgatagctacttctttgattaccttatcttacgcattcagatgcttccagtcaagtaaatttacctaaaagcatcaacagcctcgaaaacttgcttgatgctaaggtgagtctttgaaactttcactttgtgaaatctggtttggtgcaatctcttgttttccttctaaaaactaattatggttgaagatagggagctaagttcaatcataattcctacatgatgaataaaactcgtaaacagcatttcatgtatgtcatgggaagatgtttggtgcctaaacgtttccttgttaaattagaataaatgtagcttgtgaagatactattcttagtttatgtagctgggtttttgtaatgctgtttgaaaatgctatgcctacttaacttgtgtttgttagcctgaattgaggactttggttcagtcaaccttttccagactttcataagctggagtagtggcaggtcataattcatcttgatttagtgagtcaatgaggacaagaagatctatttggctttctgccttctcacttgagtgcaactgatcccaatttacttgatctcactaacatatatgtttagctataggagaactgtctgtttcttccgtttggtggacaaatgtgtttggtcctcttcataattgcgctaatcagtcttccagtagaactgcttaggttgaagtacagaaatatcttaccttgagtcattgtggtcagtaatgttactataactgttttaaggattcaagcaaccactgtaattttggccaggtggagtaatgtttattgttgtcatatcgtcgtaatcattttctttctcttcctcttccccttgctctgtgtgactgtgctaccatatatctttggagatgcaaaaaccaaagtttccttttcaatgaggaatgtttccataaactagactttttagttataatcaaaaccggggagggggggggggcggattcttttcttaaaccaatttctgttctgatatagatgctcagagtagtcaattttctaatatttcacatgccgcaaattgtaggtatattcagttggagataaggaggaattggaaagctttgtagcatctcctgtggttagagtatatgattatggtcctgtcaattttggttcttcttgttccaccattatctattgtagtaaacttgaggagattaagcgccaggtgtgtttcagtgacacatttgcactctcttgattatcttggaagaagttgtatttatttattcatttattttttctgtttctttatggcaagagcagtgcataccttttgtcaggaagaatggtgatattcaatctgccaggaacacaaaaaagctgctcaacagaatgcatgataatataatcttttgcttggaaaatttgggcatttggggagcattgcaagtaagatcttgtgaaaacaattgaatttcttggttctgttaatttgcagttgagagcctttcccttgcaattaaataatctgctattagtgttactttgattcttatttcatattctgcaacttttttctatttatctgaattatattcacaaactctgtactctggcaaaatcatgttggagaataccaaatagagtagaacattagattcacatgctatttaataaggctttatttttataaggtgtcgtattcataggtcattacttgctacttttttttttgtgcactgccaataagcagtgactaattattttttattctttcatttaatttgtatcagttctagcttgttgcagacttgcaggtagttgctgattaaagtatccaaggaaattctgatttatttccaccttctgcattttgtaggcttgccgacttcttttaactggtaataactctgagaggaatgaattgatagaagatgaagggattttaagtgacgactctgtatgtgatcgatatcttgttcatgctgctgatgtttttgcttcagattgtacgagaggtataatctttttaggccttttaaattctagcttcaacttcgttgtagctattgtctggtttcttggtggctctatacccaattatgtgttcatcaaagttcagttatgcaggagagatatgggatcagtgtagggactttttagtagtagcttcaacttaattctgccttctgtctctgttaattgatggccgcattacgatttgctacaccattgtaacttgtatgtattaaacttctagtaatcagtgggattttttttttgggtaaatggagatccttagatttttgaatttatatgctctgcttattgtttcagtcaacttgagtaagaatctgagctattagtctttgttgctgatattgtagatggatctgcaaacgatttatctgatgtagagattttgaaggaaccatttttctcgaaaaagctgctacgtcttgttggaattctttccaccttcaggtttgtattcaagcatgtatagtggtttttggttattttatagatatattgcatggaaactctatcggaccatttcaatggttatagtacttggtaaacaaatattatgacttatgtagttcttgcaacactaggaggcaagagaagggacttaatgcatgaggggtgatgtactgatgttaattcattttaactatgttgacacgtctcatttctttctatctggttactttcaaacaaactctactgctgcattttttcatgcctttaagctttttgcttttctcattatttaactaacaaggtgtatcatacacatatttctctcacaaacttctataattacttttacaggttacagccaaatatgaaatgcataatttttgtgaataggattgttactgcaagatccttgtcatacatactgcaaaaccttaagttcctattattttggaagtgccattttcttgtgggagtccactctggacttaaaagtatgtcaagaaagacaatgaaaaacattcttgagaagttcagaacaggagaggtaacccttctgttagtgttaatattccttggtcactcagctccttccaattcgtgaattttcacatcattgaattgttacttttatctctgcattttagcggactagctcagtttatcctttaggcacaatgtgggcagattttgtgttttttgacatccacatatcatttctataaatgttttcctaaggaagtgcatttcctaatgtctcgaagttattatgagacagaagctcattcattcagtctttgttcttgtaatttgagcctctagttctagttggttgtagcttatgtgatgtttgaaggataatggtaacaattaggaaaaccttgtgtaagtattgttaacggttctgtgtcagttgaattaatttattccaatgtttaaaaaactggactagacgtcaaaccagtgagacctccgtttattggttcaactgggcagactggttgaactggctagttgtgctaaataattattgaatatagtaaatatctaataaaactgatttaatgttgattcaagggaataaatgctctaatctcatcacatacgataaaatttagaaaagtccaacatctgtttttacgttttttactggttaaatgggttttatatactggaccagacaggcaattggttcctggttcaaccagtttgcctggcaggtctgtctggtttttttacactaatttatttttgattccttgaatgctgacttggcagttgaatcttttgattgcaactaaagtcggtgaagaaggacttgacattcagacatgctgccttgtgatacgttttgaccttccagaaactgttgcgagctttatccaatcaagaggacgtgcaagaatgcctctctctgagtatgcatttctggtgaacaggtgctattcataaaagtatatgctatttgaaggtctgtcaatttggttctctttctgtaattgggaaaaaataagatctctttctcttaactttgcagtgggaacgagaaggaactagatttgattaaaaattttaagaaagatgaagatcgtatgaatgtggaaatttctttcagaacatctactgaggtttctattggtcttgaggagagaatctatatggttgattcatctggtgcttccatcagttcaggatatagtatctctctacttcatcattactgctcaaaactgccccatgatgagtatgccttactttttcgttcttacctgcttttgaacttataatgtcactatatatgtttcttgtggaaattcatttactaatttagattatccacgtgaatataattttcaggtactttttccccaagccaagcttttattattttgaagattcaggaggaacaatctgcaatataatattaccttcgaatgctccaataaatcaaattgccagtacacctcaatcttcagttaatgctgccaaaaaagatgcttgtctaaaagcaattgaagaattgcataaattgggagccttgactgaccatctcttgccactgcaaaacagtgttcttgaggaggaaacattgctggtgtcttctgattctgggagctctgaaggttgatgcagagcaactttgtagtcttattcttttcttcttctttttggttgggtgactggtatagaattaatcacttttgctcgtctttaatctcagcaaaatttgattttggttttcagcagatgaggattcacgaggtgaactacatgagatgcttgttcctgctgtgcttaaagaatcatggactaacttagagaactgtgtcctcctttatgcttactatataaaatttaatccgaatcctaaggacaggagctataaagagtttgctctctttgtcaagtctcctctccctaaggaggctgagagaatggagctggatcttcacctatctcggcgtaggtcggtgatgacaaagcttaccccatctggagttgcagaatttaagagagaagaggtaacaatgttttgtttctgtcagactttgttctaattatcttactaccaaaactcactgtgtatctgtgcatatgcagatcatgcaggcacagcattttcaagaaatgttcttcaaggtcatccttgatagatcagaactcctttctgaatttattactttaggaaatgtctttctttcatcaagctcctcaacattctatttattgcttcctgttattctctccaattgtgagaataaagtgacagtggattgggggattgtccaaagatgtttgtcgtctccactttttaagcctcctgttgcagctgcaaagattgaaaatttcccttcagatgtttgcttgcaccttgtaaatggttgtaggagtataagagacattgagaatagtttggtgtatgccacacacaagagggccttttactttattactagcattgttggtgaaaaaaatggttacagcccatatagagattcaggcactttaaatcacgtggagcacttaaacatgttggtagctccactcttgattcacaactgttattaacgttatcagaatagtttatggggaggttatgctcaccaagttgtttagattaggtttttatctagtattcaattgataaagtgttaacttgaatgttgtcaatcaggtctggcattcatcttaagtaccctgaacaacctcttctgcatgcaaaaccactttttaagttgcacaatttgctccacaaccgaaagccggaggattcaggtagcttctcgtttgctttgctttcattcttgtcattgttcccttttcactaagtatgttgcttgttatactggattatttgtgttcaagatatgatattctagaccttgctaccatcttcatgggtatattgctatttgttttgtcagattgcattattttttcatgatgggaacaagatttatggttcattattgatagattagtgctacattgcctgtaattgacatgaaatgcctgatttattgttaattatttgttaatgattgtccttttctgatttttcttcttcttcatcagaaaacactagaaaacaagaaattaccaatttgaagtagtcttatagccatgcagcttatttgatgtgcaagagatatcttgaactgtattcttttggaaatgagaaatgctcaagttgggcgattgagtgagactatgagttctcacatggcggtgaagattgaggattaatctttcttttccaatcctagacttaaggattactagctagtaagtagaatcaggctattgcaacaataaaacgctttacaaccggccttgctggccattctttaatctgcttcagcacttggattaatggggctattggtttttgtctgaatcttccctggaaatatactagtatatcgttaaaatgttatctttaatacaacctttttagtatcaaaagcttgagtcattctggatcccccctgccccccaaaggaaaaaaaggtccttctcattttctctatcagtaaatcaaacaaaagggaaatatgttttgttgattttctctgtcttttcatttcttaaggctgttctttgttgtaaacagaagcaaatgaactggaagaatacttcattgatttgcctcctgagctttgtcagctgaaaataataggcttctccaaagagatagggagttcgctttctttgttaccatcaattatgcatcgcctggagaacttgcttgtggctattgaactgaagcatgttttttctgcttcatttgccgagggagctgaagttactgcccttagggtaagacctaagtccacgtgatattatgactagtgcttttggttaagtgtctgttaagttagttactgtgctagtccaatcatttaatcaagaaatgcaagcatctccatgaatgttatctatgactaacagtttgaaatggtgttaggtcctagaagcacttactacagagaagtgtcaagagcgtttttctcttgaaaggcttgagacacttggtgattccttcctcaagtttgctgtggcccgccatctttttcttttacatgatgcacttgatgaaggggaattgactaggagaaggtctaatgttgtaaataattctaatttattcaagctggcaacaaggcgaaatttacaggtttgattgtgttttagaaagtgatattcttatacagaagttttgacttctgttatgaatagcataattgttatatttttgagaaattttacctgttggtcaacatactatttcaaacatagaacatttttacgattccagtctgccattcttcactgctaacaaatgtggagtagttgcattaaatgctaaggtgcatgttcatgtcactcatccaatatggataaattatcttagacctgtagacatagaagattatagaaaaatgtggtatttactaaaatgattaaactaagaaacaatgtgtgtagttagaaccctctccttgattttggaattgttagcatcagccgttgaaggagtttcgggtgtattcaaatgctttacgttcatgccacttggaatggataatttgaacctaagaagatttaatatgtctatgtctatttggtgttttaagataaataattaatatttacggttctgtgtttccactaaatttcaggtttacatacgtgatcaaccttttgatccttatcagttctttcccttgggccatccctgcccagtaatttgtacaaaagaaactaaaggaactgttcacccacaatctagttgtcaagtagatcatacaaagagtgaagtcaaatgtagtagaaatcaccattggctacataaggacacaatttctgatgtggttgaggctcttgtaggagcatttatagttgataggggcttccaagcggcaacagcatttcttagatggataggcatacgagtggacttccaaggttctcaacttaatagtatttgcgctgcaagcaagagatttatgccactttcctccctattggatattggagatcttgaaaatttgttgggttaccagtttcttcataagggtctcctccttcaggcgattgtgcatccttcttttaataggcatgggggaggctgctaccaggtatgcaatatgtctgcttttctacttaaggaaatcagactctctttatgttttgtatttttcacctgccttgtcatttttataacattctattttctgatgcaacaattaataatactttgatacttttccagagattggagtttcttggagatgctgtcttagattatttaattacatcatatctgttttcactgtatccaaagttgaaacctggtcagttgactgatttgagatcagtgtcagtgaacaacaagtcctttgccaatgttgcagtggacagacgcttacacaaatttcttatgtgtgactcttgtcacctcaacgaggccatagaaaaatatgttgacttcatcacatcatcatcaccagacaggggattgtttgaagggccaaaatgtccgaaggtaagaattactagctgttgtatcttatgccccctgatgcatgctttcctctttccccccaagatataatgaattttagccatctttatataatgcaagttacaaatgcaaagctttattcctaacctatgatcattggattttctttttccttttaatttaagttaacgaggtctaggtggaatacaatattctaattaaagcttgcaactaaattatgttcatgcttattgtcttatttgtttaagagaatacatatgctggattatgataaatttaaaaaataattatgagcatttggtagaatgcagtataataatcgaagcaaatcttttttggagctgattatgctattttcttgtttgaggacgaagatgtgggtggctgattttgattctttgagtttgatttatgagagctaggtggaactgatattatgataaaagcaaatctgtgtaagaacacaatgctgctgcacaatacttcaagaagggtttttaatttaatagctttaatgtattgatacaggctcttggtgacttggtagagtcttgtttcggtgctattctccttgatacagggttcaacttgaaccgtgtttggaagataatgctatccattctggatccaatcaagagcctttcaagtgtgcagctcaatcctatcagggaagtacaggagctttcccagtgttataactgggatttgcagtttctagttgcaaaagttggtagaaatttttcagtggatgcaaaggtaaatgcaggagatgtacctctatgtgtttcttacagcaacattaatagaaaagaagctatcagaactactgcacatcaactatatgtaaagttaaaggtaacaggtgccctgcatactttcctattccctcttcttgatgccattaaaacatgatgctttttgaatatgtactcatatttggttccttttagaagttaatatcatttatagcccagtcttagtgtaggtatattccaaacttgtgaagcttgccttatattgcaggtcgataaatgattgtgaatttgcgacttaatccccgtctcttcttgtctttgaatgtacaggctctaggatatgcacccaaatcaaagtccttggaagaagttttgaagggaagccccaagaatgaagccaagctgattggatacgatgaaacacccattgatgtcagtgttactgacatagttggatttgaaaacatgaaattgcaagaatctcttgtgaatgatttcaaccccaaaactcgttctattaaaaggacaacttctagcggtgtatcttgcatctcacctggtagcagacctccaccttcttttgaagtaaaagcagcaaggggttcagcctctggtattgaagccaaaggcaaaccccccaattgctccattgtggatcctagttgtgggattgactcgccatccaaaggtaaatgattgttacactttttgtgactagtcagtgtggagcaattatcttatttgcctcttaatttctcaggtgaatcacatggtcgtactgctagatcacagttatacgaaatctgtgctatcaattgctggaaaccccctttgtttgaatgttgcaaagaggaaggaccaagtcatttgagatcgtaagtacacgacgcatatatactagaaaagacagctgaaaagtctccattaggacagttcgaaagatgggaacttcaaactacatccctcttgaataattttactcaaatcctatatattcaaaatcttttgcagattcacttacagggtaatagttgaaatcgaagaagctccagatatgatattggagtgcttcagcagtcctcggaccacaaagaaggcagcagccgagcatgcagcggaaggtgcactctggtatttaaaacatggaggatacttacaataggtcaacttaaccgactgaacctcattgctagacataatggagatcaaggtttgaatttagtcattttgctatctcagttcaatggctctagtctctctcttcatcccctatttaatgaacttaaaaaccagcattttctttaaaagtcgaataaaagatgatttaacaacaaaattaaaattttgcttcgaacttgttaacgtggcatttttggtatgtccatgtatccaacaaggagcccaatttaattcaatccatgtatctggtgctgtgtcatgaaagtgtaaagattaaatttattaaactcgagatagaggattaaagctattcaattgagataataagatgatcgaatttagatttcaaactcaaatat

SEQ ID NO: 541 - DNA, 14025 bp, Gossypium raimondii
  source 1..14025: mol_type = genomic DNA
gttctaatactttaatttgatcatttttaatttttatactttttaaaatttaaaattgatgataactgttaaattcattaagttaatttttattatttctaaaatttaatgcgctaaacataatatcacatgtgtaatgtcatgtcagcttgttattttcacatattgtttactaaaaatctagttaatggattaacaattgtcatttgggttgagattgaaattttaaaatttgcgatttagaatgattcaattgaaaaatatgaattaaatctataattgtagaagactaataattaaattgaaacaaataaatataatggttattatttaatttagactaaaatttcaaaattaaagaaaaaaataggggaatttaatatattgtttattaatttgttttagagaataaaagaaaccattctccactgtttaattttgattttatttatgaaatttcggatttccgagtgggagacgagattcggcagttcgactcattaataagcgaacaaatgtaatgataaaaaattgttggaagaggagttaccagatttgactttccattgaccgagcacaattcattacaagaaatcctaggagaccgctctgcttagtaaaccgaatgggatttcgacatctatttgtccatttgatcaaagcaaacaaaaatctttttttctttttgcttagcggttgagacttggaaaataagcaatttttaccagtcttctcaccgctgtggctataattccctcgttgatgccgggcggcgaattgtccaccgacgggaccgagccgttcatggcctctaaagttaaagccttttctactccgtcgccgatcgttgaaatcagccgaaaagatgaacctataatggaaaagaaagagaaggatccacgaaaaattgctagaaagttagtctctctttcacttccctatacatgtaaatatctatgcttatttgctccggttttttctttatgcaatgtggctttgccttggttctctttatttatttttttatttctttgcacgagttcagttaaattaaacgagagctatctgtttggcttgagggaagtgggaagatgggggaagggggttggagggaaaacatgaaaaataaaaaaccttgttagatgtttctgtttcaaaaacatcgaaagccaaaaaaaaaaaaaaatgcactgtttatttggagtgctgtttccgacaacctgtgagaagcttttatatatttaatttagtttttatatatttaaaaatcacgtcgggttttatgctttcatttaaggtatcaactggagttatgcaagaaagccatggaagagaacataattgtttatttggagactggttgtgggaagacccacatcgcagttctgcttatttatgagcttggccatttgatacggaaacctcagaatagggtatgcatttttcttgctcccacagtggctcttgttcagcaggtgagctactttctatgattttctgcattaatactctattgtcgggaattattagtttataatattgttttggctaagtttgggatttaggaaccaacttggatcatcattcgtcaattgtggattctttgcagcagtggaccatgcatggtttttaatggaatttgttattgttttatagcaagcccgggttatagaagattctcttgatttcaaggttgggacttattgtggtaactgcagacacttgaagaaccatcatgactgggaaatagagatcaaagaatatgaggttattatgttctttgattgacacaagtttataatttatccacgtgttgttcaacatcctatgttgtccacgtgtcattcgacatcctatgttgaaagcttaactataaagagatatgtcttatgaagtttaccaattttaatttattacacttgaccaaatatgttatcggtttttcttcctccacccccctcccccttatagaagatttttaattaggattatggaccctcgagctttcatcatcctcgccttatatttctattcatgttgaattttttgtacaggttcttgttatgactccccaaatactacttcgtagcttatatcactgcttcatcaggatggacttaatcgctcttctgatatttgatgagtgtcatcatgctcaaataaaaagcaaccatccttatgcagaaatcatgaaagtaaagtgctacatgaagtcacatttgtattctcaatgataaatttatattagtctttatcagttgatgtattttgattctgtagattacttgacaatcatgtaggttttttatgataaagctactgcatcaatgcttcctcgtatatttggaatgacagcatctcccgttgttggtaaaggtaattaaaaattgcatttcttttgaaacaaaagtctgaattattacatggatcagccatctccttttcaattcctttcggtacaaaaacttttcccattggaagtacgagaaattaaaggtgttttgaaatgtgttgtgtgtaaaggcagaatcaatcaagaaaataaattcgaatgcctacttttttatggaaaatgtgtttggtaaatgaaaaaaaatgttcttttctaaaaatgtccgtgaaatatgtttgatatcactaaacatttaaaaatgagaggaaaggttaaagaaataaataaaatatccaatgatattattcttgatttcaaatttctcaactttttcttttgtaattttataagcttttgttaaagagatttgagtagacaggaacaaatgagattgtaaatagttcaagatgcctctagagacaaaaaaggaaaaagaaagcagttaagggaataattactgctaatggcttctagttataaatattaacatatattattaattaatggcttcaaatagtgtttaattatgagtcaacttaacttgcaaagtgccaagcaaagaagtaatggacatcccgcgttttcaaaattgaaaagatgtcttttttttttggttgtttattctcatatttgaacccattttcattattgttttctaaaaacttgtttccgttttcaattatgctacgcttttcagtttatatgatacaaatatattggatgatattgcatcttgtagtgctcttcaatgatatattttcctctttaatcgataggctgttttagttattagttgttatctcatcttttgatagctacttctttgattaccttatcttacgcattcagatgcttccagtcaagtaaatttacctaaaagcatcaacagcctcgaaaacttgcttgatgctaaggtgagtctttgaaactttcactttgtgaaatctggtttggtgcaatctcttgttttccttctaaaaactaattatggttgaagatagggagctaagttcaatcataattcctacatgatgaataaaactcgtaaacagcatttcatgtatgtcatgggaagatgtttggtgcctaaacgtttccttgttaaattagaataaatgtagcttgtgaagatactattcttagtttatgtagctgggtttttgtaatgctgtttgaaaatgctatgcctacttaacttgtgtttgttagcctgaattgaggactttggttcagtcaaccttttccagactttcataagctggagtagtggcaggtcataattcatcttgatttagtgagtcaatgaggacaagaagatctatttggctttctgccttctcacttgagtgcaactgatcccaatttacttgatctcactaacatatatgtttagctataggagaactgtctgtttcttccgtttggtggacaaatgtgtttggtcctcttcataattgcgctaatcagtcttccagtagaactgcttaggttgaagtacagaaatatcttaccttgagtcattgtggtcagtaatgttactataactgttttaaggattcaagcaaccactgtaattttggccaggtggagtaatgtttattgttgtcatatcgtcgtaatcattttctttctcttcctcttccccttgctctgtgtgactgtgctaccatatatctttggagatgcaaaaaccaaagtttccttttcaatgaggaatgtttccataaactagactttttagttataatcaaaaccggggagggggggggggcggattcttttcttaaaccaatttctgttctgatatagatgctcagagtagtcaattttctaatatttcacatgccgcaaattgtaggtatattcagttggagataaggaggaattggaaagctttgtagcatctcctgtggttagagtatatgattatggtcctgtcaattttggttcttcttgttccaccattatctattgtagtaaacttgaggagattaagcgccaggtgtgtttcagtgacacatttgcactctcttgattatcttggaagaagttgtatttatttattcatttattttttctgtttctttatggcaagagcagtgcataccttttgtcaggaagaatggtgatattcaatctgccaggaacacaaaaaagctgctcaacagaatgcatgataatataatcttttgcttggaaaatttgggcatttggggagcattgcaagtaagatcttgtgaaaacaattgaatttcttggttctgttaatttgcagttgagagcctttcccttgcaattaaataatctgctattagtgttactttgattcttatttcatattctgcaacttttttctatttatctgaattatattcacaaactctgtactctggcaaaatcatgttggagaataccaaatagagtagaacattagattcacatgctatttaataaggctttatttttataaggtgtcgtattcataggtcattacttgctacttttttttttgtgcactgccaataagcagtgactaattattttttattctttcatttaatttgtatcagttctagcttgttgcagacttgcaggtagttgctgattaaagtatccaaggaaattctgatttatttccaccttctgcattttgtaggcttgccgacttcttttaactggtaataactctgagaggaatgaattgatagaagatgaagggattttaagtgacgactctgtatgtgatcgatatcttgttcatgctgctgatgtttttgcttcagattgtacgagaggtataatctttttaggccttttaaattctagcttcaacttcgttgtagctattgtctggtttcttggtggctctatacccaattatgtgttcatcaaagttcagttatgcaggagagatatgggatcagtgtagggactttttagtagtagcttcaacttaattctgccttctgtctctgttaattgatggccgcattacgatttgctacaccattgtaacttgtatgtattaaacttctagtaatcagtgggattttttttttgggtaaatggagatccttagatttttgaatttatatgctctgcttattgtttcagtcaacttgagtaagaatctgagctattagtctttgttgctgatattgtagatggatctgcaaacgatttatctgatgtagagattttgaaggaaccatttttctcgaaaaagctgctacgtcttgttggaattctttccaccttcaggtttgtattcaagcatgtatagtggtttttggttattttatagatatattgcatggaaactctatcggaccatttcaatggttatagtacttggtaaacaaatattatgacttatgtagttcttgcaacactaggaggcaagagaagggacttaatgcatgaggggtgatgtactgatgttaattcattttaactatgttgacacgtctcatttctttctatctggttactttcaaacaaactctactgctgcattttttcatgcctttaagctttttgcttttctcattatttaactaacaaggtgtatcatacacatatttctctcacaaacttctataattacttttacaggttacagccaaatatgaaatgcataatttttgtgaataggattgttactgcaagatccttgtcatacatactgcaaaaccttaagttcctattattttggaagtgccattttcttgtgggagtccactctggacttaaaagtatgtcaagaaagacaatgaaaaacattcttgagaagttcagaacaggagaggtaacccttctgttagtgttaatattccttggtcactcagctccttccaattcgtgaattttcacatcattgaattgttacttttatctctgcattttagcggactagctcagtttatcctttaggcacaatgtgggcagattttgtgttttttgacatccacatatcatttctataaatgttttcctaaggaagtgcatttcctaatgtctcgaagttattatgagacagaagctcattcattcagtctttgttcttgtaatttgagcctctagttctagttggttgtagcttatgtgatgtttgaaggataatggtaacaattaggaaaaccttgtgtaagtattgttaacggttctgtgtcagttgaattaatttattccaatgtttaaaaaactggactagacgtcaaaccagtgagacctccgtttattggttcaactgggcagactggttgaactggctagttgtgctaaataattattgaatatagtaaatatctaataaaactgatttaatgttgattcaagggaataaatgctctaatctcatcacatacgataaaatttagaaaagtccaacatctgtttttacgttttttactggttaaatgggttttatatactggaccagacaggcaattggttcctggttcaaccagtttgcctggcaggtctgtctggtttttttacactaatttatttttgattccttgaatgctgacttggcagttgaatcttttgattgcaactaaagtcggtgaagaaggacttgacattcagacatgctgccttgtgatacgttttgaccttccagaaactgttgcgagctttatccaatcaagaggacgtgcaagaatgcctctctctgagtatgcatttctggtgaacaggtgctattcataaaagtatatgctatttgaaggtctgtcaatttggttctctttctgtaattgggaaaaaataagatctctttctcttaactttgcagtgggaacgagaaggaactagatttgattaaaaattttaagaaagatgaagatcgtatgaatgtggaaatttctttcagaacatctactgaggtttctattggtcttgaggagagaatctatatggttgattcatctggtgcttccatcagttcaggatatagtatctctctacttcatcattactgctcaaaactgccccatgatgagtatgccttactttttcgttcttacctgcttttgaacttataatgtcactatatatgtttcttgtggaaattcatttactaatttagattatccacgtgaatataattttcaggtactttttccccaagccaagcttttattattttgaagattcaggaggaacaatctgcaatataatattaccttcgaatgctccaataaatcaaattgccagtacacctcaatcttcagttaatgctgccaaaaaagatgcttgtctaaaagcaattgaagaattgcataaattgggagccttgactgaccatctcttgccactgcaaaacagtgttcttgaggaggaaacattgctggtgtcttctgattctgggagctctgaaggttgatgcagagcaactttgtagtcttattcttttcttcttctttttggttgggtgactggtatagaattaatcacttttgctcgtctttaatctcagcaaaatttgattttggttttcagcagatgaggattcacgaggtgaactacatgagatgcttgttcctgctgtgcttaaagaatcatggactaacttagagaactgtgtcctcctttatgcttactatataaaatttaatccgaatcctaaggacaggagctataaagagtttgctctctttgtcaagtctcctctccctaaggaggctgagagaatggagctggatcttcacctatctcggcgtaggtcggtgatgacaaagcttaccccatctggagttgcagaatttaagagagaagaggtaacaatgttttgtttctgtcagactttgttctaattatcttactaccaaaactcactgtgtatctgtgcatatgcagatcatgcaggcacagcattttcaagaaatgttcttcaaggtcatccttgatagatcagaactcctttctgaatttattactttaggaaatgtctttctttcatcaagctcctcaacattctatttattgcttcctgttattctctccaattgtgagaataaagtgacagtggattgggggattgtccaaagatgtttgtcgtctccactttttaagcctcctgttgcagctgcaaagattgaaaatttcccttcagatgtttgcttgcaccttgtaaatggttgtaggagtataagagacattgagaatagtttggtgtatgccacacacaagagggccttttactttattactagcattgttggtgaaaaaaatggttacagcccatatagagattcaggcactttaaatcacgtggagcacttaaacatgttggtagctccactcttgattcacaactgttattaacgttatcagaatagtttatggggaggttatgctcaccaagttgtttagattaggtttttatctagtattcaattgataaagtgttaacttgaatgttgtcaatcaggtctggcattcatcttaagtaccctgaacaacctcttctgcatgcaaaaccactttttaagttgcacaatttgctccacaaccgaaagccggaggattcaggtagcttctcgtttgctttgctttcattcttgtcattgttcccttttcactaagtatgttgcttgttatactggattatttgtgttcaagatatgatattctagaccttgctaccatcttcatgggtatattgctatttgttttgtcagattgcattattttttcatgatgggaacaagatttatggttcattattgatagattagtgctacattgcctgtaattgacatgaaatgcctgatttattgttaattatttgttaatgattgtccttttctgatttttcttcttcttcatcagaaaacactagaaaacaagaaattaccaatttgaagtagtcttatagccatgcagcttatttgatgtgcaagagatatcttgaactgtattcttttggaaatgagaaatgctcaagttgggcgattgagtgagactatgagttctcacatggcggtgaagattgaggattaatctttcttttccaatcctagacttaaggattactagctagtaagtagaatcaggctattgcaacaataaaacgctttacaaccggccttgctggccattctttaatctgcttcagcacttggattaatggggctattggtttttgtctgaatcttccctggaaatatactagtatatcgttaaaatgttatctttaatacaacctttttagtatcaaaagcttgagtcattctggatcccccctgccccccaaaggaaaaaaaggtccttctcattttctctatcagtaaatcaaacaaaagggaaatatgttttgttgattttctctgtcttttcatttcttaaggctgttctttgttgtaaacagaagcaaatgaactggaagaatacttcattgatttgcctcctgagctttgtcagctgaaaataataggcttctccaaagagatagggagttcgctttctttgttaccatcaattatgcatcgcctggagaacttgcttgtggctattgaactgaagcatgttttttctgcttcatttgccgagggagctgaagttactgcccttagggtaagacctaagtccacgtgatattatgactagtgcttttggttaagtgtctgttaagttagttactgtgctagtccaatcatttaatcaagaaatgcaagcatctccatgaatgttatctatgactaacagtttgaaatggtgttaggtcctagaagcacttactacagagaagtgtcaagagcgtttttctcttgaaaggcttgagacacttggtgattccttcctcaagtttgctgtggcccgccatctttttcttttacatgatgcacttgatgaaggggaattgactaggagaaggtctaatgttgtaaataattctaatttattcaagctggcaacaaggcgaaatttacaggtttgattgtgttttagaaagtgatattcttatacagaagttttgacttctgttatgaatagcataattgttatatttttgagaaattttacctgttggtcaacatactatttcaaacatagaacatttttacgattccagtctgccattcttcactgctaacaaatgtggagtagttgcattaaatgctaaggtgcatgttcatgtcactcatccaatatggataaattatcttagacctgtagacatagaagattatagaaaaatgtggtatttactaaaatgattaaactaagaaacaatgtgtgtagttagaaccctctccttgattttggaattgttagcatcagccgttgaaggagtttcgggtgtattcaaatgctttacgttcatgccacttggaatggataatttgaacctaagaagatttaatatgtctatgtctatttggtgttttaagataaataattaatatttacggttctgtgtttccactaaatttcaggtttacatacgtgatcaaccttttgatccttatcagttctttcccttgggccatccctgcccagtaatttgtacaaaagaaactaaaggaactgttcacccacaatctagttgtcaagtagatcatacaaagagtgaagtcaaatgtagtagaaatcaccattggctacataaggacacaatttctgatgtggttgaggctcttgtaggagcatttatagttgataggggcttccaagcggcaacagcatttcttagatggataggcatacgagtggacttccaaggttctcaacttaatagtatttgcgctgcaagcaagagatttatgccactttcctccctattggatattggagatcttgaaaatttgttgggttaccagtttcttcataagggtctcctccttcaggcgattgtgcatccttcttttaataggcatgggggaggctgctaccaggtatgcaatatgtctgcttttctacttaaggaaatcagactctctttatgttttgtatttttcacctgccttgtcatttttataacattctattttctgatgcaacaattaataatactttgatacttttccagagattggagtttcttggagatgctgtcttagattatttaattacatcatatctgttttcactgtatccaaagttgaaacctggtcagttgactgatttgagatcagtgtcagtgaacaacaagtcctttgccaatgttgcagtggacagacgcttacacaaatttcttatgtgtgactcttgtcacctcaacgaggccatagaaaaatatgttgacttcatcacatcatcatcaccagacaggggattgtttgaagggccaaaatgtccgaaggtaagaattactagctgttgtatcttatgccccctgatgcatgctttcctctttccccccaagatataatgaattttagccatctttatataatgcaagttacaaatgcaaagctttattcctaacctatgatcattggattttctttttccttttaatttaagttaacgaggtctaggtggaatacaatattctaattaaagcttgcaactaaattatgttcatgcttattgtcttatttgtttaagagaatacatatgctggattatgataaatttaaaaaataattatgagcatttggtagaatgcagtataataatcgaagcaaatcttttttggagctgattatgctattttcttgtttgaggacgaagatgtgggtggctgattttgattctttgagtttgatttatgagagctaggtggaactgatattatgataaaagcaaatctgtgtaagaacacaatgctgctgcacaatacttcaagaagggtttttaatttaatagctttaatgtattgatacaggctcttggtgacttggtagagtcttgtttcggtgctattctccttgatacagggttcaacttgaaccgtgtttggaagataatgctatccattctggatccaatcaagagcctttcaagtgtgcagctcaatcctatcagggaagtacaggagctttcccagtgttataactgggatttgcagtttctagttgcaaaagttggtagaaatttttcagtggatgcaaaggtaaatgcaggagatgtacctctatgtgtttcttacagcaacattaatagaaaagaagctatcagaactactgcacatcaactatatgtaaagttaaaggtaacaggtgccctgcatactttcctattccctcttcttgatgccattaaaacatgatgctttttgaatatgtactcatatttggttccttttagaagttaatatcatttatagcccagtcttagtgtaggtatattccaaacttgtgaagcttgccttatattgcaggtcgataaatgattgtgaatttgcgacttaatccccgtctcttcttgtctttgaatgtacaggctctaggatatgcacccaaatcaaagtccttggaagaagttttgaagggaagccccaagaatgaagccaagctgattggatacgatgaaacacccattgatgtcagtgttactgacatagttggatttgaaaacatgaaattgcaagaatctcttgtgaatgatttcaaccccaaaactcgttctattaaaaggacaacttctagcggtgtatcttgcatctcacctggtagcagacctccaccttcttttgaagtaaaagcagcaaggggttcagcctctggtattgaagccaaaggcaaaccccccaattgctccattgtggatcctagttgtgggattgactcgccatccaaaggtaaatgattgttacactttttgtgactagtcagtgtggagcaattatcttatttgcctcttaatttctcaggtgaatcacatggtcgtactgctagatcacagttatacgaaatctgtgctatcaattgctggaaaccccctttgtttgaatgttgcaaagaggaaggaccaagtcatttgagatcgtaagtacacgacgcatatatactagaaaagacagctgaaaagtctccattaggacagttcgaaagatgggaacttcaaactacatccctcttgaataattttactcaaatcctatatattcaaaatcttttgcagattcacttacagggtaatagttgaaatcgaagaagctccagatatgatattggagtgcttcagcagtcctcggaccacaaagaaggcagcagccgagcatgcagcggaaggtgcactctggtatttaaaacatggaggatacttacaataggtcaacttaaccgactgaacctcattgctagacataatggagatcaaggtttgaatttagtcattttgctatctcagttcaatggctctagtctctctcttcatcccctatttaatgaacttaaaaaccagcattttctttaaaagtcgaataaaagatgatttaacaacaaaattaaaattttgcttcgaacttgttaacgtggcatttttggtatgtccatgtatccaacaaggagcccaatttaattcaatccatgtatctggtgctgtgtcatgaaagtgtaaagattaaatttattaaactcgagatagaggattaaagctattcaattgagataataagatgatcgaatttagatttcaaactcaaatatgtttgatgatgtctatattgatggctgtta

SEQ ID NO: 542 - protein, 912 aa, Gossypium raimondii
MDSFEQEGNGAALESLPPPPPVPPDVVPIKAESDAKKIVRHPMARRGVGTKGQKVTILTNHFKVSVGSTDGHFYHYSVSLSYEDGRPVDGKGVGRKVIDRVHETYKNDLDGKNFAYDGEKSLFTIGPLPNNKLEFTVVLEDVAPTRNNGNASPDGQDSPNGRERKRLRRPYHSKTFKVEISYAAKIPMQAIQNALRGQESENSQEALRVLDIILRQHAAKQGCLLVRQSFFQDNQNNFTDIGGGVLGCRGFHSSFRATQGGLSLNIDVSTTMIIQPGPVVDFLLANQNARDPYSLDWNKAKRVLKNLRIKVSPSNQEYKITGLSEQLCKDQLFSMKQKNTKNENGEAETLEITIYDYFVNHRNIQLRYSADLPCINVGKPKRPTYIPIELCSLVSLQRYTKALSTFQRASLVEKSRQKPQERMNVLSNVLRTSNYGAEPMLKSCGVNINSNFTQVDGRILPAPRLRVGNGEDFFPRNGRWNFNNKKLVEPSRIERWAVVNFSAPRCDPNNIARDLIRCGEMKGIRIDPPFDIFNEMNQNRRLSPVVRVEKMFEQIQSKLPGAPQFLLCLLPDRKNSDLYGPWKRKNLSEYGIVTQCMAPARVNDQYLTNLLLKINAKLGGLNSMLTIEQTPSIPMISKVPTIILGMDVSHGSPGQSDVPSIAAVVSSRQWPLISRYRASVRTQSPKLEMVDSLFKPVSDKVDEGIMREALLDFYTSSGKRKPDQIIIFRDGVSESQFNQVLNKELDQVIEACKFLDENWNPKFVVIVAQKNHHTKFFQQGSPDNVLPGTVIDNKVCHPKNNDFYLCAHAGMIGTTRPTHYHVLLDQVGFSADDLQELVHSLSYVYQRSTTAISVVAPICYAHLAASQLGQFMKFEDASETSSSHGGVTAPGAISVPQLPRLKDNVSSSMFFC

SEQ ID NO: 543 - protein, 912 aa, Gossypium raimondii; identical to SEQ ID NO: 542

SEQ ID NO: 544 - protein, 912 aa, Gossypium raimondii; identical to SEQ ID NO: 542

SEQ ID NO: 545 - protein, 863 aa, Gossypium raimondii
MDSFEQEGNGAALESLPPPPPVPPDVVPIKAESDAKKIVRHPMARRGVGTKGQKVTILTNHFKVSVGSTDGHFYHYSVSLSYEDGRPVDGKGVGRKVIDRVHETYKNDLDGKNFAYDGEKSLFTIGPLPNNKLEFTVVLEDVAPTRNNGNASPDGQDSPNGRERKRLRRPYHSKTFKVEISYAAKIPMQAIQNALRGQESENSQEALRVLDIILRQHAAKQGCLLVRQSFFQDNQNNFTDIGGGVLGCRGFHSSFRATQGGLSLNIDVSTTMIIQPGPVVDFLLANQNARDPYSLDWNKAKRVLKNLRIKVSPSNQEYKITGLSEQLCKDQLFSMKQKNTKNENGEAETLEITIYDYFVNHRNIQLRYSADLPCINVGKPKRPTYIPIELCSLVSLQRYTKALSTFQRASLVEKSRQKPQERMNVLSNVLRTSNYGAEPMLKSCGVNINSNFTQVDGRILPAPRLRVGNGEDFFPRNGRWNFNNKKLVEPSRIERWAVVNFSAPRCDPNNIARDLIRCGEMKGIRIDPPFDIFNEMNQNRRLSPVVRVEKMFEQIQSKLPGAPQFLLCLLPDRKNSDLYGPWKRKNLSEYGIVTQCMAPARVNDQYLTNLLLKINAKLGGLNSMLTIEQTPSIPMISKVPTIILGMDVSHGSPGQSDVPSIAAVVSSRQWPLISRYRASVRTQSPKLEMVDSLFKPVSDKVDEGIMREALLDFYTSSGKRKPDQIIIFRDGVSESQFNQVLNKELDQVIEACKFLDENWNPKFVVIVAQKNHHTKFFQQGSPDNVLPGTVIDNKVCHPKNNDFYLCAHAGMIGTTRPTHYHVLLDQVGFSADDLQELVHSLSYVGPYLLRSFGSFTVGAIYEV

SEQ ID NO: 546 - protein, 844 aa, Gossypium raimondii
MDSFEQEGNGAALESLPPPPPVPPDVVPIKAESDAKKIVRHPMARRGVGTKGQKVTILTNHFKVSVGSTDGHFYHYSVSLSYEDGRPVDGKGVGRKVIDRVHETYKNDLDGKNFAYDGEKSLFTIGPLPNNKLEFTVVLEDVAPTRNNGNASPDGQDSPNGRERKRLRRPYHSKTFKVEISYAAKIPMQAIQNALRGQESENSQEALRVLDIILRQHAAKQGCLLVRQSFFQDNQNNFTDIGGGVLGCRGFHSSFRATQGGLSLNIDVSTTMIIQPGPVVDFLLANQNARDPYSLDWNKAKRVLKNLRIKVSPSNQEYKITGLSEQLCKDQLFSMKQKNTKNENGEAETLEITIYDYFVNHRNIQLRYSADLPCINVGKPKRPTYIPIELCSLVSLQRYTKALSTFQRASLVEKSRQKPQERMNVLSNVLRTSNYGAEPMLKSCGVNINSNFTQVDGRILPAPRLRVGNGEDFFPRNGRWNFNNKKLVEPSRIERWAVVNFSAPRCDPNNIARDLIRCGEMKGIRIDPPFDIFNEMNQNRRLSPVVRVEKMFEQIQSKLPGAPQFLLCLLPDRKNSDLYGPWKRKNLSEYGIVTQCMAPARVNDQYLTNLLLKINAKLGGLNSMLTIEQTPSIPMISKVPTIILGMDVSHGSPGQSDVPSIAAVVSSRQWPLISRYRASVRTQSPKLEMVDSLFKPVSDKVDEGIMREALLDFYTSSGKRKPDQIIIFRDGVSESQFNQVLNKELDQVIEACKFLDENWNPKFVVIVAQKNHHTKFFQQGSPDNVLPGTVIDNKVCHPKNNDFYLCAHAGMIGTTRPTHYHVLLDQVGFSADDLQELVHSLSYV

SEQ ID NO: 547 - protein, 822 aa, Gossypium raimondii
MDSFEQEGNGAALESLPPPPPVPPDVVPIKAESDAKKIVRHPMARRGVGTKGQKVTILTNHFKVSVGSTDGHFYHYSVSLSYEDGRPVDGKGVGRKVIDRVHETYKNDLDGKNFAYDGEKSLFTIGPLPNNKLEFTVVLEDVAPTRNNGNASPDGQDSPNGRERKRLRRPYHSKTFKVEISYAAKIPMQAIQNALRGQESENSQEALRVLDIILRQHAAKQGCLLVRQSFFQDNQNNFTDIGGGVLGCRGFHSSFRATQGGLSLNIDVSTTMIIQPGPVVDFLLANQNARDPYSLDWNKAKRVLKNLRIKVSPSNQEYKITGLSEQLCKDQLFSMKQKNTKNENGEAETLEITIYDYFVNHRNIQLRYSADLPCINVGKPKRPTYIPIELCSLVSLQRYTKALSTFQRASLVEKSRQKPQERMNVLSNVLRTSNYGAEPMLKSCGVNINSNFTQVDGRILPAPRLRVGNGEDFFPRNGRWNFNNKKLVEPSRIERWAVVNFSAPRCDPNNIARDLIRCGEMKGIRIDPPFDIFNEMNQNRRLSPVVRVEKMFEQIQSKLPGAPQFLLCLLPDRKNSDLYGPWKRKNLSEYGIVTQCMAPARVNDQYLTNLLLKINAKLGGLNSMLTIEQTPSIPMISKVPTIILGMDVSHGSPGQSDVPSIAAVVSSRQWPLISRYRASVRTQSPKLEMVDSLFKPVSDKVDEGIMREALLDFYTSSGKRKPDQIIIFRDGVSESQFNQVLNKELDQVIEACKFLDENWNPKFVVIVAQKNHHTKFFQQGSPDNVLPGTVIDNKVCHPKNNDFYLCAHAGMIVSSLIFVSVN

SEQ ID NO: 548 - protein, 699 aa, Gossypium raimondii
MDTSTITAGCLLVRQSFFQDNQNNFTDIGGGVLGCRGFHSSFRATQGGLSLNIDVSTTMIIQPGPVVDFLLANQNARDPYSLDWNKAKRVLKNLRIKVSPSNQEYKITGLSEQLCKDQLFSMKQKNTKNENGEAETLEITIYDYFVNHRNIQLRYSADLPCINVGKPKRPTYIPIELCSLVSLQRYTKALSTFQRASLVEKSRQKPQERMNVLSNVLRTSNYGAEPMLKSCGVNINSNFTQVDGRILPAPRLRVGNGEDFFPRNGRWNFNNKKLVEPSRIERWAVVNFSAPRCDPNNIARDLIRCGEMKGIRIDPPFDIFNEMNQNRRLSPVVRVEKMFEQIQSKLPGAPQFLLCLLPDRKNSDLYGPWKRKNLSEYGIVTQCMAPARVNDQYLTNLLLKINAKLGGLNSMLTIEQTPSIPMISKVPTIILGMDVSHGSPGQSDVPSIAAVVSSRQWPLISRYRASVRTQSPKLEMVDSLFKPVSDKVDEGIMREALLDFYTSSGKRKPDQIIIFRDGVSESQFNQVLNKELDQVIEACKFLDENWNPKFVVIVAQKNHHTKFFQQGSPDNVLPGTVIDNKVCHPKNNDFYLCAHAGMIGTTRPTHYHVLLDQVGFSADDLQELVHSLSYVYQRSTTAISVVAPICYAHLAASQLGQFMKFEDASETSSSHGGVTAPGAISVPQLPRLKDNVSSSMFFC

SEQ ID NO: 549 - protein, 913 aa, Gossypium raimondii
MDSFEQDGNGAAPDSLPPPPPVPPDVVPIKAEPEPAKKKVVRVPMARRGLGSKGQKITLLTNHFKVNVGSSDGHFFHYCVSLYYEDGRPVDGKGVGRKVIERVQETYGNELAGKDFAYDGEKSLFTVGALPNNKHEFTVVLEDVTSNRNNGNASPDVHDDSNGQDRKRIKRPYQSKTFKVEISFAAKIPMQAIQNALRGQESENSQEALRVLDIILRQHAAKQGCLLVRQSFFQNNPDNFTDIGGGVLGCRGFHSSFRASQGGLSLNIDVSTTMIIRPGPVVDFLLANQNARDPYSLDWTKAKRSLKNLRIKVSPSNQEYKITGLSEQLCKDQLFSLKQKSMKNDNGEAENLEITVYDYFVNHRNIQLRYSADLPCINVGKPKRPTYIPLELCSLVSLQRYTKALTTFQRASLVEKSRQKPQERMTVLSSALQRSNYGAEPMLRSCGISISTNFTQVEGRVLPAPRLKVGNGEDFFPRNGRWNFNNKKLVEPTKIERWAVVNFSARCDTNSLVRDLIRCGDMKGIRIDPPFDVFQESNQNRRCSPLVRVEKMFEDIQSKLPGAPQFLLCLLPDRKNSDLYGPWKKKNLSEFGIVTQCMAPTRVNDQYLTNLLLKINAKLGGLNSMLAIEQTPSIPVVSKVPTIILGMDVSHGSPGQSDIPSIAAVVSSRQWPLISRYRASVRTQSPKLEMIDSLFKKVSDKEDEGIMREVLLDFYTSSGKRKPDQIIIFRDGVSESQFNQVLNIELDQVIEACKFLDESWNPKFVVIVAQKNHHTKFFQQGSPDNVPPGTVIDNKICHPKNNDFYLCAHAGMIGTTRPTHYHVLLDQIGFSADDLQELVHSLSYVYQRSTTAISVVAPICYAHLAAAQVGTFMKFEDASETNSSHGGVTAPGAISVPQLPRLKENVCNSMFFC

SEQ ID NO: 550 - protein, 912 aa, Gossypium raimondii; identical to SEQ ID NO: 542

SEQ ID NO: 551 - protein, 912 aa, Gossypium raimondii; identical to SEQ ID NO: 542

SEQ ID NO: 552 - protein, 912 aa, Gossypium raimondii; identical to SEQ ID NO: 542

SEQ ID NO: 553 - protein, 913 aa, Gossypium raimondii; identical to SEQ ID NO: 549

SEQ ID NO: 554 - protein, 898 aa, Gossypium raimondii
MEKASTEEALELPSLPLPLPTIPSNVKLESLKPPKYSIVSRREVGTSGRKISLLANHFKVSVNAPDAVFYQYTVTVLSEDSRVVESKRIGRKLVDKLYQTYSSELAGKRFAYDGEKSLYTVGPLPQNKFEFTIVLEDSFAKWSPDADGGPAETGKRTKRSFQSKTYKVELSYSAKIPLKSISLALKGVQSDDSTQDALRVLDIILRQQAADRGCLLVRQSFFQDDSRNYVDLGGGVLGLRGFHSSFRPTQGGLSLNMDVSTTMILRPGPVFEFLKQNLNLNDERFWLKARRMLKNMRIKTRHRNMEFKITGLSEKPCCELFFPMKVKNGGCGEVRTVEITVYEYFTKHCGIELTYSADMPCLDVGKPKRPNYLPLELCSLVSLQRYTKALTTNQRATLVERSRQKPRERIQILTDALKNNKFNENPVLSACEISIGRQLTEVEGRILETPRLKVGNHEDCIPRNGRWNYNNKRFLDPKKIERWIAVNFSARCDLSQISRDLISCARNKGIEMERPHTLIEEERHQAAKAGPAARVEAMFDQIIAKLPGPPEFILCVLPVRKNSDIYGPWKKKCLCDMGIATQCISPGKINDQYLTNVLLKINSKLGGINSLLEIEKPSILPLLKDTPTLILGMDVSHGSPGRSDVPSIAAVVGSLHWPLISRYRASVRTQSPKMEMIEALYKPSPDGKVDDGIIRELLVDFYKTSGNRKPKQIIIFRDGVSESQFNQVLNIELEQIIKSYQFLGESDVPKFTVVVAQKNHHTKLFQANAPENVPPGTVVDTKIVHPRNYDFYMSAHAGMIGTSRPAHYHVLLDEIGFSPNDLQNLIHCLSYVYQRSTAAVSIVAPICYAHLAAYQMGQFLKLDELSETSSGNVTSTGSILVPDLPRLKKNVASTMFFC

SEQ ID NO: 555 - protein, 850 aa, Gossypium raimondii
MEKASTEEALELPSLPLPLPTIPSNVKLESLKPPKYSIVSRREVGTSGRKISLLANHFKVSVNAPDAVFYQYTVTVLSEDSRVVESKRIGRKLVDKLYQTYSSELAGKRFAYDGEKSLYTVGPLPQNKFEFTIVLEDSFAKWSPDADGGPAETGKRTKRSFQSKTYKVELSYSAKIPLKSISLALKGVQSDDSTQDALRVLDIILRQQAADRGCLLVRQSFFQDDSRNYVDLGGGVLGLRGFHSSFRPTQGGLSLNMDVSTTMILRPGPVFEFLKQNLNLNDERFWLKARRMLKNMRIKTRHRNMEFKITGLSEKPCCELFFPMKVKNGGCGEVRTVEITVYEYFTKHCGIELTYSADMPCLDVGKPKRPNYLPLELCSLVSLQRYTKALTTNQRATLVERSRQKPRERIQILTDALKNNKFNENPVLSACEISIGRQLTEVEGRILETPRLKVGNHEDCIPRNGRWNYNNKRFLDPKKIERWIAVNFSARCDLSQISRDLISCARNKGIEMERPHTLIEEERHQAAKAGPAARVEAMFDQIIAKLPGPPEFILCVLPVRKNSDIYGPWKKKCLCDMGIATQCISPGKINDQYLTNVLLKINSKLGGINSLLEIEKPSILPLLKDTPTLILGMDVSHGSPGRSDVPSIAAVVGSLHWPLISRYRASVRTQSPKMEMIEALYKPSPDGKVDDGIIRELLVDFYKTSGNRKPKQIIIFRDGVSESQFNQVLNIELEQIIKSYQFLGESDVPKFTVVVAQKNHHTKLFQANAPENVPPGTVVDTKIVHPRNYDFYMSAHAGMIGTSRPAHYHVLLDEIGFSPNDLQNLIHCLSYVYQRSTAAVSIDGPIFEAG

SEQ ID NO: 556 - protein, 832 aa, Gossypium raimondii
MEKASTEEALELPSLPLPLPTIPSNVKLESLKPPKYSIVSRREVGTSGRKISLLANHFKVSVNAPDAVFYQYTVTVLSEDSRVVESKRIGRKLVDKLYQTYSSELAGKRFAYDGEKSLYTVGPLPQNKFEFTIVLEDSFAKWSPDADGGPAETGKRTKRSFQSKTYKVELSYSAKIPLKSISLALKGVQSDDSTQDALRVLDIILRQQAADRGCLLVRQSFFQDDSRNYVDLGGGVLGLRGFHSSFRPTQGGLSLNMDVSTTMILRPGPVFEFLKQNLNLNDERFWLKARRMLKNMRIKTRHRNMEFKITGLSEKPCCELFFPMKVKNGGCGEVRTVEITVYEYFTKHCGIELTYSADMPCLDVGKPKRPNYLPLELCSLVSLQRYTKALTTNQRATLVERSRQKPRERIQILTDALKNNKFNENPVLSACEISIGRQLTEVEGRILETPRLKVGNHEDCIPRNGRWNYNNKRFLDPKKIERWIAVNFSARCDLSQISRDLISCARNKGIEMERPHTLIEEERHQAAKAGPAARVEAMFDQIIAKLPGPPEFILCVLPVRKNSDIYGPWKKKCLCDMGIATQCISPGKINDQYLTNVLLKINSKLGGINSLLEIEKPSILPLLKDTPTLILGMDVSHGSPGRSDVPSIAAVVGSLHWPLISRYRASVRTQSPKMEMIEALYKPSPDGKVDDGIIRELLVDFYKTSGNRKPKQIIIFRDGVSESQFNQVLNIELEQIIKSYQFLGESDVPKFTVVVAQKNHHTKLFQANAPENVPPGTVVDTKIVHPRNYDFYMSAHAGMIGTSRPAHYHVLLDEIGFSPNDLQNLIHCLSYV

SEQ ID NO: 557 - protein, 905 aa, Gossypium raimondii
MPSTRRASNPMKDTDSTKNPTRSSQRNRKTVLEPENDEVIVVSEGENSEVSRGGKRKESSASGAGNNAKKSKPSVAKMTPLDTENGEAMVVDGTENGSKTTPKNSKKTKTDVAVNEDKEETKFLGEPVDDEEARRRWPKRYQGKGAKKVISKSSNGDSEEIIQARRHYTQAKVDGCMIFNLYDDAHVKAEDGEDCYICKIVEMFEAVDGDLYFTAQWFYRAQDTVLKTLGHLIDKKRVFFSQIQDDNPLDCLVAKLNIAKVSLNVDLEAKNKEIPSCDYYCDMLYTLEYSSFTNLPPEGKTNASEEASSTISDDSPDTVNGANSGSEDASLLDLYSGCGAMSTGLCLGANMAGLRLVTKWAVDINKYACESLQWNHPETTVRNESAEDFLALLKEWERLCASFSSSKSENLERQSFNSSVNEDNVNDEEEEEDENEDGDGEVFEVEKFLAICYGDPKEKGERGLYLKVRWKNYGPEEDTWEPLDGLGDCRECLKDFVTSGFKAKILPLPGDVDVVCGGPPCQGISGFNRFRNKDNPLQDEKNKQLQVFMEIVEYLKPKFVLMENVVDIVKFAEGYLGRYALSKLIHLNYQVRMGMMAAGAYGLPQFRMRAFFWGARPNQKLPQYPLPTHDLVLRGVIPVEFEMNTVGWEEGKKIELEKKLLLEDAISDLPSVGNYEDKDEMDYDKDPKTEFQRFIRLRREEMPGFSSLNAKPTKHLLYDHRPLQLNTDDYQRVCRVPKRKGANFRDFPGVIVNSGNKVEWDPNVERVYLESGKPLVPDYAMSFVGGSSSKPFARLWWDETVPTVVTRAEPHNQAILHPVQDRVLSIRENARLQGFPDYYKLFGPVKERYIQVGNAVAVPVSRALGYALGLAYQGVVSNDEPLTKLPPRFPNISEKASSDSSQDNS

SEQ ID NO: 558 - protein, 1659 aa, Gossypium raimondii
MHSPKEEQGEPLKRSFSEANSDPPDWMVLDDNETAKEEDPSSSSKPKDFNPRGYQLQVYEVAKGRNIIAVLDTGVGKTMIAVMLIKDFVQAIESTESKKLIIFLAPTVHLVNQQFEYVKDHTSLEVEQYYGAKGVDEWTLDCWEKETKEHDVLVMTPQILLDALRKAFLSLEMVSLMIIDECHRATGNHPYAKIMKEFYHKSNNKPKIFGMTASPVVSKGVLSSNNCDGQMSELECVLDSLIYTIEDRTEMEACVPSAKESCRFFDPAQFSSLDLKAKVEASWLKTDASLSNLQSSLQTSYKGMDDKLKNLRKRLSNDHAKVLHCLDNLGLICAYEAVNICLENILDTTEESKAYRESVLQYKNFLEEVQCRIGESLPLGDKNFLNTGFDYLKAVDLGYISPKLHELLQLFQSFGETRQVLCLIFVERIITAKVIERFAKKVSCLSHFMVSYMTGSNTSVDSLAPKMQKETLESFRSGKVNLLFTTDVVEEGIHVPNCCYVIRFDLPKTVRSYVQSRGRARQNNSEFIMMLERGNVKQRNQLYDIIRSEYSMTNSAIKRDPDSDPCLLKDHTFEETNVFIVDATGASVTADSAVSLIHKYCGKLPGDKYYTPKPNFQFTSSEGLYKCKLTLPVNAAVQTIVGPLSRNSHLAKQLVCLEACKQLHQMGALDDHLTPSIEEPSENACISKGKDSGAGAGAGTTKRKELHGTTCIQALCGSWGEKSDDAVFFAYKFDFKCNIITVVYSGFVLLIESKLADDVGNTEMDLFLIGKMVKASVSSCGQVYLNAEQMVKAKRFQEFFFNGLFGKLFVGSKSSGAPREFLLRDKTSSLWSPSHMYLLLPLEDNSTDELRIHWPGITACTLAAEFLNKNSLLGTEQSDDDGSNPSLNSTGSPVTYCKETNIIRFANSSVDANSLRNTVVLAIHTGRIYCIIEAVSDKTAESSFAETVDTVSSEFATFYEYFYKKYNIVLKHPGQPLMLLKQSHNPHNLLVNFNDEGVSAKASQAGVVNEKPRFHVHMPPELLLVLDVPVSVLKSLYLLPSLMHRLESLMLANQLREEINFCSSNIDIPSSMILEALTTLRCCESFSMERLELLGDSVLKYAVSCHLFLRYPNKHEGQLSARRSLAVCNSTLHKLGTDHKIQGYIRDSAFDPRRWVAPGQRVLRPVPCKCGVDSLEVPLDKKFQTEDPKVKVGKSCDRGHRWLCSKTISDCVEALIGAYYLSGGLVAALHVMKWLGIDAELDPLVVAEVINQASLRTYVPNYEIHMIESKVGYNFSVKFFLQEALTHESLHESYCYQRLEFLGDSVLDLLITQYLYNHHTDIDPGELTDLRSASVNNENFAQVAVRHDLHKHLQHCSTLLSNQISEYVRSFTESDNTTRLDPSIKGPKALGDLVESIVGAILIDTNLNLDKVWRIVEPLLSPIVTPDKLELPPFRELNELCDSLGYFIKEKCKNKGEVVHAELLLQLDHDLLVGEGFDRSRKVAKGKAASCLLKDLENRGISRKKRKHDCVDSSQTMEDDSLEPTIPKRQRSAEIQLLDESKKACSATPATPVIVTVKTKKGGPRTTLFELCKKLLWPMPSIKATEHKSSAPMEIGEGPERKKGFISFVSKIILNVPGYDIIECTGDAKADKKSSSDSAALFMLYELEQRGKLIIEETL

SEQ ID NO: 559 - protein, 1657 aa, Gossypium raimondii
MHSPKEEQGEPLKRSFSEANSDPPDWMVLDDNETAKEEDPSSSSKPKDFNPRGYQLQVYEVAKGRNIIAVLDTGVGKTMIAVMLIKDFVQAIESTESKKLIIFLAPTVHLVNQQFEYVKDHTSLEVEQYYGAKGVDEWTLDCWEKETKEHDVLVMTPQILLDALRKAFLSLEMVSLMIIDECHRATGNHPYAKIMKEFYHKSNNKPKIFGMTASPVVSKGVLSSNNCDGQMSELECVLDSLIYTIEDRTEMEACVPSAKESCRFFDPAQFSSLDLKAKVEASWLKTDASLSNLQSSLQTSYKGMDDKLKNLRKRLSNDHAKVLHCLDNLGLICAYEAVNICLENILDTTEESKAYRESVLQYKNFLEEVQCRIGESLPLGDKNFLNTGFDYLKAVDLGYISPKLHELLQLFQSFGETRQVLCLIFVERIITAKVIERFAKKVSCLSHFMVSYMTGSNTSVDSLAPKMQKETLESFRSGKVNLLFTTDVVEEGIHVPNCCYVIRFDLPKTVRSYVQSRGRARQNNSEFIMMLERGNVKQRNQLYDIIRSEYSMTNSAIKRDPDSDPCLLKDHTFEETNVFIVDATGASVTADSAVSLIHKYCGKLPGDKYYTPKPNFQFTSSEGLYKCKLTLPVNAAVQTIVGPLSRNSHLAKQLVCLEACKQLHQMGALDDHLTPSIEEPSENACISKGKDSGAGAGTTKRKELHGTTCIQALCGSWGEKSDDAVFFAYKFDFKCNIITVVYSGFVLLIESKLADDVGNTEMDLFLIGKMVKASVSSCGQVYLNAEQMVKAKRFQEFFFNGLFGKLFVGSKSSGAPREFLLRDKTSSLWSPSHMYLLLPLEDNSTDELRIHWPGITACTLAAEFLNKNSLLGTEQSDDDGSNPSLNSTGSPVTYCKETNIIRFANSSVDANSLRNTVVLAIHTGRIYCIIEAVSDKTAESSFAETVDTVSSEFATFYEYFYKKYNIVLKHPGQPLMLLKQSHNPHNLLVNFNDEGVSAKASQAGVVNEKPRFHVHMPPELLLVLDVPVSVLKSLYLLPSLMHRLESLMLANQLREEINFCSSNIDIPSSMILEALTTLRCCESFSMERLELLGDSVLKYAVSCHLFLRYPNKHEGQLSARRSLAVCNSTLHKLGTDHKIQGYIRDSAFDPRRWVAPGQRVLRPVPCKCGVDSLEVPLDKKFQTEDPKVKVGKSCDRGHRWLCSKTISDCVEALIGAYYLSGGLVAALHVMKWLGIDAELDPLVVAEVINQASLRTYVPNYEIHMIESKVGYNFSVKFFLQEALTHESLHESYCYQRLEFLGDSVLDLLITQYLYNHHTDIDPGELTDLRSASVNNENFAQVAVRHDLHKHLQHCSTLLSNQISEYVRSFTESDNTTRLDPSIKGPKALGDLVESIVGAILIDTNLNLDKVWRIVEPLLSPIVTPDKLELPPFRELNELCDSLGYFIKEKCKNKGEVVHAELLLQLDHDLLVGEGFDRSRKVAKGKAASCLLKDLENRGISRKKRKHDCVDSSQTMEDDSLEPTIPKRQRSAEIQLLDESKKACSATPATPVIVTVKTKKGGPRTTLFELCKKLLWPMPSIKATEHKSSAPMEIGEGPERKKGFISFVSKIILNVPGYDIIECTGDAKADKKSSSDSAALFMLYELEQRGKLIIEETL

SEQ ID NO: 560 - protein, 1516 aa, Gossypium raimondii
MHSPKEEQGEPLKRSFSEANSDPPDWMVLDDNETAKEEDPSSSSKPKDFNPRGYQLQVYEVAKGRNIIAVLDTGVGKTMIAVMLIKDFVQAIESTESKKLIIFLAPTVHLVNQQFEYVKDHTSLEVEQYYGAKGVDEWTLDCWEKETKEHDVLVMTPQILLDALRKAFLSLEMVSLMIIDECHRATGNHPYAKIMKEFYHKSNNKPKIFGMTASPVVSKGVLSSNNCDGQMSELECVLDSLIYTIEDRTEMEACVPSAKESCRFFDPAQFSSLDLKAKVEASWLKTDASLSNLQSSLQTSYKGMDDKLKNLRKRLSNDHAKVLHCLDNLGLICAYEAVNICLENILDTTEESKAYRESVLQYKNFLEEVQCRIGESLPLGDKNFLNTGFDYLKAVDLGYISPKLHELLQLFQSFGETRQVLCLIFVERIITAKVIERFAKKVSCLSHFMVSYMTGSNTSVDSLAPKMQKETLESFRSGKVNLLFTTDVVEEGIHVPNCCYVIRFDLPKTVRSYVQSRGRARQNNSEFIMMLERGNVKQRNQLYDIIRSEYSMTNSAIKRDPDSDPCLLKDHTFEETNVFIVDATGASVTADSAVSLIHKYCGKLPGDKYYTPKPNFQFTSSEGLYKCKLTLPVNAAVQTIVGPLSRNSHLAKQLVCLEACKQLHQMGALDDHLTPSIEEPSENACISKGKDSGAGAGTTKRKELHGTTCIQALCGSWGEKSDDAVFFAYKFDFKCNIITVVYSGFVLLIESKLADDVGNTEMDLFLIGKMVKASVSSCGQVYLNAEQMVKAKRFQEFFFNGLFGKLFVGSKSSGAPREFLLRDKTSSLWSPSHMYLLLPLEDNSTDELRIHWPGITACTLAAEFLNKNSLLGTEQSDDDGSNPSLNSTGSPVTYCKETNIIRFANSSVDANSLRNTVVLAIHTGRIYCIIEAVSDKTAESSFAETVDTVSSEFATFYEYFYKKYNIVLKHPGQPLMLLKQSHNPHNLLVNFNDEGVSAKASQAGVVNEKPRFHVHMPPELLLVLDVPVSVLKSLYLLPSLMHRLESLMLANQLREEINFCSSNIDIPSSMILEALTTLRCCESFSMERLELLGDSVLKYAVSCHLFLRYPNKHEGQLSARRSLAVCNSTLHKLGTDHKIQGYIRDSAFDPRRWVAPGQRVLRPVPCKCGVDSLEVPLDKKFQTEDPKVKVGKSCDRGHRWLCSKTISDCVEALIGAYYLSGGLVAALHVMKWLGIDAELDPLVVAEVINQASLRTYVPNYEIHMIESKVGYNFSVKFFLQEALTHESLHESYCYQRLEFLGDSVLDLLITQYLYNHHTDIDPGELTDLRSASVNNENFAQVAVRHDLHKHLQHCSTLLSNQISEYVRSFTESDNTTRLDPSIKGPKALGDLVESIVGAILIDTNLNLDKVWRIVEPLLSPIVTPDKLELPPFRELNELCDSLGYFIKEKCKNKGEVVHAELLLQLDHDLLVGEGFDRSRKVAKGKAASCLLKDLEVRIHKSLSGHEKGVSLVTSAI

SEQ ID NO: 561 - protein, 1462 aa, Gossypium raimondii
MHSPMEEEQCYPLKTTFSETHLHPSQIMVSINDDHAKNHHPSSSSNPDHSSPRGHQLQVVRYKMIAVMLIKDFVQPINSIDKKKLIIFLAPTVHLVNQQFEYIKFHTSLDVEQYYGDKGVNEWNSGYWEKDIKEHDVLVMTPQILLDALWKAFLSLEMVSLMIIDECHHATGNHPYAKIMKEFYHKSNNKPKIFGMTASPLVSKGALSNNDCEDQLSELENVMDCMIYAIEDMTEMETYVPTAKESCRFFDPTRFCSSGLKAMIEASWLKIDASLSTLQGSIQTSYTDMDDKFKALHKRSSNDHAKILHCLDDLGLICAYEAVKVCLENIPDTKEECEAYKEGVLQCKRFLNEVLQIIRESLPLGDENFLNSGFDYLKAVDSGYISPKLHELIEFFLSLGEPSQVLCLVFVERIVTAKVIERFVKKVSCLSCFVVSCLTGSNTSVDSMAPKIQKETLEYFMVNDCGEGIHIPNCSYVIRFDLPKTVLSYVQSRGRARQSGSQFIMILERGNEKQRDQLYDLIRSEHSMTNTAMNRDPDLSLPENRTLEETNVSIVAATGASIEETSKNRCASKGKDPIFDSGTTRWKELHGTTQIRAFSGSWGEKADASVFFAYKIDFSCNVVSVVYSGFLTDDVGNIEVDLYLIGKIAKARVSFYGKVHLDAVQITAAKRFQEIFFNGLFGRLFVGSSRTSRELLFHSKTSLLWHPFNMYLLLPLEDSLSNELRINWPGITACTLAVEFLTADGNRGNPSLNQTDSSVTEHKETNVIHFANRSIDVNNISNIVVLAIHTGRIYSTIELVHDTSAKSSFNDIVDMNSLKFATFSEYYNRKYCIVLKHPGQPLLLLKQSHNPHNLLVDFNDEGCRFSAQALQASSVNEKSWNTIHMPPKLLLILDVPVYVLKAFYLLPSLMHRLESLMLASQLREEIDFRSSNFDIPSSMILEALTTLRCCESFSMERLEFLGDSVLKYAGYIRDSAFDPRRWVAPGQLRLRSFPCNCRVDSREVPLDKKFQTEDLEIKVSISCDRGHRWMCSKTISDCVEALIGAYYVSGGLIAALHMMKWLGIDAELDPSLVAEAINRASLQSYKFSMKFFLQEALTHASANEFYCYQRLEFLGDSVLDLLITRYLYCNHTDIDSGELTDLRSASVSNETFAQVAVRNDLHKHLRHCSTLLLDQISEYAQSLPESWDTTRSVPGIKGPKICSNLIESIVAAILIDTNLNLDEVWRIVEPLLSLIVTPDKLEEKCVNTGEMVHAKLWLQLDDILLVGEAFNRSKKVAKGKAALYLLKELEDRGISRKRTKQDHAGSSGTTDDDLLEPKMCKKQRIAEIPSPTNDSSRTAYGAEIPSPANASSRTAYVIARINTNKGRPRATLYEICRKQLWPRPTFETTEGRSRSPMEIGKGADRKIGFNSFVTKITLNGPSSGIIECSGDVRADKKSSCDSAAILMLYRLKELGKLIIRES

SEQ ID NO: 562 - protein, 654 aa, Gossypium raimondii
MLRSFSWPILQVKRMVDNNSGGEADNFDWDTEDDLEIDNYAISAPSGLSTPCGEAVLGSAEAGSSGNSPNSKIIDHFVGMGFSREMVAKVIEEKGEENSDLILETLLEYSASTLPSSSNSKLIDHFVGMGFSEEMVVKVVQENGEGNTDSILETLLTYSALETTAPVQQNPDSGNCSSDYEGSLLNDFSDFDSFSETEEIISPSSEEGRKLLHLTKMGYSEAEASVAMERCGPDSTIEELTDFICAAQIAKAADALFPLEDKKPFSNGSSHKKRRNWGYDLLLRKKKLKLEKRFDEDDDVVHLPNPMIGFGVPNEPDQITHRVLPEAALGPPYFYYENVALAPKGVWTTISRFLYDVEPEFVDSKFFCAAARKRGYVHNLPIDNRFPLLPFPPRTIHEAFPLTRKWWPSWDTRTKLNCLQTCIASARLTDKIRKALEDSDGEPLLGIQKFVLEQCRKWNLVWVGRNKVAPLEPDEVEMLLGFPRNHTRGGGISRTDRYKSLGNSFQIDTVAYHFSVLKDKFPGGINLLSLFSGIGGAEVALHRLGIPLKNVVAVEIAEVNRNILRSWWEQTNQRGTLTDIQDVQELNGDRLEQLIKNFGGFDLVVGGSPCNNLTGSNRYHRDGLEGKDSALFFDFCRILDLVKCIMNGTKSMIV

SEQ ID NO: 563 - protein, 653 aa, Gossypium raimondii
MLRSFSWPILQVKRMVDNNSGGEADNFDWDTEDDLEIDNYAISAPSGLSTPCGEAVLGSAEAGSSGNSPNSKIIDHFVGMGFSREMVAKVIEEKGEENSDLILETLLEYSASTLPSSSNSKLIDHFVGMGFSEEMVVKVVQENGEGNTDSILETLLTYSALETTAPVQQNPDSGNCSSDYEGSLLNDFSDFDSFSETEEIISPSSEEGRKLLHLTKMGYSEAEASVAMERCGPDSTIEELTDFICAAQIAKAADALFPLEDKPFSNGSSHKKRRNWGYDLLLRKKKLKLEKRFDEDDDVVHLPNPMIGFGVPNEPDQITHRVLPEAALGPPYFYYENVALAPKGVWTTISRFLYDVEPEFVDSKFFCAAARKRGYVHNLPIDNRFPLLPFPPRTIHEAFPLTRKWWPSWDTRTKLNCLQTCIASARLTDKIRKALEDSDGEPLLGIQKFVLEQCRKWNLVWVGRNKVAPLEPDEVEMLLGFPRNHTRGGGISRTDRYKSLGNSFQIDTVAYHFSVLKDKFPGGINLLSLFSGIGGAEVALHRLGIPLKNVVAVEIAEVNRNILRSWWEQTNQRGTLTDIQDVQELNGDRLEQLIKNFGGFDLVVGGSPCNNLTGSNRYHRDGLEGKDSALFFDFCRILDLVKCIMNGTKSMIV

SEQ ID NO: 564 - protein, 635 aa, Gossypium raimondii
MVDNNSGGEADNFDWDTEDDLEIDNYAISAPSGLSTPCGEAVLGSAEAGSSGNSPNSKIIDHFVGMGFSREMVAKVIEEKGEENSDLILETLLEYSASTLPSSSNSKLIDHFVGMGFSEEMVVKVVQENDSILETLLTYSALETTAPVQQNPDSGNCSSDYEGSLLNDFSDFDSFSETEEIISPSSEEGRKLLHLTKMGYSEAEASVAMERCGPDSTIEELTDFICAAQIAKAADALFPLEDKKPFSNGSSHKKRRNWGYDLLLRKKKLKLEKRFDEDDDVVHLPNPMIGFGVPNEPDQITHRVLPEAALGPPYFYYENVALAPKGVWTTISRFLYDVEPEFVDSKFFCAAARKRGYVHNLPIDNRFPLLPFPPRTIHEAFPLTRKWWPSWDTRTKLNCLQTCIASARLTDKIRKALEDSDGEPLLGIQKFVLEQCRKWNLVWVGRNKVAPLEPDEVEMLLGFPRNHTRGGGISRTDRYKSLGNSFQIDTVAYHFSVLKDKFPGGINLLSLFSGIGGAEVALHRLGIPLKNVVAVEIAEVNRNILRSWWEQTNQRGTLTDIQDVQELNGDRLEQLIKNFGGFDLVVGGSPCNNLTGSNRYHRDGLEGKDSALFFDFCRILDLVKCIMNGTKSMIV

SEQ ID NO: 565 - protein, 636 aa, Gossypium raimondii
MDQNGSGGDADNFDWDTEDELEIDNYAIASRSGVSLTNGEAVLGTAEVSSSADSPNSKLIDHFVGMGFSQELVTKAIEENGEENSNLILEALLRYSASSLASSSNSKLIDHFVGMGFSEEMVLKAVQENGEGNTDTILETLLTYSALEKSAPVQQHADSDDFSSDCEGNFLDDFTDIDSSSDTEEIINTGSDEESKLLYLTKMGYSEAEASVAMERCGPDSSIAELTDFICAAQMAKAADALFPVEDRKPFCNGSNYNKRRNLGYDLWKRKKQMKLEKKLLNEDDDALHLPNPMIGFGVPTEPDLITQRTLPEAAVGPPYFYYENVALAPKGVWSTISRFLYDVEPEFVDSKFFCAAARKRGYIHNLPIENRFPLLPFPPRTIHEAFPLTRKWWPSWDPRTKLNCIQTCTASARLTERIRKALEAYDGEPPLNVQKYVLDECRKWNLVWVGRNKVAPLEADEVEMLLGFPKNHTRGGGMSRTDRYKSLGNSFQVDTVAYHLSVLKDMFPGGINLLSLFSGIGGAEVALHRLGIPLKNVVSVEISEVNRNIVRGWWEQTNQRGTLIDIADVQELNGDRLEQLMSRFGGFDLVVGGSPCNNLAGSNRHHRDGLEGKESSLFFDYCRILDLVRCMQRNQ

SEQ ID NO: 566 - protein, 636 aa, Gossypium raimondii; identical to SEQ ID NO: 565

SEQ ID NO: 567 - protein, 532 aa, Gossypium raimondii
MIYMCLLCLALTKVKENVNMFVHPWKGIIANIPTTLQDGKHVGESGRKLREDLAKKGFNPLKVQPLWNRHGHSGYAIVEFNKEWDGFNNAIMFEKSFELDHYGKKDYYSSRRKKDKLYAWVAREDDYYSGGLIGEYLRRNGDLKTVSSKEAEDRRKTSKLLTTLNNTLETKNQRLQEMQNKFNEVSSSMSTLMWQKDDMIRAYNEECKKMQENAHNHFKQISLEHERNAKCILDQKRELEQREKELLQREAQNENETKKLQHEKMINERAALEQKKADETMFKLAEEHKRDKEKLHREIIKLEKQLDTRQGLELEIQRLRGALQVMEHMNGDGDADTKKRMEVIQDELKEKEEELEDLEDLNQALIIKERKSNDELQDARKELITAFKDVSTRAHIGVKKMGEVDIKPFLVAAKRKYSAKEADVKSAELCTLWQDYLRDPSWHPFKILKDKEGNCKEILDEEDEKLVELKTELGDEAYNAVTMALKQMNEYNPSGRYVVPELWNFNEGRKATLTDGVQHLLNKWKLHKRRRY

SEQ ID NO: 568 - protein, 983 aa, Gossypium raimondii
SQSFKSNGNKDAKIMNIDRINGMGLRRSPRLSSAPPETKDCSSKTIFKSSENGSYSETRPSGTDKEAVLSKRNDPNFSDEKQRRKSPRFVAGTEHCGGNGSLRKFQDLNSGFPLKQLRRSLKISQATKNVCPDVSITRLDMDERGSSGEKRLGISPSSVHATENGDSNASFREHRREMSVEKQLKTPSSLSTLLAEGDSAEVNSSSNRLSNSCDEQPSKKFKISSAESDIDDDDDEDKIVWNVECHYAQAEIDGCTINLGDCVYIKGEEAKHHIGRILEFFRTTDGENYFRVQWFYRAEDTVMKQEATLHGESRLFYSTIVNDNLIDCIISKVSVTQISPKFGSKSNSLPQSDFYFDMEYCVDYSTFCTLPTDIFSDNSFKSHSSSKCYEEVFPTTPAFSANIPSFGTYKAQLTKLDLYSGCGGMSTGLCLGAKASCNDLVAKWAVDSDKSPCESLKLNHPETHVRNEAADDFLQLLKEWEKLCKQYRVKNLERTYPSRSRISETVWNNASSAKDSGTPDEHEVSSLVDICYGDPCDTGNRGLKFKVCWKGYSASDDTWEPIESLRNCQECIQEFVTNGFRSKILPLRGDVDVICGGPPCQGISGYNRHRNVDSPLDDEKNRQIVVFVDIVEYLKPKFVLMENVVDIMRLVKASLGRYALSRLVLMKYQARLGIVAAGCYGLPQFRLRVFLFGAHSSEKLPQFPLPTHDVIIRYGYPAEFERNTVAYDEGQPRQLEDALVLRDSFSDLPPVANNEAREKMTYEKPPETDFQRYIRSSEYKMTGSELNGAKRITNLLYDHRPSPLSEDDYIRVCLNPKRKGANFRDLPGVIVGTDNVAWRGRTQEQQFLPSGKPLVPDYVFTLKQGKSKRPFARLWWDETMPTVLTAPFCHSQAILHPEQDWLLTAREWARLQGFPDYYRFRGTIKERYCQIGNAVAVPVGRALGYTMGMAFQKGSGNEPLMILPPKVFSFHQYPVSKIIVPKH

SEQ ID NO: 569 - protein, 1577 aa, Gossypium raimondii
MGSVALLDSNSPSGMKKNKKGKNKSAKSSTKKEMETDKKVQKRNSAQENGEPVPSKRPKRAAACTDFKEKAVCISEKDSVVETKKDMVVEDEILAVALTCEKDDGRPNRRLTDFVLHNSEGLPQPFEMLEVIDMFITGLILPLEENTDKEKVKEKSVRCEGFGHVESWDISGYEDGCPVIWLSTDVADYTCCKPSGSYKKYYEHFFEKARACVEVYKKLSKPSGGNPDLSLDELLAGVVRSMSGSKSFSRGASIRDFVISQGEFIYNQLIGLDATSRVNDQVFAGLPVLTALKDESRKRENIGLDIALFSGGALTIGKKGEGESKLDETYSSTFTAEEDEDAKLAKLLQEEEYWKSMKQKRNQGSASMSNKFYIKINEDEIANDYPLPAYYKNSNEETDELVVFESDFDVCDPEELPRSVLHNWSFYNSDSRLISLELLPMKPCADIDVTIFGSGVMTADDGIGFCLDNDLSQSTSGSSSVLNADGIPIFLSAIKEWMIEFGSSMIFISIRTDMAWYRLGKPSKQYLPWYEPVLKTARVAISIITLLKEQTRVSRLSFNDVIKRVSEFKKDNRAFISSDPAAVERYIVVHGQIILQLFAEFPDEKIKKCAFVVGLANKMEERHHTKWLVKKKKVVHKNEPNLNPRAAMMPIASIRKAMQATTTRLINRIWGEYYSNYSPEDSKEETNCEVKDEDENEEQEENEDDDGDANAEAEAEAEAEAEAEADANANAEDKPIPMETQKSPSVSKQPRQCSTEEVSWDGEPVSQTSSDKPLYKRAIVHGEVVVVGSAVSVEVDLYELPAIYFVEYMFETSKGRKMFHGRMMQRGSETVLGNAANEREVFLTNNCGDFELEDVKQTVVVDIRLRPWGYQHRKDNANMDKLDRAEAEERKRKGLPMEYYCKSLYWPERGAFYTLPIDSLGLGSGCCHSCQVKDAGRAKEVFKVNSSNTGFVYKGTEYSLHDYVYVSPHQFTVERAETENFKAGRNIGLKPYVVCQVLEIIIPKGQKKVCEESTQVKVRRFFRPEDISAEKAYSSDIREVYYSEETDILFVEAIEGKCEVRKKNDLPACNSPVIFHHVFFCDRIYDPSNGSLKQLPAQVKLRYSTGIVDNEIAYQKKKGKGKQEESELEVEKQQEAYQENRLATLDIFAGCGGLSEGLHQSGVSLTKWAIEYEEPAGDAFKLNHPESLVFIKNCNVILRAIMEKCGDVDDCISTSEAAELAASLDEKEINDLPLPGQVDFINGGPPCQGFSGMNRFNHSTWSKVQCEMILAFLSFADYFRPRYFLLENVRNFVSFNKGQTFKLTLASLLEMGYQVRFGILEAGAYGVSQSRKRAFIWAASPEETLPEWPEPMHVFAVPELKVTLSHNLQYAAVRSTASGAPFRAITVRDTIGDLPAVGNGASKTNLEYQSEAVSWFQKKIRGNMAVLTDHISKEMNELNLIRCQKIPKRPGADWHDLPDEKVKLSTGQLVDLIPWCLPNTAKRHNQWKGLFGRLDWEGNFPTSITDPQPMGKVGMCFHPEQDRILTVRECARSQGFPDIYKFAGNIQHKHRQIGNAVPPPLAFALGRKLKEALDSKK

SEQ ID NO: 570 - protein, 1569 aa, Gossypium raimondii
MGSVALLDSNSPSGMKKNKKGKNKSAKSSTKKEMETDKKVQKRNSAQENGEPVPSKRPKRAAACTDFKEKAVCISEKDSVVETKKDMVVEDEILAVALTCEKDDGRPNRRLTDFVLHNSEGLPQPFEMLEVIDMFITGLILPLEENTDKEKVKEKSVRCEGFGHVESWDISGYEDGCPVIWLSTDVADYTCCKPSGSYKKYYEHFFEKARACVEVYKKLSKPSGGNPDLSLDELLAGVVRSMSGSKSFSRGASIRDFVISQGEFIYNQLIGLDATSRVNDQVFAGLPVLTALKDESRKPLFSGGALTIGKKGEGESKLDETYSSTFTAEEDEDAKLAKLLQEEEYWKSMKQKRNQGSASMSNKFYIKINEDEIANDYPLPAYYKNSNEETDELVVFESDFDVCDPEELPRSVLHNWSFYNSDSRLISLELLPMKPCADIDVTIFGSGVMTADDGIGFCLDNDLSQSTSGSSSVLNADGIPIFLSAIKEWMIEFGSSMIFISIRTDMAWYRLGKPSKQYLPWYEPVLKTARVAISIITLLKEQTRVSRLSFNDVIKRVSEFKKDNRAFISSDPAAVERYIVVHGQIILQLFAEFPDEKIKKCAFVVGLANKMEERHHTKWLVKKKKVVHKNEPNLNPRAAMMPIASIRKAMQATTTRLINRIWGEYYSNYSPEDSKEETNCEVKDEDENEEQEENEDDDGDANAEAEAEAEAEAEAEADANANAEDKPIPMETQKSPSVSKQPRQCSTEEVSWDGEPVSQTSSDKPLYKRAIVHGEVVVVGSAVSVEVDLYELPAIYFVEYMFETSKGRKMFHGRMMQRGSETVLGNAANEREVFLTNNCGDFELEDVKQTVVVDIRLRPWGYQHRKDNANMDKLDRAEAEERKRKGLPMEYYCKSLYWPERGAFYTLPIDSLGLGSGCCHSCQVKDAGRAKEVFKVNSSNTGFVYKGTEYSLHDYVYVSPHQFTVERAETENFKAGRNIGLKPYVVCQVLEIIIPKGQKKVCEESTQVKVRRFFRPEDISAEKAYSSDIREVYYSEETDILFVEAIEGKCEVRKKNDLPACNSPVIFHHVFFCDRIYDPSNGSLKQLPAQVKLRYSTGIVDNEIAYQKKKGKGKQEESELEVEKQQEAYQENRLATLDIFAGCGGLSEGLHQSGVSLTKWAIEYEEPAGDAFKLNHPESLVFIKNCNVILRAIMEKCGDVDDCISTSEAAELAASLDEKEINDLPLPGQVDFINGGPPCQGFSGMNRFNHSTWSKVQCEMILAFLSFADYFRPRYFLLENVRNFVSFNKGQTFKLTLASLLEMGYQVRFGILEAGAYGVSQSRKRAFIWAASPEETLPEWPEPMHVFAVPELKVTLSHNLQYAAVRSTASGAPFRAITVRDTIGDLPAVGNGASKTNLEYQSEAVSWFQKKIRGNMAVLTDHISKEMNELNLIRCQKIPKRPGADWHDLPDEKVKLSTGQLVDLIPWCLPNTAKRHNQWKGLFGRLDWEGNFPTSITDPQPMGKVGMCFHPEQDRILTVRECARSQGFPDIYKFAGNIQHKHRQIGNAVPPPLAFALGRKLKEALDSKK

SEQ ID NO: 571 - protein, 1563 aa, Gossypium raimondii
MKKNKKGKNKSAKSSTKKEMETDKKVQKRNSAQENGEPVPSKRPKRAAACTDFKEKAVCISEKDSVVETKKDMVVEDEILAVALTCEKDDGRPNRRLTDFVLHNSEGLPQPFEMLEVIDMFITGLILPLEENTDKEKVKEKSVRCEGFGHVESWDISGYEDGCPVIWLSTDVADYTCCKPSGSYKKYYEHFFEKARACVEVYKKLSKPSGGNPDLSLDELLAGVVRSMSGSKSFSRGASIRDFVISQGEFIYNQLIGLDATSRVNDQVFAGLPVLTALKDESRKRENIGLDIALFSGGALTIGKKGEGESKLDETYSSTFTAEEDEDAKLAKLLQEEEYWKSMKQKRNQGSASMSNKFYIKINEDEIANDYPLPAYYKNSNEETDELVVFESDFDVCDPEELPRSVLHNWSFYNSDSRLISLELLPMKPCADIDVTIFGSGVMTADDGIGFCLDNDLSQSTSGSSSVLNADGIPIFLSAIKEWMIEFGSSMIFISIRTDMAWYRLGKPSKQYLPWYEPVLKTARVAISIITLLKEQTRVSRLSFNDVIKRVSEFKKDNRAFISSDPAAVERYIVVHGQIILQLFAEFPDEKIKKCAFVVGLANKMEERHHTKWLVKKKKVVHKNEPNLNPRAAMMPIASIRKAMQATTTRLINRIWGEYYSNYSPEDSKEETNCEVKDEDENEEQEENEDDDGDANAEAEAEAEAEAEAEADANANAEDKPIPMETQKSPSVSKQPRQCSTEEVSWDGEPVSQTSSDKPLYKRAIVHGEVVVVGSAVSVEVDLYELPAIYFVEYMFETSKGRKMFHGRMMQRGSETVLGNAANEREVFLTNNCGDFELEDVKQTVVVDIRLRPWGYQHRKDNANMDKLDRAEAEERKRKGLPMEYYCKSLYWPERGAFYTLPIDSLGLGSGCCHSCQVKDAGRAKEVFKVNSSNTGFVYKGTEYSLHDYVYVSPHQFTVERAETENFKAGRNIGLKPYVVCQVLEIIIPKGQKKVCEESTQVKVRRFFRPEDISAEKAYSSDIREVYYSEETDILFVEAIEGKCEVRKKNDLPACNSPVIFHHVFFCDRIYDPSNGSLKQLPAQVKLRYSTGIVDNEIAYQKKKGKGKQEESELEVEKQQEAYQENRLATLDIFAGCGGLSEGLHQSGVSLTKWAIEYEEPAGDAFKLNHPESLVFIKNCNVILRAIMEKCGDVDDCISTSEAAELAASLDEKEINDLPLPGQVDFINGGPPCQGFSGMNRFNHSTWSKVQCEMILAFLSFADYFRPRYFLLENVRNFVSFNKGQTFKLTLASLLEMGYQVRFGILEAGAYGVSQSRKRAFIWAASPEETLPEWPEPMHVFAVPELKVTLSHNLQYAAVRSTASGAPFRAITVRDTIGDLPAVGNGASKTNLEYQSEAVSWFQKKIRGNMAVLTDHISKEMNELNLIRCQKIPKRPGADWHDLPDEKVKLSTGQLVDLIPWCLPNTAKRHNQWKGLFGRLDWEGNFPTSITDPQPMGKVGMCFHPEQDRILTVRECARSQGFPDIYKFAGNIQHKHRQIGNAVPPPLAFALGRKLKEALDSKK

SEQ ID NO: 572 - protein, 1563 aa, Gossypium raimondii; identical to SEQ ID NO: 571

SEQ ID NO: 573 - protein, 1481 aa, Gossypium raimondii
MASMESDSSEEQENSTAFLTGIKFHVSNDADNENMSILEITAPSEVSDPRLGFPNFSNHCTTCDARDMKQCEGHFGVIKFPYTILHPFFLSEVVHILNKICPGCKSIRKDLWMKGANSIARLLETKGCKYCVGNSIEWYPPMRFKITSKELFRKSAIMVEVSENSLMKVRKRGRQALPADYWDFIPKDQQQEEGFVKPGRRVLSHAQVRHLLKDVNPEFIKKFISEADSIFLNFFPVTPNSHRVTEIMHTSSNAQRLIFDERTRVYKKLVDFRGLANELSSHVLECLKISKLHVEKPSTEDSALIAALKKNKDSASNMSGLRYMKDVILGKRNDHCFRMVLTGNPNLKLSEIGIPCHVAEKLQIAEQLNRWNEERLKTCCNLRILEKGEIRIRREGKLVRIRHNEKVQVGDTIYRPLNDGDTVLINRPPSIHQHSLIALSVKVLPVNSVVSINPLICSPFRGDFDGDCLHGYVPQSINTRVELSELVSLDRQLINGQSGRNLLSLSHDSLTAAYLVKEDGVLLNLFQMQQLEMFCPNHSPLPAIVKAPLLSNPVWTGKQLFSMLFPPEFDYVFAPSGVVIHNGDLICSSEGSSWLRDADGNLFQSLIKHYQGKVLDFLHAAQEVLCEWLSMRGLSVSLLDLYLSPDTDSQKNMMDEIFYGLQEAEQTCNFKQLMVDSCQDFLAGNDEETNRFMVLDVEQMCYEKQRSAALSQASVDSFKQVFRDIQNLLYKYANKDNSLFTMFKAGSKGNLLKLVQHSMCLGLQHSLVPLSFRFPHQLSCAAWNNQKSHILTQKVDDTDESAKKYIPYAVVESSFVKGLNPLECFVHSVTTRDTSFSDNADLPGTLSRRLMFFMRDLCAAYDGTVRNAYGDQVVQFCYNIDKGTFSPTSCPDKLVSQGSSLPDGIGGQPVGSLSACAISEAAYSALDQPISLLESSPLLNLKRVLECGSKRSNADQTMSLFLSGKLVRRRHGQEYGALEVKNHLERLIFKDIVSTVSIIFSPQMSSENRFSPWVCHFHVFKDIVTRRRLTVHSIIDALHMHCTNAKRLWKINLPDMQVTSKACSVIDMENEDDTFCITVTIVECKTSRIELDVIQDMVIPSLLEAVVKGFPEIKKVEILWNEDFRVPNSHKPAPGELYLRVSVSGDFGITKLWSVLMNDCLQLMDIIDWTRSHPDNINQFCLAFGIDAGWRFFLNNMKSAISDTGKSILNEHLHLAANCLSATGEFVGLNSKGLKQQREHAFVSSPFMQACFSNPSACFVKAAKTGVADNLQGTIDLLAWGRVPRIGTGGQFDIVYSMKDEELAEPVDVYKLLGDSINSKKQDIEFEVPKVFNPTSEKHSSPFKGALRDSVFDEWKKIETKTRSLLRGRLTLNDVQRLERNLKNILRKYPIDHRVSEADWDTLMMALYFHPHRVEKIGSGAKEIKVGHHPDHADSRCFFLVRTDETTVDFSYRKCVVGALEIIAPCRAQSYKSKWLQHGSL

SEQ ID NO: 574 - protein, 1481 aa, Gossypium raimondii; identical to SEQ ID NO: 573

SEQ ID NO: 575 - protein, 1478 aa, Gossypium raimondii
MESDSSEEQENSTAFLTGIKFHVSNDADNENMSILEITAPSEVSDPRLGFPNFSNHCTTCDARDMKQCEGHFGVIKFPYTILHPFFLSEVVHILNKICPGCKSIRKDLWMKGANSIARLLETKGCKYCVGNSIEWYPPMRFKITSKELFRKSAIMVEVSENSLMKVRKRGRQALPADYWDFIPKDQQQEEGFVKPGRRVLSHAQVRHLLKDVNPEFIKKFISEADSIFLNFFPVTPNSHRVTEIMHTSSNAQRLIFDERTRVYKKLVDFRGLANELSSHVLECLKISKLHVEKPSTEDSALIAALKKNKDSASNMSGLRYMKDVILGKRNDHCFRMVLTGNPNLKLSEIGIPCHVAEKLQIAEQLNRWNEERLKTCCNLRILEKGEIRIRREGKLVRIRHNEKVQVGDTIYRPLNDGDTVLINRPPSIHQHSLIALSVKVLPVNSVVSINPLICSPFRGDFDGDCLHGYVPQSINTRVELSELVSLDRQLINGQSGRNLLSLSHDSLTAAYLVKEDGVLLNLFQMQQLEMFCPNHSPLPAIVKAPLLSNPVWTGKQLFSMLFPPEFDYVFAPSGVVIHNGDLICSSEGSSWLRDADGNLFQSLIKHYQGKVLDFLHAAQEVLCEWLSMRGLSVSLLDLYLSPDTDSQKNMMDEIFYGLQEAEQTCNFKQLMVDSCQDFLAGNDEETNRFMVLDVEQMCYEKQRSAALSQASVDSFKQVFRDIQNLLYKYANKDNSLFTMFKAGSKGNLLKLVQHSMCLGLQHSLVPLSFRFPHQLSCAAWNNQKSHILTQKVDDTDESAKKYIPYAVVESSFVKGLNPLECFVHSVTTRDTSFSDNADLPGTLSRRLMFFMRDLCAAYDGTVRNAYGDQVVQFCYNIDKGTFSPTSCPDKLVSQGSSLPDGIGGQPVGSLSACAISEAAYSALDQPISLLESSPLLNLKRVLECGSKRSNADQTMSLFLSGKLVRRRHGQEYGALEVKNHLERLIFKDIVSTVSIIFSPQMSSENRFSPWVCHFHVFKDIVTRRRLTVHSIIDALHMHCTNAKRLWKINLPDMQVTSKACSVIDMENEDDTFCITVTIVECKTSRIELDVIQDMVIPSLLEAVVKGFPEIKKVEILWNEDFRVPNSHKPAPGELYLRVSVSGDFGITKLWSVLMNDCLQLMDIIDWTRSHPDNINQFCLAFGIDAGWRFFLNNMKSAISDTGKSILNEHLHLAANCLSATGEFVGLNSKGLKQQREHAFVSSPFMQACFSNPSACFVKAAKTGVADNLQGTIDLLAWGRVPRIGTGGQFDIVYSMKDEELAEPVDVYKLLGDSINSKKQDIEFEVPKVFNPTSEKHSSPFKGALRDSVFDEWKKIETKTRSLLRGRLTLNDVQRLERNLKNILRKYPIDHRVSEADWDTLMMALYFHPHRVEKIGSGAKEIKVRHHPDHADSRCFFLVRTDETTVDFSYRKCVVGALEIIAPCRAQSYKSKWLQHGSL

SEQ ID NO: 576 - protein, 1397 aa, Gossypium raimondii
MKSKPMTSIETDLSEEQEVLAATMTGIKFNVSGDEDNGNSIDWYPPMTFKISSKELSKKSTIVVEVSEDSLMMVRKRGRQALPADYWDFIPKDQQEEEDGLMKPRRRVLSHAQVHYLLKDVDPEFIKKFIQNVDSIFLNCFPVTPNSHRVTEITHRSSNSQRLIFDERTRLYKRLVDFRGVANELSSHVLECLKISKASYSALFSFLYLLFQEKPSNEDNELILALTRNKDPVSNMSGLRYMKNVLLGKRNDHCFRMVLTGNPSLKLSEIGIPCPVAERLQIAEQLNKWNEERLKACCNLRILEKGEICIRREGTLVRIHHNEKIRLGDIIYRPLNNGDIVLINRPPSIHQHSFIALSVKVLPVSSSVSINPLICSPFRGDFDGDCLHGYVPQSINTRVELSELVSLNRQLINGQSGRNLLSLSHDSLSAAYLVNGDGVLLNLYEMQQLEMFCPNRSPSPAIIKAPLLSNPVWTGKQLFSMLFPPELDYGFSPSDLVIRNGELITSSEGSSWFRDADGNLFESLIKNCRGKVLDFLHGAQEVLCEWLSMRGMSVSLLDLYLTPDSNSRKNMMDEIFYGLQETELTCNFKQLMVDSFCDFLAGNNEEIDGFVGFDFERMCYEKQRSAAVNQASVDSFKQVFRDIQNLSYKYANKDNSLLTMFKAGSKGNLLKLVQHSMCLGLQRSVVPLSFRFPPKLSCSEWNDLKSQGLTQSGDDSVESAKNFIPYAVIESSFMTGLNPLECFVHSVTSRDSSFSDHADLPGTLSRRLMFFLRDLCASYDGTVRNAYGGQVVQFSYGSDKGTSTATSFANEIQSQGSILPDGTGGQPVGSLSACAISEAAYSALDQPISLLETSPLLNLKRVLECGSRRRNSDQTMTLFLSDKLGKGRHCFEYAALEIKNYLEKLIFSDIVSTVLITYSPQKSTENCFNPWVCHFHVCKEIMKRRRLSVHSIIGSLQMHYANAKKLWKINLPDIQVTSKSCSHTDMPNKDDMFCITVTIVEPSKRSHIELDVILAIVLPSLLEAVVKGFPEIKKVQILWNDRFKVSKSHKTSPGELYLRVAVTGGFGKTKLWGMLMNDCLPIMDLIDWTRSHPDDINQFCSAYGIDSGWKFFLNNLKSAISDTGKTILNEHLHLVADCLSVTGEFVGLNSKGLRLRQEHAFVSSPFMQACFSNPSASFVKAAKKGVSDNLQGTIDALSWGRVPCIGTGAQFDILYSMKDEMITEPVDVYNLLGNIVGSQNQDVEFEVPQACNIKSEKYVSELMDALGDSAFERLKNIETKILREFLTLNDIQRLSRTLKDILHKSPIGHRLSGADWNSAMMALYFHPRRDEKVGSGAQEIKVGYHPEHKNSRCFLLARTDGAIVDFSYHKCVIGALEVIAPDKVQFYKSKWSQSGNL

SEQ ID NO: 577 - protein, 1966 aa, Gossypium raimondii
MEENSSSVILDGEIVGIKFCLATPKEILTASVSGFPINHVSQLSNSYLGLPLEFGKCSACGTSEPGQCEGHFGYIELPIPIYHPSHISELKRLLSLLCLKCLKLKNKFQMKSGSVAERLLSSCCENTPQVSIKEVKTTDGACYLELKQPSRQSKTNWNFLERYGFRYGDHHTRTLLPCEVVEILKRIPSQTRRKLSGKGFFPQEGYILQYLPVPPNCLSVPDVSDGVSVMSSDLSTSMLRKVLKQVEIIKSSRSGTPNFESHEVEANDLQSAVEQYLQVRGTVKASRSIDARYGVNKDASDSSTKAWLEKMRTLFIRKGSGFSSRSVITGDPYKKVNEIGIPSEIAQRITFEERVNMHNMRYLQNLVDNKLCLTYRDGGSTYSLREGSKGHTFLRPGQVVHRRIMDGDIVFINRPPTTHKHSLQALSVYVHDDHTVKINPLICGPLSADFDGDCIHLFYPQSLSAKAEVYELFSVEKQLLSSHSGNLNLQLATDSLLSLRVMLKTFLFKKADAQQLSMFLSSALPEPAFLKCNHVAPCWTAFQILQTAFPACLDCSSDRYLIGKSDILKVDFNKDLMQSVINEVVASIFYEKGPKEVLNFFDSLQPLLMENIFAEGFTVCLEDFSVSREVIENIQKDIQVISPLLYQLRSTYNELVELQMENHIRVAKEPIADFILKTSSLGNLIDSRSDSAVNKVVQQIGFLGMQLSDKGKFYSKTLVEDVAHQFQSIYPSDAIDYPSAEFGLIKSCFFRGLDPYEGIVHSISTREVMVRSTRGLSEPGTLFKNLMAILRDVVICYDGTVRNVSSNSIIQFQYGLSARTRPQFPAGEPVGVLAATAMSNPAYKAVLDSSPSSNSSWELMKEILLCKVSFKNDPIDRRVILYLKDCDCGRKYCQENAAYLVKNHLRRVKLKDIAVDFIIEYQQQQIVSEIEAGLVGHILLNKDLLKELSVSVQEIHMKCQETINSFRKKKKTAETFKRTDLFVSESCSIQQSCVDKWLDMPCLMFFFRNTNDDNLDSAIQILADIIYPVLLQTVIKGDPRICSAKIIWVNPDATTWIRNPSKTQKGELALEVVLEKSAVKQNGDAWRTVIDCCLPVLNIIDTHRSIPYAIKQVEQLLGISCAFEQAVQRLSTSVSMVTRGVLKEHLMLLANSMTCCGNLIGFNSGGYKTLSRSLNIQVPFTEATLFTPRKCFERAAEKCYDDSLSSIVASCSWGKRVAVGTGSRFDLLWNQESGSDQMSGMDVYNFLHMVSGAGGSNSNTACLGEEVDDLMDEWCLSPDHSTGLDKPVFEDAAEFENNLDGQSASANWEKDVSLDKVSDVGWDASGWNKNAEDVDKFAAAATSSEKQNEWSGWGASKSNSQDVGWDALSGWNKNAEDGDKFAAAATSSKKQNECSDWGASKSKSQDVVSPKVDVGWDALSAWHKNAEDGDNFAAAASSSKKQSEWSDWGMSKSKSQDVSPKTDGTCMKEQTELSGWEMKKFDTRDVLPVEERASKPNGWDSGASWGIMSKESEELDASAAAPWSGWGTKDSSPKKSLDKTSKSSSWDTVSSWGRKTAAVHESGFIGNDNQPGQGRIENEWDNKASQVKPVQSASGWNNKVTEEMVVQSTSSWDEKASWEKPVQSMSGWVSSSAAGSDESPTKGCSKNSNWDQQKAQTMNNAWDQQKSPATNSSWDRQKSSTANNSWDQQKPPANSSWDQEKSPTINNSWDQQKSPECSQGWGTLNDLNQPASSSGWDMPQGEDNTQSEKQHQWGQSKGSRRWASDANKKSRPLKPARMMNDDSSMAAMYTVTRQRLDMFTSEEKDILLDVEPLMQSIRKIMHQTGYNDGDPLSADDQTFVLDNVLAHHPDKAVKMGAGIDYVMVNKHSLFLDTRCLYVVTTDGHKQDFSYLKCLENMIKGKYPDLAEAFVAKYFRKSRGNRERGVAPENSQGNRDQSVTQDDNSQGNRDRSDRSVAQDDNEGEVKQ

SEQ ID NO: 578 - protein, 1883 aa, Gossypium raimondii
MEENSSSVILDGEIVGIKFCLATPKEILTASVSGFPINHVSQLSNSYLGLPLEFGKCSACGTSEPGQCEGHFGYIELPIPIYHPSHISELKRLLSLLCLKCLKLKNKFQMKSGSVAERLLSSCCENTPQVSIKEVKTTDGACYLELKQPSRQSKTNWNFLERYGFRYGDHHTRTLLPCEVVEILKRIPSQTRRKLSGKGFFPQEGYILQYLPVPPNCLSVPDVSDGVSVMSSDLSTSMLRKVLKQVEIIKSSRSGTPNFESHEVEANDLQSAVEQYLQVRGTVKASRSIDARYGVNKDASDSSTKAWLEKMRTLFIRKGSGFSSRSVITGDPYKKVNEIGIPSEIAQRITFEERVNMHNMRYLQNLVDNKLCLTYRDGGSTYSLREGSKGHTFLRPGQVVHRRIMDGDIVFINRPPTTHKHSLQALSVYVHDDHTVKINPLICGPLSADFDGDCIHLFYPQSLSAKAEVYELFSVEKQLLSSHSGNLNLQLATDSLLSLRVMLKTFLFKKADAQQLSMFLSSALPEPAFLKCNHVAPCWTAFQILQTAFPACLDCSSDRYLIGKSDILKVDFNKDLMQSVINEVVASIFYEKGPKEVLNFFDSLQPLLMENIFAEGFTVCLEDFSVSREVIENIQKDIQVISPLLYQLRSTYNELVELQMENHIRVAKEPIADFILKTSSLGNLIDSRSDSAVNKVVQQIGFLGMQLSDKGKFYSKTLVEDVAHQFQSIYPSDAIDYPSAEFGLIKSCFFRGLDPYEGIVHSISTREVMVRSTRGLSEPGTLFKNLMAILRDVVICYDGTVRNVSSNSIIQFQYGLSARTRPQFPAGEPVGVLAATAMSNPAYKAVLDSSPSSNSSWELMKEILLCKVSFKNDPIDRRVILYLKDCDCGRKYCQENAAYLVKNHLRRVKLKDIAVDFIIEYQQQQIVSEIEAGLVGHILLNKDLLKELSVSVQEIHMKCQETINSFRKKKKTAETFKRTDLFVSESCSIQQSCVDKWLDMPCLMFFFRNTNDDNLDSAIQILADIIYPVLLQTVIKGDPRICSAKIIWVNPDATTWIRNPSKTQKGELALEVVLEKSAVKQNGDAWRTVIDCCLPVLNIIDTHRSIPYAIKQVEQLLGISCAFEQAVQRLSTSVSMVTRGVLKEHLMLLANSMTCCGNLIGFNSGGYKTLSRSLNIQVPFTEATLFTPRKCFERAAEKCYDDSLSSIVASCSWGKRVAVGTGSRFDLLWNQESGSDQMSGMDVYNFLHMVSGAGGSNSNTACLGEEVDDLMDEWCLSPDHSTGLDKPVFEDAAEFENNLDGQSASANWEKDVSLDKVSDVGWDASGWNKNAEDVDKFAAAATSSEKQNEWSGWGASKSNSQDVGWDALSGWNKNAEDGDKFAAAATSSKKQNECSDWGASKSKSQDVVSPKVDVGWDALSAWHKNAEDGDNFAAAASSSKKQSEWSDWGMSKSKSQDVSPKTDGTCMKEQTELSGWEMKKFDTRDVLPVEERASKPNGWDSGASWGIMSKESEELDASAAAPWSGWGTKDSSPKKSLDKTSKSSSWDTVSSWGRKTAAVHESGFIGNDNQPGQGRIENEWDNKASQVKPVQSASGWNNKVTEEMVVQSTSSWDEKASWEKPVQSMSGWVSSSAAGSDESPTKGCSKNSNWDQQKAQTMNNAWDQQKSPATNSSWDRQKSSTANNSWDQQKPPANSSWDQEKSPTINNSWDQQKSPECSQGWGTLNDLNQPASSSGWDMPQGEDNTQSEKQHQWGQSKGSRRWASDANKKSRPLKPARMMNDDSSMAAMYTVTRQRLDMFTSEEKDILLDVEPLMQSIRKIMHQTGYNDGDPLSADDQTFVLDNVLAHHPDKAVKMGAGIDYVMRRKERINQLFVVHHHLMQNR

SEQ ID NO: 579 - protein, 1841 aa, Gossypium raimondii
MEENSSSVILDGEIVGIKFCLATPKEILTASVSGFPINHVSQLSNSYLGLPLEFGKCSACGTSEPGQCEGHFGYIELPIPIYHPSHISELKRLLSLLCLKCLKLKNKFQMKSGSVAERLLSSCCENTPQVSIKEVKTTDGACYLELKQPSRQSKTNWNFLERYGFRYGDHHTRTLLPCEVVEILKRIPSQTRRKLSGKGFFPQEGYILQYLPVPPNCLSVPDVSDGVSVMSSVLKQVEIIKSSRSGTPNFESHEVEANDLQSAVEQYLQVRGTVKASRSIDARYGVNKDASDSSTKAWLEKMRTLFIRKGSGFSSRSVITGDPYKKVNEIGIPSEIAQRITFEERVNMHNMRYLQNLVDNKLCLTYRDGGSTYSLREGSKGHTFLRPGQVVHRRIMDGDIVFINRPPTTHKHSLQALSVYVHDDHTVKINPLICGPLSADFDGDCIHLFYPQSLSAKAEVYELFSVEKQLLSSHSGNLNLQLATDSLLSLRVMLKTFLFKKADAQQLSMFLSSALPEPAFLKCNHVAPCWTAFQILQTAFPACLDCSSDRYLIGKSDILKVDFNKDLMQSVINEVVASIFYEKGPKEVLNFFDSLQPLLMENIFAEGFTVCLEDFSVSREVIENIQKDIQVISPLLYQLRSTYNELVELQMENHIRVAKEPIADFILKTSSLGNLIDSRSDSAVNKVVQQIGFLGMQLSDKGKFYSKTLVEDVAHQFQSIYPSDAIDYPSAEFGLIKSCFFRGLDPYEGIVHSISTREVMVRSTRGLSEPGTLFKNLMAILRDVVICYDGTVRNVSSNSIIQFQYGLSARTRPQFPAGEPVGVLAATAMSNPAYKAVLDSSPSSNSSWELMKEILLCKVSFKNDPIDRRVILYLKDCDCGRKYCQENAAYLVKNHLRRVKLKDIAVDFIIEYQQQQIVSEIEAGLVGHILLNKDLLKELSVSVQEIHMKCQETINSFRKKKKTAETFKRTDLFVSESCSIQQSCVDKWLDMPCLMFFFRNTNDDNLDSAIQILADIIYPVLLQTVIKGDPRICSAKIIWVNPDATTWIRNPSKTQKGELALEVVLEKSAVKQNGDAWRTVIDCCLPVLNIIDTHRSIPYAIKQVEQLLGISCAFEQAVQRLSTSVSMVTRGVLKEHLMLLANSMTCCGNLIGFNSGGYKTLSRSLNIQVPFTEATLFTPRKCFERAAEKCYDDSLSSIVASCSWGKRVAVGTGSRFDLLWNQESGSDQMSGMDVYNFLHMVSGAGGSNSNTACLGEEVDDLMDEWCLSPDHSTGLDKPVFEDAAEFENNLDGQSASANWEKDVSLDKVSDVGWDASGWNKNAEDVDKFAAAATSSEKQNEWSGWGASKSNSQDVGWDALSGWNKNAEDGDKFAAAATSSKKQNECSDWGASKSKSQDVVSPKVDVGWDALSAWHKNAEDGDNFAAAASSSKKQSEWSDWGMSKSKSQDVSPKTDGTCMKEQTELSGWEMKKFDTRDVLPVEERASKPNGWDSGASWGIMSKESEELDASAAAPWSGWGTKDSSPKKSLDKTSKSSSWDTVSSWGRKTAAVHESGFIGNDNQPGQGRIENEWDNKASQVKPVQSASGWNNKVTEEMVVQSTSSWDEKASWEKPVQSMSGWVSSSAAGSDESPTKGCSKNSNWDQQKAQTMNNAWDQQKSPATNSSWDRQKSSTANNSWDQQKPPANSSWDQEKSPTINNSWDQQKSPECSQGWGTLNDLNQPASSSGWDMPQGEDNTQSEKQHQWGQSKGSRRWASDANKKSRPLKPARMMNDDSSMAAMYTVTRQRLDMFTSEEKDILLDVEPLMQSIRKIMHQTGKFIFEGTTMGIHCLPMIRRLYLIMF

SEQ ID NO: 580 - protein, 1406 aa, Gossypium raimondii
MEENSSSVILDGEIVGIKFCLATPKEILTASVSGFPINHVSQLSNSYLGLPLEFGKCSACGTSEPGQCEGHFGYIELPIPIYHPSHISELKRLLSLLCLKCLKLKNKFQMKSGSVAERLLSSCCENTPQVSIKEVKTTDGACYLELKQPSRQSKTNWNFLERYGFRYGDHHTRTLLPCEVVEILKRIPSQTRRKLSGKGFFPQEGYILQYLPVPPNCLSVPDVSDGVSVMSSDLSTSMLRKVLKQVEIIKSSRSGTPNFESHEVEANDLQSAVEQYLQVRGTVKASRSIDARYGVNKDASDSSTKAWLEKMRTLFIRKGSGFSSRSVITGDPYKKVNEIGIPSEIAQRITFEERVNMHNMRYLQNLVDNKLCLTYRDGGSTYSLREGSKGHTFLRPGQVVHRRIMDGDIVFINRPPTTHKHSLQALSVYVHDDHTVKINPLICGPLSADFDGDCIHLFYPQSLSAKAEVYELFSVEKQLLSSHSGNLNLQLATDSLLSLRVMLKTFLFKKADAQQLSMFLSSALPEPAFLKCNHVAPCWTAFQILQTAFPACLDCSSDRYLIGKSDILKVDFNKDLMQSVINEVVASIFYEKGPKEVLNFFDSLQPLLMENIFAEGFTVCLEDFSVSREVIENIQKDIQVISPLLYQLRSTYNELVELQMENHIRVAKEPIADFILKTSSLGNLIDSRSDSAVNKVVQQIGFLGMQLSDKGKFYSKTLVEDVAHQFQSIYPSDAIDYPSAEFGLIKSCFFRGLDPYEGIVHSISTREVMVRSTRGLSEPGTLFKNLMAILRDVVICYDGTVRNVSSNSIIQFQYGLSARTRPQFPAGEPVGVLAATAMSNPAYKAVLDSSPSSNSSWELMKEILLCKVSFKNDPIDRRVILYLKDCDCGRKYCQENAAYLVKNHLRRVKLKDIAVDFIIEYQQQQIVSEIEAGLVGHILLNKDLLKELSVSVQEIHMKCQETINSFRKKKKTAETFKRTDLFVSESCSIQQSCVDKWLDMPCLMFFFRNTNDDNLDSAIQILADIIYPVLLQTVIKGDPRICSAKIIWVNPDATTWIRNPSKTQKGELALEVVLEKSAVKQNGDAWRTVIDCCLPVLNIIDTHRSIPYAIKQVEQLLGISCAFEQAVQRLSTSVSMVTRGVLKEHLMLLANSMTCCGNLIGFNSGGYKTLSRSLNIQVPFTEATLFTPRKCFERAAEKCYDDSLSSIVASCSWGKRVAVGTGSRFDLLWNQESGSDQMSGMDVYNFLHMVSGAGGSNSNTACLGEEVDDLMDEWCLSPDHSTGLDKPVFEDAAEFENNLDGQSASANWEKDVSLDKVSDVGWDASGWNKNAEDVDKFAAAATSSEKQNEWSGWGASKSNSQDMLSLQKWMLVGMPCLHGIKMQRMVTILQQLHPVQRSKASGLIGG

SEQ ID NO: 581 - protein, 1204 aa, Gossypium raimondii
MGASPDGKGNGGMGSTSGEKFANGTDLNMDIDEDDDVFDELVSVQELGEEFLRNFCRKAAVSFFNQYGLVSHQINSYNDFIKYGLQNTFDSFGEFVIHSGYDPSKKGEGDWRHARVKFGKVTVERPTFWAVTGGNELNMLPRHARLQNMTYSSRMKVTVELQVYTAKSVKSDKFKTGREEIVEEEIVHQDNREIIIGRIPVMVKSELCWMNEVEKSDCDFDHGGYFLIKGAEKIFIAQEQISLKRLWISNIQGWTVAYRSEVKRNRLIIRLVENSKVEYIKGGEKILTVFFLSIEIPVWILFFALGVRSDKEVVSLIDYGSSDSSISNILFASIRDADWKCRNFREESAALNHLDRLRKETRFPPEESVEECLGKYLFPSLKGFKQKARFLGYMVKSLLQAFTGHRKCDNRDDFRNKRLELAGELLEREMKVHIAHARRRMAKTLQRDLYADRTVRPIEHYLDASIVTNGLSRAFSTGAWSHPYKKMERISGVVANLGRANPLQTMVDLRKTRQQVQYTGKVGDARYPHPSHWGKVCFLSTPDGENCGLVKNLATTALVSTNIVKSVVESIVDTLFDSGMEKVVNDTSSSLDGKDKVFLNGEWVGVCEDSLFFAAELRRKRRRKELPYQVEIKRDEHKGEVRIFTDAGRILRPLLVVENLFKLKAFKGKENYAFQPLLDKGIVELIGAEEEEDCRTAWGIRYLLTEVEGKQPVKYTHCELDMSFLLGLSCGIIPFANHDHARRVLYQAQKHSQQAIGFSTTNPNIRVDTLSHQMYYPQRPLFHTMTADCLGKSGFPLGQNRLEPKPELYNGQNAIVAVNVHLGYNQEDSLVMNRASIERGMFRTEHVRSYKAEVDNKEIQEKRRKAEDIVNFGKTESKIGRVDSLDDDGFPYIGASLQSGDIVIGRFAESGADHGVKLKHTERGMVQKVVLSSNDDGKNFAVVSLRQVRSPCLGDKFSSMHGQKGVLGFLESHENFPFTTQGIVPDIVINPHAFPSRQTPGQLLEAALGKGIACGGSKKHATPFSTLSIDAITEQLHRAGFSRWGNERVYNGRTGEMVRSLIFMGPTFYQRLVHMAEDKVKFRNTGPVHPLTRQPVADRKRYGGIKFGEMERDCLIAHGASANLHERLFTLSDCSQMHVCQNCKNAANVIERTVAAGRKIRGPYCRVCQSGDEIVKVSVPYGAKLLCQELFSMGISLKFETQLC

SEQ ID NO: 582 - protein, 1038 aa, Gossypium raimondii
MGASPDGKGNGGMGSTSGEKFANGTDLNMDIDEDDDVFDELVSVQELGEEFLRNFCRKAAVSFFNQYGLVSHQINSYNDFIKYGLQNTFDSFGEFVIHSGYDPSKKGEGDWRHARVKFGKVTVERPTFWAVTGGNELNMLPRHARLQNMTYSSRMKVTVELQVYTAKSVKSDKFKTGREEIVEEEIVHQDNREIIIGRIPVMVKSELCWMNEVEKSDCDFDHGGYFLIKGAEKIFIAQEQISLKRLWISNIQGWTVAYRSEVKRNRLIIRLVENSKVEYIKGGEKILTVFFLSIEIPVWILFFALGVRSDKEVVSLIDYGSSDSSISNILFASIRDADWKCRNFREESAALNHLDRLRKETRFPPEESVEECLGKYLFPSLKGFKQKARFLGYMVKSLLQAFTGHRKCDNRDDFRNKRLELAGELLEREMKVHIAHARRRMAKTLQRDLYADRTVRPIEHYLDASIVTNGLSRAFSTGAWSHPYKKMERISGVVANLGRANPLQTMVDLRKTRQQVQYTGKVGDARYPHPSHWGKVCFLSTPDGENCGLVKNLATTALVSTNIVKSVVESIVDTLFDSGMEKVVNDTSSSLDGKDKVFLNGEWVGVCEDSLFFAAELRRKRRRKELPYQVEIKRDEHKGEVRIFTDAGRILRPLLVVENLFKLKAFKGKENYAFQPLLDKGIVELIGAEEEEDCRTAWGIRYLLTEVEGKQPVKYTHCELDMSFLLGLSCGIIPFANHDHARRVLYQAQKHSQQAIGFSTTNPNIRVDTLSHQMYYPQRPLFHTMTADCLGKSGFPLGQNRLEPKPELYNGQNAIVAVNVHLGYNQEDSLVMNRASIERGMFRTEHVRSYKAEVDNKEIQEKRRKAEDIVNFGKTESKIGRVDSLDDDGFPYIGASLQSGDIVIGRFAESGADHGVKLKHTERGMVQKVVLSSNDDGKNFAVVSLRQVRSPCLGDKFSSMHGQKGVLGFLESHENFPFTTQGIVPDIVINPHAFPSRQTPGQLLEAALGKGIACGGSKKHATPFSTLSIDAITEQLHR

SEQ ID NO: 583 - protein, 1147 aa, Gossypium raimondii
MDGTEIERPTLRLTNIPQTAVAKDLLDFFESKLGPDSVFAIEISTDRNNWKSRGFGRVQFAAPQAKSDALRLSRHDHLLFKSHSLKLSRTYDDIIPRPIRADHRLDGGVLHAGFMSSDDCLRVLERWEGVRGWIMPERRRLEFWVWTDGECYKLDFLFDDIFETVGCCFDGSACNALLLRVRYAPRIYQKVSGPNVASKFSTDRYHICKEKFDFLWVRTTDFSRIKSIGQSTSFYWEFNAGFSISDMSTYLPCYREDIQSPSLEARREFSSPSEIVPLVKFPSDSKLAYEILFQLNALVHTQKISIAAVDTDLIGILSGLPVETAVMILQKLRLLQSPCYNPVSFVKAKLPTGKNYRIPLSVSERLKNHNVMSCRRALITPTKIYCLGPELETANYVVKNFAEYASYFMRVTFVEEDWSKLSANAISTGVHLGVFSRPFKTKIYDRILYVLQNGIVIGDKRFEFLAFSASQLRSNSVWMFASNDEVKAEDIREWMGCFKKIRSISKCASRMGQLFSSSMPTLVVPVQDVEIIDDIEVKTDGINYCFSDGIGKISLPFARQVAEKCGLNHIPSAFQIRYGGYKGVVAVDRNSFWKMSLRDSMLKFESKVRMLNVTKWSESMPCFLNREIVTLFSTLGIKDEVFERMQEEQLCLLGKMLTNREAALDTLQSLGGVNSKNILVEMLQFYEPNVQPYLSMMLQAHYENLLSDLKSRCRIFVPKGRILIGCLDETGTLNYDQVYLCIKMKKAELECADQSYFRKVDEETAIVIGKVVVTKNPCLHPGDVRVLEAVYEPQLEEKGLVDCLVFPQKGERPHPNECSGGDLDGDQFFISWDKDLIPCQTEPPMDYTGRRPRIMDHEVTLEEIQKFFVDYMINDTLGAISTAHLVHADREPDKACSENCLALATLHSMAVDFAKTGAPAEMPRALKPREFPDFMQRGNKPMYTSSGVLGKLYRATINSTVQTRSKFVWTKEMAELVYDHDLEVNGFESLISVAETHKEMYEERMSLLMSYYDVEYEDEILTGNIYNKAQFLLRDNRRYGEMKERIVLSVKDLQREAKEWFKSSCSKADEHQKLASAWYYVTYHPNYFQERMNSLSFPWIVGDILLRVKSRNKFLNSREIQRNRPKFDNVYIKSPRRHTSGDESSME

SEQ ID NO: 584 - protein, 1196 aa, Gossypium raimondii
MELEGSVKETVVTQVSVGGFDRHVKARDLMKYLENAVGVVWRCRLKTSWTPPESYPNFEITDTSVIQRKDNYKKVEPHAFVHFASPEAVTWAVDAAGRTELAFNNQLLKVSLGPENPYYLNRRRRDTAPFMLPDVSLEIGALASCDEFFVGWRGPPSGVEFLVDPFDCTCKFCFSRDTAFSFKGTNERAVIKCDFKVEFLVREINEVKQYSEQTGFVVLLQLASSPWVWYRTADDDFEKSVPFDLLDDDDQWIRTTDFTASGAIGRCNTYRVLVRPRHGLKLKKAMYYLRERRVPVKDLRSQLRICDEPYFGRSMSDHFYYTYKEGIPFEIMFLVNAVLHKGIFNQHQLSMDFFKLLRNQSMEVNVAALRHIYSSRHPVYDAYKRLKDVHDWLLKNPKLFRSPPQLDDIVEIRRLVITPTKAYCLLPEVELSNRVLRKYKDVADRFLRVTFMDEGMQTMNANVLTYYNAAIVRDVTSTSFSQKTGVFKRVKSILTDGFYLCGRKYSFLAFSANQLRDRSAWFFAEDGKINVLQIIGWMGKFANRNIAKCAARMGQCFSSTYATVEVPSGQVNMHLPDIQRNGYDFSDGIGKITPDLAMEVAQKLKLDLNPPCAYQIRYAGCKGVVACWPEEGDGIRLSLRSSMIKFFSHHTTLEICSWTRFQPGFLNRQIITLLSTLGVPDKVFWGMQKSMVSKLDKVLVDTDAAFEVVISSCGEQGHTPAIMLSAGFKPQTEPHLRGMLTCVRASQLWGLREKSRIFIHSGRWLMGVLDELGVLEQGQCFIQVSNPSLQNCFLKHGSRFAETKKNFEVIKGLVVIAKNPCLHPGDVRILEAVDAPGLHHLYDCLVFPQKGERPHTNEASGSDLDGDLYFVTWEEALIPPSKKSSQPMQYNPDEPRELHRPVTHKDIIEFFSKNMVNEHLGSICNAHVVHSDLSDHGASDEKCIHLAELAAIAVDFPKTGKIVSMPAHLKPQLYPDFMGKEEFQSYKSNKILGRLYRDIKDAYDEDVSESSGLNFCASDINYDADLEITGSADYIADAWAKKCSYDGQLIGLLKQYKVKREEEVVTGQIWSMPKYASKKLGDLKEKLGHSYGSLRKEFRQLFENMDSDFEQLNEDEKNKLYERKASAWYQVTYHPEWVQKTLEFQKPDGDEGVVMLSFAWIAADYLARIKVRHQGTENLDFAKPVNSLVRYLADRI

SEQ ID NO: 585 - protein, 652 aa, Gossypium raimondii
MVIFCEELNRLNSIDPLLGITNMANELAFDLIYGVGDEKDIFELSYATFAEELQLQEILKESMMGSEKELEDAASEANQKLECLVSHGLSNTECAISHVSEIHEPQSFNKQGSARWRPQQRFGYIEQQRINWDDKGRDRFRWRKPTGWHNIRGRRVGDVPQTSSSKEFHAKTSSWGEGSPLVGTGNIEDPKGKGKAIDDGWLLVSKWKSESRGGNSVDKQQVDLGHPNHLKGSKDDDTSAVHEDDCESLDDEDDFDSDDSQKSYESRKKSKWFKEFFERMDALNAEEIDQTLWHCPACQGGPGAIKWYRSISDLIAHSKKIGSRRVKLHQELAMLLEGELCIRGTSVSPPADPIVGTWKGLKEEARDHQVVWPPMVVIMNTMTSNSKDGKFVGMGSHELLEHFSSFPALKAQHSYGPQGHRGLSVLIFESSAVGYLEAERLHQNFLDQGLDKFAWNSCTNEVLPGGERQLYGFMAVKEDLDCFNQHCQGKSKLKYELKSYQEAVLNEIKKMREDSQQLIRLKDKLEEEIKRAKTLERSVDDLSRNLQQRMKDICIFERRVKSLHEDNKEEVESQEIFYKDQIKILEARVKELDHKLKESGASPLHTGEPEPAMSGLLEEEHTPYQYNSNLGIDEDSSLENGKLPSKSNENGD

SEQ ID NO: 586 - protein, 635 aa, Gossypium raimondii
MSSRKGGSKGKEVSGVSRPKVDQLSHGVAEMNMDSSQDDGEWEVIQRKPKNTGGSSGAKPWGSQNSNPKPWNGGMRGNAGPGRGTGGNAWANHGADSRIASGRGNSRPQIVNKSLDNHQVPSNPVIRPPLEHGWNWQSRTGSNPSKGFQDGYEKDNVNAEAEKDNDVDDIEDDSDDVAADDSDNELLTDEFDSDSSQKSHETRKKNRWFKKFFDSLDKLRVEEINDPARQWHCPACQGGPGAIDWYRGLQPLGTHAKTKGSKRVKLHRELAELLDEELRRRGTSVIPAGEAFGKWRGLKDDEKDHEIVWPPMVIIMNTRLQQDDNDKWIGIGNQELLDYFSSYAAVKARHSYGPQGHRGMSLLIFESTARGYLEAERLHKHFAEQGTDREAWEHRQVLFYPGGTRQLYGYMANKEDLDIFNQHSQGKSKLKFEMRSYQEMVVNQIRQMSEANQELIFYKNKFAIQQRLKTALEESFGVVSEKLRKTMEENRIVRQRTKMQHEQNKEEMDFQEQFFKEQIKFIHEARDEEEEKFEKLQQQQREKFVKQSTPNTSNTEEYRRRADEIAKFIKLQDEEMEAFVSERDKLITVHKEKMAAMRQRHWQEEVELEKEFDTELSRLMEKYTPTMPGMDKYIY

SEQ ID NO: 587 - protein, 458 aa, Gossypium raimondii
MSSRKGGSKGKEVSGVSRPKVDQLSHGVAEMNMDSSQDDGEWEVIQRKPKNTGGSSGAKPWGSQNSNPKPWNGGMRGNAGPGRGTGGNAWANHGADSRIASGRGNSRPQIVNKSLDNHQVPSNPVIRPPLEHGWNWQSRTGSNPSKGFQDGYEKDNVNAEAEKDNDVDDIEDDSDDVAADDSDNELLTDEFDSDSSQKSHETRKKNRWFKKFFDSLDKLRVEEINDPARQWHCPACQGGPGAIDWYRGLQPLGTHAKTKGSKRVKLHRELAELLDEELRRRGTSVIPAGEAFGKWRGLKDDEKDHEIVWPPMVIIMNTRLQQDDNDKWIGIGNQELLDYFSSYAAVKARHSYGPQGHRGMSLLIFESTARGYLEAERLHKHFAEQGTDREAWEHRQVLFYPGGTRQLYGYMANKEDLDIFNQHSQGKSKLKFEMRSYQEMVVNQIRQMSEFDSIAYKT

SEQ ID NO: 588 - protein, 439 aa, Gossypium raimondii
MSSRKGGSKGKEVSGVSRPKVDQLSHGVAEMNMDSSQDDGEWEVIQRKPKNTGGSSGAKPWGSQNSNPKPWNGGMRGNAGPGRGTGGNAWANHGADSRIASGRGNSRPQIVNKSLDNHQVPSNPVIRPPLEHGWNWQSRTGSNPSKGFQDGYEKDNVNAEAEKDNDVDDIEDDSDDVAADDSDNELLTDEFDSDSSQKSHETRKKNRWFKKFFDSLDKLRVEEINDPARQWHCPACQGGPGAIDWYRGLQPLGTHAKTKGSKRVKLHRELAELLDEELRRRGTSVIPAGEAFGKWRGLKDDEKDHEIVWPPMVIIMNTRLQQDDNDKWIGIGNQELLDYFSSYAAVKARHSYGPQGHRGMSLLIFESTARGYLEAERLHKHFAEQGTDREAWEHRQVLFYPGGTRQLYGYMANKEDLDIFNQHSQGSLLLKTMVICMQG

SEQ ID NO: 589 - protein, 644 aa, Gossypium raimondii
MADATDSFPDLRSVYKSSGHQVNRLSQNVANMKLASAQDGEKENSLGSNNKGAENVGFPQDSTPNVWGHPNVIQKLRMQGNLGSEKVTHKAWPTQNAVSRTQQGDRTWGNSSIKSPSSEYGRNDPDQAGFTFSNNSWDGQIKTDHEVGDKLDDEIGDNENVDDEYGNGVSNIEYDSDDIDDYVSGSDEDEKSHEARKESKWFYFFFESLEKLTVEEILSPVRRWHCPACQGGPGAINWYRGVQPLLTHSMTKTTRRAKLHRVFAGLLVEEMRRRGAFIKPVNDAFGRWEGLTDRVADHEIVWPPMVIIMNTRYEQDENGKWIGMGNQELLNYFSSYAAVKARHSYGPQGHRGMSLLIFESSAAGYLETARLHKHFKEQGRDRDAWDCSRVPFCPGGKRQLYGYIAMKEDLDLFNQHSQGKSKLKFETRSYQEMVESQIKKINDDSQQLNLLKKKVAQEQQHSQVLAESLGRLSEKLRQTTEEYGIMRQQTRLQHEQNKEELGAKEQYFKEKINVIYQAIKLKEDNFEKLQRAARERVERSNATLINNEDQHSATELEENSRSITIQEKKMEEFEAEREKLMKSHQDGRLAITQRYWEELIELEEGFEKELTLLMGKYNPDRLEEETTDSLEGRDKRGARDIETE

SEQ ID NO: 590 - protein, 539 aa, Gossypium raimondii
MADATDSFPDLRSVYKSSGHQVNRLSQNVANMKLASAQDGEKENSLGSNNKGAENVGFPQDSTPNVWGHPNVIQKLRMQGNLGSEKVTHKAWPTQNAVSRTQQGDRTWGNSSIKSPSSEYGRNDPDQAGFTFSNNSWDGQIKTDHEVGDKLDDEIGDNENVDDEYGNGVSNIEYDSDDIDDYVSGSDEDEKSHEARKESKWFYFFFESLEKLTVEEILSPVRRWHCPACQGGPGAINWYRGVQPLLTHSMTKTTRRAKLHRVFAGLLVEEMRRRGAFIKPVNDAFGRWEGLTDRVADHEIVWPPMVIIMNTRYEQDENGKWIGMGNQELLNYFSSYAAVKARHSYGPQGHRGMSLLIFESSAAGYLETARLHKHFKEQGRDRDAWDCSRVPFCPGGKRQLYGYIAMKEDLDLFNQHSQGKSKLKFETRSYQEMVESQIKKINDDSQQLNLLKKKVAQEQQHSQVLAESLGRLSEKLRQTTEEYGIMRQQTRLQHEQNKEEVAFLKLCIPLLLLPIMVAKLGQEGCPGTTFSMFHYLVKW

SEQ ID NO: 591 - protein, 572 aa, Gossypium raimondii
MADATDPFPDLGSVYKVSGRCQVNRDVADIKLASSVDGRESKNRVAANSGLHKDSTSNVWGHPNLIQKLKMQTTSNVRPTVDGSCLSSRRHGSASTQQGAGTCPVQAGFTLPNSSENRVDEYDNNDPDVVYDNDDLDDYDFDFDEDEKSHEARKKSKWFNAFFERLEKLTVEEIISPAQQWHCPACQGGPGAIDWYRGVQPLMTHSMTKMTRRAKMHRVFAELLVEEMRRRGTFIKPANDAVGKWEGLNVRVADHEIVWPPMVIIMNTKYEQDETGKWSGMGNQELLNYFSSYAAIKARHSYGPQGHRGMSVLIFESSAAGYLEAVRLHKHFKEQGRDRDAWDHSQVPFCPGGKRQLYGYIAIKEDLDVFNRHSQGNSKLKFELRSYQEMVESQIKKINDNSQQLTRLKKKVAQEQQHSQVLAESLGRLSEKLHQTIEPKNHIVRQRAILQHEQNKEELIAKEQYFKEKINTIYQSIDCKEDNFEKLQRAASERVKQSNMNPIHDKDECSAIELHEKNIGEFNAEREKLMKSRQDRRLTITLRYWEDLVKLEEGFEKEFTLLMEKYTHRILH

SEQ ID NO: 592 - protein, 572 aa, Gossypium raimondii; identical to SEQ ID NO: 591

SEQ ID NO: 593 - protein, 645 aa, Gossypium raimondii
MSSRKGNGNPFVSGGINNPSSKGKDISGSSSSKVEQLSQGVADMNLGLPQDDGEWEVIQRKPKNRTGSSAARPWGPQNSNGKPRGAMRTNAVSGRASGNAWDAHNTDSRMATGRGNARPQTCNKAIENNNVPPHPVIRPPLQYGWNWQSRTGSNPSGGLQDDHGKNNVNTEVEEVNDIDDVEDDSDDNAIDDSDDELLTDDFDSDSSQKSHETRKNNRWFKKFFSSLDALRIEEINDPARQWHCPACQGGPGAIDWYRGLQPLMTHAKTKGAKRVKLHRELAELLDEELCRRGTSVIPSGEAFGKWKGLKDEEKDHEIVWPPMVMIMNTRLEQDENDKWIGMGNQELLDYFSSYAAVKARHSYGPQGHRGMSVLIFESTARGYLEAERLHKHFAEQGTHREAWERRRVLFYPGGKRQLYGYMAMKEDLDSFNQHSQGKSRLKFEMRSYQEMVVKQIRQMSEDNQQLIFYKNKVAKEQRQKVALEESFGIVSERLRKTMEENRIVRQRTKMQHEQNKEEMDFQEQFFKERIKFIHEARDEKEESFEKLQQQQREKVKQSNPNPSNTEEYRRRADEIAKFIKFQDEEMQAFVAERDKLIKAHEEKMVGMRERHWQEEVELEKEFDAELSHLMEKYTPDGSKVNPGNT

SEQ ID NO: 594 - protein, 645 aa, Gossypium raimondii; identical to SEQ ID NO: 593

SEQ ID NO: 595 - protein, 645 aa, Gossypium raimondii; identical to SEQ ID NO: 593

SEQ ID NO: 596 - protein, 645 aa, Gossypium raimondii; identical to SEQ ID NO: 593

SEQ ID NO: 597 - protein, 645 aa, Gossypium raimondii; identical to SEQ ID NO: 593

SEQ ID NO: 598 - protein, 645 aa, Gossypium raimondii; identical to SEQ ID NO: 593

SEQ ID NO: 599 - protein, 693 aa, Gossypium raimondii
MGSLVPFQDLNLCPEPPLPATVNISTSATPSATINRTTTFNFLTPKIEPKQEPFDEPTPTQTIHQQENFLFSVSNSTPDFIPNPETTPPANASSSADDQNALYSEYFRISELFRSAFAKRIQKYGDVEVLDPDSRAIVPVPEQSQLTPETSPTDGSNLERALSVVVSRKKAGRSNELVRVTNLGIDDQRHFRDLVRRTRMMYDSLRVLVISEEEKRTGPGNGRRARGDLRAAAVMRDRELWLNRDKRIVGAIPGIEIGDVFFFRMELCVVGLHGQIQAGIDTLPASQSSSGEPIATSIIISGGYEDDEDSGDSIIYTGQGGQDKFGKQCMHQKLEGGNLALERSMHYGIEVRVIRGFKYENRVSGKVYVYDGLYKILDCWFDVGKSGFGVYKFRLSRIEGQPEMGSSIMKFAESLRTKPLSTRPMGYLTLDISMKKERVPIFLYNDIDNDHDPMYYDYLVNTVFPLNVFGQGSNSTGCDCVSGCTEGCFCAMKNGGDFAYDYGGILLRGKPVIFECGNFCQCPPSCRNRVAQHGLRNRLEIFRSRETGWGVRSLDLIQAGAFICEYAGVVLTRDQAEVFKMNGDTLIYPNRFSERWAEWGDLSRIFPEYVCPSYPSIPPLDFAMDVSRMRNAACYISHSSSPNVLVQCVLYDHNNLMFPHLMLFAMENIPPMRELSIDYGVADEWTGKLSICN

SEQ ID NO: 600 - protein, 405 aa, Gossypium raimondii
MGFQIFGFQKVVFQYVKCFEILLLKSVAHRVSGAEFLLELRTKAKIFVQKGRSMMGCLDETRTLNYGQVFVQFSGSRSNQRDIVQGKVIVAKNPYLHPGDVRVLRAVNVPDLHHMVDCVVFHRKEPGTPHPNECSGTDLDGDTYFLCWDPELIPYKQIDAMDYSPAPTTKLDHEVTIEEIEEYFTNYINLTKLFSIAVDFPKTGVPAEIPQDLRVKEFPNFMEKPDKPSYQSHNVIGKLFREVKNLAPNECSIKFLTREKMQRFYDPDMEVEGFEDYIDDAFFYKSKYDYKLGNLMDYCRVKTEAEILSGGIMKMSRSFTKKRDAEAISMAVRSLRKEARSWFNEKRSELDEEIDDAYAKASAWYYVTYHPSYWGQYNEGMNRDHFLSFPWCVYDKLVQIKKENA

SEQ ID NO: 601 - protein, 1110 aa, Gossypium raimondii
MGKTIQVYGFLSNVSAGEVKTFLEGYTGRETVYALKIRQHKKGGRAYAIVQFTRSSAAELIIRLANQRLYYGRSYLKAREMETDIVPKPRAFLHTMERVTVNFGCQVSVEKFYVLWKAENVTLNFGTGMRKLEFLVSYCRSKYKLELFYENIWQIELRCPDSQTSKHLLIQLFGAPRIYEKEVRASELVFDDPLLNYFKDVPDDQWVRTTDFTRSNCIGQSSVLCLELPHNLRLPNFRENFAYYKENESRLVLESGSSYSCNLSLVPIVCPLRVIDLPFEILFKVNLLVQNGCIPGPALDDTFYRLVDPCRMDKVYIDHALEKLYYLRECCYEPSRWLFEEYKNFSRSRKYQGSPAISLDEGLVYVRRVQITPSRVYFCGPEINVSNRVLRQFHNDIDNFLRISFVDEELEKIHSINVQARGRRTSIYERILSTLRNGVLIGDKRFEFLAFSSSQLRENSAWMFASRKGLTAADIRSWMGNFSKIRNVAKYAARLGQSFSSSTETLSVSKDEINLIPDIEIMKDGIKYVFSDGIGKISAKFAKKVAAKCRLKGCTPSAFQIRIGGFKGVVAIDPTSSWKLSLRKSMEKYESENTKLDVLAWSKYQPCFLNRQLITLLSTLGVPDRAFEKKQREVIEQLNALLTDPLEAQEALELMSPGENTNILKEMLLCGYKPDAEPFLSMMLEAFRASKLLELRTKARIFVQKGRSMMGCLDETRTLNYGQVFVQFSGSRSEQRCIVQGKVIVAKNPCLHPGDVRVLRAVNVPDLHHMVDCVVFPQKGTRPHPNECSGSDLDGDIYFVCWDPELIPYKQMDPMDYSPAPTTILDHEVTIEEIEEYFTNYIVNDSLGIISNAHTAFADREPGKAMCHPCLELAKLFSIAVDFPKTGVPAEIPQELRVKEYPDFMEKPDKPSYQSHNVIGKLFREVKNLAPNECSIKFLTREKMQRFYDPDMEVEGFEDYIDDAFFHKSKYDYKLGNLMDYYGVKTEAEILSGGILKMSRSFTKKRDAEAISMAVRSLRKEARSWFNEERSELDEEIDDAYAKASAWYYVTYHPSYWGQYNEGMNRDHFLSFPWCVYDKLIQIKKEKAAVREALDLSSLEHRFQRRLHLH

SEQ ID NO: 602 - protein, 395 aa, Gossypium raimondii
LVSPIAYLSSTFRASKLLKLRTKARIFVQKGRSMMGCLDETRTLNYGQVFVQFSGSRSDQRDIVQGKVIVAKNPCLHPGDVRVLRAVNVPDLHHMVDCVNQIFRPHPNECSGSDLDSDTYFVCWDPELIPYKQINAMDYSPAPTTKLDHEVTIEEIEEYFTNYIVNDKNLTKLFSIAVDFPKTGVPAEIPQDLRVKEFSDFMEKPDKPSYQSHNVIGKLFREVKNLAPNECSIKFLTREKMQRFYDPDMEVEGFEDYIDDAFFYKSKYDYKLGNVMDYYRVKTEAEILSGGIMKMSRSFTKKRDAEAISIAVRSLRKEAGSWFNEKGSELDEEIDDAYAKASAWYYVTYHPSYWGHFPWCVYDKLVQIRKKMQLFREALDLSSPEHRFQHGLHLH

SEQ ID NO: 603 - protein, 1654 aa, Gossypium raimondii
MPGGELSTDGTEPFMASKVKAFSTPSPIVEISRKDEPIMEKKEKDPRKIARKYQLELCKKAMEENIIVYLETGCGKTHIAVLLIYELGHLIRKPQNRVCIFLAPTVALVQQQARVIEDSLDFKVGTYCGNCRHLKNHHDWEIEIKEYEVLVMTPQILLRSLYHCFIRMDLIALLIFDECHHAQIKSNHPYAEIMKVFYDKATASMLPRIFGMTASPVVGKDASSQVNLPKSINSLENLLDAKVYSVGDKEELESFVASPVVRVYDYGPVNFGSSCSTIIYCSKLEEIKRQCIPFVRKNGDIQSARNTKKLLNRMHDNIIFCLENLGIWGALQACRLLLTGNNSERNELIEDEGILSDDSVCDRYLVHAADVFASDCTRDGSANDLSDVEILKEPFFSKKLLRLVGILSTFRLQPNMKCIIFVNRIVTARSLSYILQNLKFLLFWKCHFLVGVHSGLKSMSRKTMKNILEKFRTGELNLLIATKVGEEGLDIQTCCLVIRFDLPETVASFIQSRGRARMPLSEYAFLVNSGNEKELDLIKNFKKDEDRMNVEISFRTSTEVSIGLEERIYMVDSSGASISSGYSISLLHHYCSKLPHDEYFFPKPSFYYFEDSGGTICNIILPSNAPINQIASTPQSSVNAAKKDACLKAIEELHKLGALTDHLLPLQNSVLEEETLLVSSDSGSSEDEDSRGELHEMLVPAVLKESWTNLENCVLLYAYYIKFNPNPKDRSYKEFALFVKSPLPKEAERMELDLHLSRRRSVMTKLTPSGVAEFKREEIMQAQHFQEMFFKVILDRSELLSEFITLGNVFLSSSSSTFYLLLPVILSNCENKVTVDWGIVQRCLSSPLFKPPVAAAKIENFPSDVCLHLVNGCRSIRDIENSLVYATHKRAFYFITSIVGEKNGYSPYRDSGTLNHVEHLNMSGIHLKYPEQPLLHAKPLFKLHNLLHNRKPEDSEANELEEYFIDLPPELCQLKIIGFSKEIGSSLSLLPSIMHRLENLLVAIELKHVFSASFAEGAEVTALRVLEALTTEKCQERFSLERLETLGDSFLKFAVARHLFLLHDALDEGELTRRRSNVVNNSNLFKLATRRNLQVYIRDQPFDPYQFFPLGHPCPVICTKETKGTVHPQSSCQVDHTKSEVKCSRNHHWLHKDTISDVVEALVGAFIVDRGFQAATAFLRWIGIRVDFQGSQLNSICAASKRFMPLSSLLDIGDLENLLGYQFLHKGLLLQAIVHPSFNRHGGGCYQRLEFLGDAVLDYLITSYLFSLYPKLKPGQLTDLRSVSVNNKSFANVAVDRRLHKFLMCDSCHLNEAIEKYVDFITSSSPDRGLFEGPKCPKALGDLVESCFGAILLDTGFNLNRVWKIMLSILDPIKSLSSVQLNPIREVQELSQCYNWDLQFLVAKVGRNFSVDAKVNAGDVPLCVSYSNINRKEAIRTTAHQLYVKLKALGYAPKSKSLEEVLKGSPKNEAKLIGYDETPIDVSVTDIVGFENMKLQESLVNDFNPKTRSIKRTTSSGVSCISPGSRPPPSFEVKAARGSASGIEAKGKPPNCSIVDPSCGIDSPSKGESHGRTARSQLYEICAINCWKPPLFECCKEEGPSHLRSFTYRVIVEIEEAPDMILECFSSPRTTKKAAAEHAAEGALWYLKHGGYLQ

SEQ ID NO: 604 - protein, 1504 aa, Gossypium raimondii
MTPQILLRSLYHCFIRMDLIALLIFDECHHAQIKSNHPYAEIMKVFYDKATASMLPRIFGMTASPVVGKDASSQVNLPKSINSLENLLDAKVYSVGDKEELESFVASPVVRVYDYGPVNFGSSCSTIIYCSKLEEIKRQCIPFVRKNGDIQSARNTKKLLNRMHDNIIFCLENLGIWGALQACRLLLTGNNSERNELIEDEGILSDDSVCDRYLVHAADVFASDCTRDGSANDLSDVEILKEPFFSKKLLRLVGILSTFRLQPNMKCIIFVNRIVTARSLSYILQNLKFLLFWKCHFLVGVHSGLKSMSRKTMKNILEKFRTGELNLLIATKVGEEGLDIQTCCLVIRFDLPETVASFIQSRGRARMPLSEYAFLVNSGNEKELDLIKNFKKDEDRMNVEISFRTSTEVSIGLEERIYMVDSSGASISSGYSISLLHHYCSKLPHDEYFFPKPSFYYFEDSGGTICNIILPSNAPINQIASTPQSSVNAAKKDACLKAIEELHKLGALTDHLLPLQNSVLEEETLLVSSDSGSSEADEDSRGELHEMLVPAVLKESWTNLENCVLLYAYYIKFNPNPKDRSYKEFALFVKSPLPKEAERMELDLHLSRRRSVMTKLTPSGVAEFKREEIMQAQHFQEMFFKVILDRSELLSEFITLGNVFLSSSSSTFYLLLPVILSNCENKVTVDWGIVQRCLSSPLFKPPVAAAKIENFPSDVCLHLVNGCRSIRDIENSLVYATHKRAFYFITSIVGEKNGYSPYRDSGTLNHVEHLNMSGIHLKYPEQPLLHAKPLFKLHNLLHNRKPEDSEANELEEYFIDLPPELCQLKIIGFSKEIGSSLSLLPSIMHRLENLLVAIELKHVFSASFAEGAEVTALRVLEALTTEKCQERFSLERLETLGDSFLKFAVARHLFLLHDALDEGELTRRRSNVVNNSNLFKLATRRNLQVYIRDQPFDPYQFFPLGHPCPVICTKETKGTVHPQSSCQVDHTKSEVKCSRNHHWLHKDTISDVVEALVGAFIVDRGFQAATAFLRWIGIRVDFQGSQLNSICAASKRFMPLSSLLDIGDLENLLGYQFLHKGLLLQAIVHPSFNRHGGGCYQRLEFLGDAVLDYLITSYLFSLYPKLKPGQLTDLRSVSVNNKSFANVAVDRRLHKFLMCDSCHLNEAIEKYVDFITSSSPDRGLFEGPKCPKALGDLVESCFGAILLDTGFNLNRVWKIMLSILDPIKSLSSVQLNPIREVQELSQCYNWDLQFLVAKVGRNFSVDAKVNAGDVPLCVSYSNINRKEAIRTTAHQLYVKLKALGYAPKSKSLEEVLKGSPKNEAKLIGYDETPIDVSVTDIVGFENMKLQESLVNDFNPKTRSIKRTTSSGVSCISPGSRPPPSFEVKAARGSASGIEAKGKPPNCSIVDPSCGIDSPSKGESHGRTARSQLYEICAINCWKPPLFECCKEEGPSHLRSFTYRVIVEIEEAPDMILECFSSPRTTKKAAAEHAAEGALWYLKHGGYLQ

SEQ ID NO: 605 - protein, 1503 aa, Gossypium raimondii
MTPQILLRSLYHCFIRMDLIALLIFDECHHAQIKSNHPYAEIMKVFYDKATASMLPRIFGMTASPVVGKDASSQVNLPKSINSLENLLDAKVYSVGDKEELESFVASPVVRVYDYGPVNFGSSCSTIIYCSKLEEIKRQCIPFVRKNGDIQSARNTKKLLNRMHDNIIFCLENLGIWGALQACRLLLTGNNSERNELIEDEGILSDDSVCDRYLVHAADVFASDCTRDGSANDLSDVEILKEPFFSKKLLRLVGILSTFRLQPNMKCIIFVNRIVTARSLSYILQNLKFLLFWKCHFLVGVHSGLKSMSRKTMKNILEKFRTGELNLLIATKVGEEGLDIQTCCLVIRFDLPETVASFIQSRGRARMPLSEYAFLVNSGNEKELDLIKNFKKDEDRMNVEISFRTSTEVSIGLEERIYMVDSSGASISSGYSISLLHHYCSKLPHDEYFFPKPSFYYFEDSGGTICNIILPSNAPINQIASTPQSSVNAAKKDACLKAIEELHKLGALTDHLLPLQNSVLEEETLLVSSDSGSSEDEDSRGELHEMLVPAVLKESWTNLENCVLLYAYYIKFNPNPKDRSYKEFALFVKSPLPKEAERMELDLHLSRRRSVMTKLTPSGVAEFKREEIMQAQHFQEMFFKVILDRSELLSEFITLGNVFLSSSSSTFYLLLPVILSNCENKVTVDWGIVQRCLSSPLFKPPVAAAKIENFPSDVCLHLVNGCRSIRDIENSLVYATHKRAFYFITSIVGEKNGYSPYRDSGTLNHVEHLNMSGIHLKYPEQPLLHAKPLFKLHNLLHNRKPEDSEANELEEYFIDLPPELCQLKIIGFSKEIGSSLSLLPSIMHRLENLLVAIELKHVFSASFAEGAEVTALRVLEALTTEKCQERFSLERLETLGDSFLKFAVARHLFLLHDALDEGELTRRRSNVVNNSNLFKLATRRNLQVYIRDQPFDPYQFFPLGHPCPVICTKETKGTVHPQSSCQVDHTKSEVKCSRNHHWLHKDTISDVVEALVGAFIVDRGFQAATAFLRWIGIRVDFQGSQLNSICAASKRFMPLSSLLDIGDLENLLGYQFLHKGLLLQAIVHPSFNRHGGGCYQRLEFLGDAVLDYLITSYLFSLYPKLKPGQLTDLRSVSVNNKSFANVAVDRRLHKFLMCDSCHLNEAIEKYVDFITSSSPDRGLFEGPKCPKALGDLVESCFGAILLDTGFNLNRVWKIMLSILDPIKSLSSVQLNPIREVQELSQCYNWDLQFLVAKVGRNFSVDAKVNAGDVPLCVSYSNINRKEAIRTTAHQLYVKLKALGYAPKSKSLEEVLKGSPKNEAKLIGYDETPIDVSVTDIVGFENMKLQESLVNDFNPKTRSIKRTTSSGVSCISPGSRPPPSFEVKAARGSASGIEAKGKPPNCSIVDPSCGIDSPSKGESHGRTARSQLYEICAINCWKPPLFECCKEEGPSHLRSFTYRVIVEIEEAPDMILECFSSPRTTKKAAAEHAAEGALWYLKHGGYLQ

SEQ ID NO: 606 - protein, 977 aa, Gossypium raimondii
MSGRGGGERGSGRGGGRRGRGQGRGRGQPSQSSSRGGGGRARGRGSSGSTATYNPPPPQMAPAQPPPQMAVATPVPPSGAPFSHPSSSSGVGSLSREVSEKLTMEPVAVTTAPPLPPSSSKAIRFPPRPGFGTVGTKCVVRANHFLVDVANADLHHYDVTITPEVTAKKVNRAIMKQLIDVYKESHLGRRCPAYDGRKSLYTAGPLPFESKELVIKLPEEDRSAGSSRPARKERQFKVAIKLASKPDLHYLREFLSRKHFECPQEAIQVLDVVLRAKPSQTYTEVGRSFFHTSLGPRGELGNGIEYWSGYYQSLRPTQMGLSLNIDVSARSFYEPILVSEFVAKHFRRSNLSKPLSDQDRIKVKKALKGVRVKLIYMDYAKTCKIIGVSRDPISQLTFTHDDKRTNVSVVKYFREKYNVVLKYPSLPALQSGSEARPVYLPMELCSIVEGQRYTKKLNEQQVRSLLRATCQRPNIREGNITKMVQVNNFEVEELVTKEFGMHVRKELALINARVLNPPVLKYHDSGRDKIVNPSCGQWNMINKKMVNGGKVDFWSCVNFSSEYRNMSEDFCAGLVNMCNSKGMVFRQTPSIAMRSARADRIDQTLMDVYKESAGLNKPLKLLIIILPDQTGSYGKIKRICETELGIVSQCCKPAQASKFSNQYFENVALKINAKVGGRNTVLNDAVLRRIPLVTDVPTIIFGADVTHPPPGEDSSSSIAAVVASMDWPEVTKYRGIVSAQTHRVEIIEDLYKQTRDPQKGLVEGGMVRELLLAFYRSTKQKPSRIIFYRDGVSEGQFSQVLLYEMDAIRKACSSLQEGYMPRVTFVVVQKRHHTRLFPTDRNKTDRSGNILPGTVVDTSICHPTEFDFYLNSHAGIQGTSKPTHYHVLLDENGFSADILQVLTNNLCYTYARCTKSVSIVPPAYYAHLAAYRARYYIEDEMSDSGSTGGGRKPKDKVVEVRPLPSIKDNVKEVMFYV

SEQ ID NO: 607 - protein, 977 aa, Gossypium raimondii; identical to SEQ ID NO: 606

SEQ ID NO: 608 - protein, 971 aa, Gossypium raimondii
MSGRGGGERGSGRGGGRRGRGQGRGRGQPSQSSSRGGGGRARGRGSSGSTATYNPPPPQMAPAQPPPQMAVATPVPPSGAPFSHPSSSSGVGSLSREVSEKLTMEPVAVTTAPPLPPSSSKAIRFPPRPGFGTVGTKCVVRANHFLVDVANADLHHYDVTITPEVTAKKVNRAIMKQLIDVYKESHLGRRCPAYDGRKSLYTAGPLPFESKELVIKLPEEDRSAGSSRPARKERQFKVAIKLASKPDLHYLREFLSRKHFECPQEAIQVLDVVLRAKPSQTYTEVGRSFFHTSLGPRGELGNGIEYWSGYYQSLRPTQMGLSLNIDVSARSFYEPILVSEFVAKHFRRSNLSKPLSDQDRIKVKKALKGVRVKLIYMDYAKTCKIIGVSRDPISQLTFTHDDKRTNVSVVKYFREKYNVVLKYPSLPALQSGSEARPVYLPMELCSIVEGQRYTKKLNEQQVRSLLRATCQRPNIREGNITKMVQVNNFEVEELVTKEFGMHVRKELALINARVLNPPVLKYHDSGRDKIVNPSCGQWNMINKKMVNGGKVDFWSCVNFSSEYRNMSEDFCAGLVNMCNSKGMVFRQTPSIAMRSARADRIDQTLMDVYKESAGLNKPLKLLIIILPDQTGSYGKIKRICETELGIVSQCCKPAQASKFSNQYFENVALKINAKVGGRNTVLNDAVLRRIPLVTDVPTIIFGADVTHPPPGEDSSSSIAAVVASMDWPEVTKYRGIVSAQTHRVEIIEDLYKQTRDPQKGLVEGGMVRELLLAFYRSTKQKPSRIIFYRDGVSEGQFSQVLLYEMDAIRKEGYMPRVTFVVVQKRHHTRLFPTDRNKTDRSGNILPGTVVDTSICHPTEFDFYLNSHAGIQGTSKPTHYHVLLDENGFSADILQVLTNNLCYTYARCTKSVSIVPPAYYAHLAAYRARYYIEDEMSDSGSTGGGRKPKDKVVEVRPLPSIKDNVKEVMFYV

SEQ ID NO: 609 - protein, 879 aa, Gossypium raimondii
MSGRGGGERGSGRGGGRRGRGQGRGRGQPSQSSSRGGGGRARGRGSSGSTATYNPPPPQMAPAQPPPQMAVATPVPPSGAPFSHPSSSSGVGSLSREVSEKLTMEPVAVTTAPPLPPSSSKAIRFPPRPGFGTVGTKCVVRANHFLVDVANADLHHYDVTITPEVTAKKVNRAIMKQLIDVYKESHLGRRCPAYDGRKSLYTAGPLPFESKELVIKLPEEDRSAGSSRPARKERQFKVAIKLASKPDLHYLREFLSRKHFECPQEAIQVLDVVLRAKPSQTYTEVGRSFFHTSLGPRGELGNGIEYWSGYYQSLRPTQMGLSLNIDVSARSFYEPILVSEFVAKHFRRSNLSKPLSDQDRIKVKKALKGVRVKLIYMDYAKTCKIIGVSRDPISQLTFTHDDKRTNVSVVKYFREKYNVVLKYPSLPALQSGSEARPVYLPMELCSIVEGQRYTKKLNEQQVRSLLRATCQRPNIREGNITKMVQVNNFEVEELVTKEFGMHVRKELALINARVLNPPVLKYHDSGRDKIVNPSCGQWNMINKKMVNGGKVDFWSCVNFSSEYRNMSEDFCAGLVNMCNSKGMVFRQTPSIAMRSARADRIDQTLMDVYKESAGLNKPLKLLIIILPDQTGSYGKIKRICETELGIVSQCCKPAQASKFSNQYFENVALKINAKVGGRNTVLNDAVLRRIPLVTDVPTIIFGADVTHPPPGEDSSSSIAAVVASMDWPEVTKYRGIVSAQTHRVEIIEDLYKQTRDPQKGLVEGGMVRELLLAFYRSTKQKPSRIIFYRDGVSEGQFSQVLLYEMDAIRKACSSLQEGYMPRVTFVVVQKRHHTRLFPTDRNKTDRSGNILPGTVVDTSICHPTEFDFYLNSHAGIQVK

SEQ ID NO: 610 - protein, 864 aa, Gossypium raimondii
MSGRGGGERGSGRGGGRRGRGQGRGRGQPSQSSSRGGGGRARGRGSSGSTATYNPPPPQMAPAQPPPQMAVATPVPPSGAPFSHPSSSSGVGSLSREVSEKLTMEPVAVTTAPPLPPSSSKAIRFPPRPGFGTVGTKCVVRANHFLVDVANADLHHYDVTITPEVTAKKVNRAIMKQLIDVYKESHLGRRCPAYDGRKSLYTAGPLPFESKELVIKLPEEDRSAGSSRPARKERQFKVAIKLASKPDLHYLREFLSRKHFECPQEAIQVLDVVLRAKPSQIYTEVGRSFFYTSLGPRGELGNGTEYWSGYYQSLRPTQMGLSLNIDVSARSFYEPILVSEFVVKHFRRSNLSKPLSDQDRIKVKKALKGVRVRLIYMDYAKTCKIIGVSRDPISQLTFPLDDKRTNVSVVKYFREKYNVVLKYPSLPALQSGSEARPVYLPMELCSIVEGQRYTKKLNEQQVRSLLRATCQRPNIREGNITKMVQVNNFEVEELVTKEFGMHVRKELALINAQVLNPPVLKYHDSGRDKIVNPSCGQWNMINKKMVNWGKVDFWSCVNFSSEYWNMSEEFCAELVNMCNNKGMVFCQTPSIAMRSACADRIDQILMDVYKESAGLNKPLQLLIIILPDQTGSYGKIKRICETELGIVSQCCKPVQAAKFSNQYFENVALKINAKVGGRNTVLNDAILRRIPLVTDVPTIIFGADVTHPPPGEDSSSSIAAVVASMDWPEVTKYRGIVSAQTHRMEIIQDLYKQTKDPQKGLVEGGMVRELLVAFFKSTRQKPSRIIFYRGGVSEGQFSQVLLYEMDAIWKACSSLQEGYMPRVTFVVVQKRHHTRLFPTDRNKTDGSGNILPGDKQGHTLPRFV

SEQ ID NO: 611 - protein, 864 aa, Gossypium raimondii
MSGRGGGERGSGRGGGRRGRGQGRGRGQPSQSSSRGGGGRARGRGSSGSTATYNPPPPQMAPAQPPPQMAVATPVPPSGAPFSHPSSSSGVGSLSREVSEKLTMEPVAVTTAPPLPPSSSKAIRFPPRPGFGTVGTKCVVRANHFLVDVANADLHHYDVTITPEVTAKKVNRAIMKQLIDVYKESHLGRRCPAYDGRKSLYTAGPLPFESKELVIKLPEEDRSAGSSRPARKERQFKVAIKLASKPDLHYLREFLSRKHFECPQEAIQVLDVVLRAKPSQTYTEVGRSFFHTSLGPRGELGNGIEYWSGYYQSLRPTQMGLSLNIDVSARSFYEPILVSEFVAKHFRRSNLSKPLSDQDRIKVKKALKGVRVKLIYMDYAKTCKIIGVSRDPISQLTFTHDDKRTNVSVVKYFREKYNVVLKYPSLPALQSGSEARPVYLPMELCSIVEGQRYTKKLNEQQVRSLLRATCQRPNIREGNITKMVQVNNFEVEELVTKEFGMHVRKELALINARVLNPPVLKYHDSGRDKIVNPSCGQWNMINKKMVNWGKVDFWSCVNFSSEYWNMSEEFCAELVNMCNNKGMVFCQTPSIAMRSACADRIDQILMDVYKESAGLNKPLQLLIIILPDQTGSYGKIKRICETELGIVSQCCKPVQAAKFSNQYFENVALKINAKVGGRNTVLNDAILRRIPLVTDVPTIIFGADVTHPPPGEDSSSSIAAVVASMDWPEVTKYRGIVSAQTHRMEIIQDLYKQTKDPQKGLVEGGMVRELLVAFFKSTRQKPSRIIFYRGGVSEGQFSQVLLYEMDAIWKACSSLQEGYMPRVTFVVVQKRHHTRLFPTDRNKTDGSGNILPGDKQGHTLPRFV

SEQ ID NO: 612 - protein, 864 aa, Gossypium raimondii
MSGRGGGERGSGRGGGRRGRGQGRGRGQPSQSSSRGGGGRARGRGSSGSTATYNPPPPQMAPAQPPPQMAVATPVPPSGAPFSHPSSSSGVGSLSREVSEKLTMEPVAVTTAPPLPPSSSKAIRFPPRPGFGTVGTKCVVRANHFLVDVANADLHHYDVTITPEVTAKKVNRAIMKQLIDVYKESHLGRRCPAYDGRKSLYTAGPLPFESKELVIKLPEEDRSAGSSRPARKERQFKVAIKLASKPDLHYLREFLSRKHFECPQEAIQVLDVVLRAKPSQTYTEVGRSFFHTSLGPRGELGNGIEYWSGYYQSLRPTQMGLSLNIDVSARSFYEPILVSEFVAKHFRRSNLSKPLSDQDRIKVKKALKGVRVKLIYMDYAKTCKIIGVSRDPISQLTFTHDDKRTNVSVVKYFREKYNVVLKYPSLPALQSGSEARPVYLPMELCSIVEGQRYTKKLNEQQVRSLLRATCQRPNIREGNITKMVQVNNFEVEELVTKEFGMHVRKELALINARVLNPPVLKYHDSGRDKIVNPSCGQWNMINKKMVNGGKVDFWSCVNFSSEYRNMSEDFCAGLVNMCNSKGMVFRQTPSIAMRSARADRIDQTLMDVYKESAGLNKPLKLLIIILPDQTGSYGKIKRICETELGIVSQCCKPVQAAKFSNQYFENVALKINAKVGGRNTVLNDAILRRIPLVTDVPTIIFGADVTHPPPGEDSSSSIAAVVASMDWPEVTKYRGIVSAQTHRMEIIQDLYKQTKDPQKGLVEGGMVRELLVAFFKSTRQKPSRIIFYRGGVSEGQFSQVLLYEMDAIWKACSSLQEGYMPRVTFVVVQKRHHTRLFPTDRNKTDGSGNILPGDKQGHTLPRFV

SEQ ID NO: 613 - protein, 864 aa, Gossypium raimondii
MSGRGGGERGSGRGGGRRGRGQGRGRGQPSQSSSRGGGGRARGRGSSGSTATYNPPPPQMAPAQPPPQMAVATPVPPSGAPFSHPSSSSGVGSLSREVSEKLTMEPVAVTTAPPLPPSSSKAIRFPPRPGFGTVGTKCVVRANHFLVDVANADLHHYDVTITPEVTAKKVNRAIMKQLIDVYKESHLGRRCPAYDGRKSLYTAGPLPFESKELVIKLPEEDRSAGSSRPARKERQFKVAIKLASKPDLHYLREFLSRKHFECPQEAIQVLDVVLRAKPSQTYTEVGRSFFHTSLGPRGELGNGIEYWSGYYQSLRPTQMGLSLNIDVSARSFYEPILVSEFVAKHFRRSNLSKPLSDQDRIKVKKALKGVRVKLIYMDYAKTCKIIGVSRDPISQLTFTHDDKRTNVSVVKYFREKYNVVLKYPSLPALQSGSEARPVYLPMELCSIVEGQRYTKKLNEQQVRSLLRATCQRPNIREGNITKMVQVNNFEVEELVTKEFGMHVRKELALINAQVLNPPVLKYHDSGRDKIVNPSCGQWNMINKKMVNWGKVDFWSCVNFSSEYWNMSEEFCAELVNMCNNKGMVFCQTPSIAMRSACADRIDQILMDVYKESAGLNKPLQLLIIILPDQTGSYGKIKRICETELGIVSQCCKPVQAAKFSNQYFENVALKINAKVGGRNTVLNDAILRRIPLVTDVPTIIFGADVTHPPPGEDSSSSIAAVVASMDWPEVTKYRGIVSAQTHRMEIIQDLYKQTKDPQKGLVEGGMVRELLVAFFKSTRQKPSRIIFYRGGVSEGQFSQVLLYEMDAIWKACSSLQEGYMPRVTFVVVQKRHHTRLFPTDRNKTDGSGNILPGDKQGHTLPRFV

SEQ ID NO: 614 - protein, 845 aa, Gossypium raimondii
MSGRGGGERGSGRGGGRRGRGQGRGRGQPSQSSSRGGGGRARGRGSSGSTATYNPPPPQMAPAQPPPQMAVATPVPPSGAPFSHPSSSSGVGSLSREVSEKLTMEPVAVTTAPPLPPSSSKAIRFPPRPGFGTVGTKCVVRANHFLVDVANADLHHYDVTITPEVTAKKVNRAIMKQLIDVYKESHLGRRCPAYDGRKSLYTAGPLPFESKELVIKLPEEDRSAGSSRPARKERQFKVAIKLASKPDLHYLREFLSRKHFECPQEAIQVLDVVLRAKPSQIYTEVGRSFFYTSLGPRGELGNGTEYWSGYYQSLRPTQMGLSLNIDVSARSFYEPILVSEFVVKHFRRSNLSKPLSDQDRIKVKKALKGVRVRLIYMDYAKTCKIIGVSRDPISQLTFPLDDKRTNVSVVKYFREKYNVVLKYPSLPALQSGSEARPVYLPMEMVQVNNFEVEELVTKEFGMHVRKELALINAQVLNPPVLKYHDSGRDKIVNPSCGQWNMINKVFCQTPSIAMRSACADRIDQILMDVYKESAGLNKPLQLLIIILPDQTGSYGKIKRICETELGIVSQCCKPVQAAKFSNQYFENVALKINAKVGGRNTVLNDAILRRIPLVTDVPTIIFGADVTHPPPGEDSSSSIAAVVASMDWPEVTKYRGIVSAQTHRMEIIQDLYKQTKDPQKGLVEGGMVRGGVSEGQFSQVLLYEMDAIWKACSSLQEGYMPRVTFVVVQKRHHTRLFPTDRNKTDGSGNILPGTVVDTSICHPTEFDFYLNSHAGILGTSKATRYHVLFDENGFSADILQVLTNSLCYTYARCTKSVSIGHAIILRMRCRIVGLLVEAESRKTRL

SEQ ID NO: 615 - protein, 690 aa, Gossypium raimondii
MKQLIDVYKESHLGRRCPAYDGRKSLYTAGPLPFESKELVIKLPEEDRSAGSSRPARKERQFKVAIKLASKPDLHYLREFLSRKHFECPQEAIQVLDVVLRAKPSQIYTEVGRSFFYTSLGPRGELGNGTEYWSGYYQSLRPTQMGLSLNIDVSARSFYEPILVSEFVVKHFRRSNLSKPLSDQDRIKVKKALKGVRVRLIYMDYAKTCKIIGVSRDPISQLTFPLDDKRTNVSVVKYFREKYNVVLKYPSLPALQSGSEARPVYLPMELCSIVEGQRYTKKLNEQQVRSLLRATCQRPNIREGNITKMVQVNNFEVEELVTKEFGMHVRKELALINAQVLNPPVLKYHDSGRDKIVNPSCGQWNMINKKMVNWGKVDFWSCVNFSSEYWNMSEEFCAELVNMCNNKGMVFCQTPSIAMRSACADRIDQILMDVYKESAGLNKPLQLLIIILPDQTGSYGKIKRICETELGIVSQCCKPVQAAKFSNQYFENVALKINAKVGGRNTVLNDAILRRIPLVTDVPTIIFGADVTHPPPGEDSSSSIAAVVASMDWPEVTKYRGIVSAQTHRMEIIQDLYKQTKDPQKGLVEGGMVRELLVAFFKSTRQKPSRIIFYRGGVSEGQFSQVLLYEMDAIWKACSSLQEGYMPRVTFVVVQKRHHTRLFPTDRNKTDGSGNILPGDKQGHTLPRFV

SEQ ID NO: 616 - DNA, 3965 bp, Zea mays
  source 1..3965: mol_type = genomic DNA
ggagaggaagcaggacctgggagacctcgcctcgtccgtcctcctgcctacttccttgcttttggtaggtgctgcttgttttatcttgaaatgggctctcatgatggcgaggatgaagagttgccacccccccctccggtgccaccagatgtgattcccattaaagctgaagatgctgtgggtgaatcaccagcaaaccatatattaaagccaaagagattactgatggacaggcctggtataggaagaaaagggcagccgacccagctctattcaaatcactttaaagtcgctgtgaagagtacagaagacgtcttctttcactactatgtaaacctgaagtatgaggatgatcgacccgttgatggtaaagggatcggcagaaaggtgattgataaactgcagcagacatatcgtgcagagctttctaacaaggactttgcatatgatggagaaaagagcctgtttacagttggtggtcttccacaaaaaaagaatgagttcaccgttgtcttggaggacgtatctactggaaagactgctgccaatgggagccctggaggtaatgacagtcctggaggtggtgataggaagagagtgaggaggccataccagacgaaaactttcaaagtggagataaattttgcagcagaggttcctatgagtgctattggtcaagtcattagaggcgaagaatctgagaactccctggaggcgcttcgtgttcttgatatcatactgaggcagcattccgcagaacaaggctgccttttggttaagcaatcatttttctacaacaacccttcatgctttgttgacttgggtggtggtgtgatgggttgtcgtggatttcattcaagcttccgtggcacacagagtggactttccctcaatgttgatgtctcaacaacaatgatcgtgaaacctggccctgttattgattttcttctttctaaccagaatgttaatgatcctagcagaattgattggcaaaaggccaagcgtgctctcaagggcttgaggattagaaccactcctgcaaattcagaattcaagatttttggtctcagcgagaggatctgcaaagaacaaacgtttccgctgaggcagagaaatggtagcaacggagattgtgataccattgaaataactgtctatgactactatgcaaagaaaggaatcgatctaaagtattctggtgatttcccctgtataaatacagggaaggcaaagcgcccaacatattttccaatcgagctatgctcgcttgttccgcttcaaagatacaccaaagctttgtctacgctacaaaggtcatcccttgtggagaagtctagacagaagcctgaagaaaggatgaccgttctaaatgatgcactgcaacgcagtaactacgattctgaccccatgttgagggcatgtggtgtttcagttgctccaaaatttacccaagttgaaggaaggatccttcaagccccaaagctgaaagccggcaatggtgatgatatcttttcacgaaatggacggtggaatttcactaataggaagttttatgaaacctgctctgtgaataagtgggcggtcgttaatttctctgcacgttgtgatgttcggaatcttatccgtgacctgatgaggaatgcatctgcaaagggaattcaaatggaggaaccttttgatgtgtttgaagagagtccctctatgaggcgtgcacctgtgtcaagaagggtggatgatatgtttgggcagataaaatcaaaacttcctggagctcctaggttcctcttgtgccttctccctgagaggaaaaattgtgaaatctatggtccttggaagagaaagtgcctggccgagtttggtattgtcacacagtgtctagctccattaagagtcaatgatccgtacctgcttaatttgctgatgaagatcaatgcaaagcttggtggtctgaactcgttgctgcaagttgaagcatcttcgtcaataccacatgtgtcgcaagtacccaccatcatcttaggtatggatgtttcacatggtcatccaggacaagatagaccttcggttgcagcggtggttagttctcgtcaatggcctcttatctctagatatagagcatcagtgcacacccaatctgccagactagaaatgatgtcctcgttgtttaagccgcggggtactgatgatgatggcctcatccgggaatcactgatcgacttctacactagctctggaaagcgaaaaccagaacacataattattttcagggatggagtcagtgaaagtcagtttacccaggtcatcaacattgagctggatcagatcatcgaggcatgtaagtttctggatgagaagtggtcacccaagttcactgtgattgttgctcaaaagaaccaccacaccaagttctttcagacggcatcaccagacaatgttcttcctggaactgtggtggatagtaaagtttgccatcctaagaacttcgacttctacatgtgtgcacatgctgggatgattggaacaacaaggccgacccactatcatgttctgcacgacgagataggtttcagtgccgacgagatgcaggagtttgttcattcgctctcttacgtgtaccagaggagcacgacagccatctcagtggttgctccagtgtgctacgcccacctcgctgcagcccaggtgagcacgttcctgagattggaggagatgtcagacgcgtcctccagccagggaggagggcatacctcggctggcagtgctcctgtgccggagctgcctcgcctgcatgacaaagtcaggagctccatgttcttctgctagctgatgtgcgtgcgcatcaggatcgagctccatgttttgtgttagtaaggcctagttagtaaggctgtagaaagaatgtttaatgtttgcatgctaaagtccaaacaatcaaaaccactactatatctaccagagcactgatcgatcaaacaacaagagtcagcatcaatcaatcaaaaccaccactattctatctaccgatcaatctactctatacctgaagcactcactcgctcgcaaacaaccaagggatcatggatccttgagtagctccattgtccagtccctgaccttgacgaagcatttcatggacagcctctcgtacgccatctcgtacatccggaggttcatgtaggcgaagctcaagtaggtggcgatgcactcttggtgcctgtggtacagcgccgggatggtcagagcggccaccacacttgcgtagcaggcggtcgggaaatctgtaacgctgccgacgatggacacgctccacaggcagaggaaggctctgtagaagagcagcgagtccctgcccagagcgatgtcccggaaagcgtccgaggcggcgtccagagcagagcgcagcagcgccgccgcctcgtccacggcctgctgcggaacgcgcagctccgggacgggaggctgcggcctgttcaggaggcgcgccgctttggcccacaggaagagcacggtgaggagcaggagcagcacgttggaggcgagggacaccaaggtgtagccgccgtacaagagcagccaggaggagacggtgcccgccagcaggcaggcgctcacgtcggcgcggccccggcgccacagcagcacgtcccagactgctgcagcaatccgatccgattccgatccagatatattagttagtagatccaatctcgggcggccaatccgtaataataattggctgagagaaaaggtgggagagagtaccgaatcctccgacggcacatgtcccggcgccgccgccgccgccgccaacaccaacaccagcatccaccaccatcgtcgtagttaatactaagggaagggaactagagaaggaagggaggggccgatgcaacggaagaaatggatggaattcgaccaacagctagctagagcgaagcagaacccaatcccaatcaaaacccgag

SEQ ID NO: 617 - DNA, 4052 bp, Zea mays
  source 1..4052: mol_type = genomic DNA
ggagaggaagcaggacctgggagacctcgcctcgtccgtcctcctgcctacttccttgcttttggtaggtgctgcttgttttatcttgaaatgggctctcatgatggcgaggatgaagagttgccacccccccctccggtgccaccagatgtgattcccattaaagctgaagatgctgtgggtgaatcaccagcaaaccatatattaaagccaaagagattactgatggacaggcctggtataggaagaaaagggcagccgacccagctctattcaaatcactttaaagtcgctgtgaagagtacagaagacgtcttctttcactactatgtaaacctgaagtatgaggatgatcgacccgttgatggtaaagggatcggcagaaaggtgattgataaactgcagcagacatatcgtgcagagctttctaacaaggactttgcatatgatggagaaaagagcctgtttacagttggtggtcttccacaaaaaaagaatgagttcaccgttgtcttggaggacgtatctactggaaagactgctgccaatgggagccctggaggtaatgacagtcctggaggtggtgataggaagagagtgaggaggccataccagacgaaaactttcaaagtggagataaattttgcagcagaggttcctatgagtgctattggtcaagtcattagaggcgaagaatctgagaactccctggaggcgcttcgtgttcttgatatcatactgaggcagcattccgcagaacaaggctgccttttggttaagcaatcatttttctacaacaacccttcatgctttgttgacttgggtggtggtgtgatgggttgtcgtggatttcattcaagcttccgtggcacacagagtggactttccctcaatgttgatgtctcaacaacaatgatcgtgaaacctggccctgttattgattttcttctttctaaccagaatgttaatgatcctagcagaattgattggcaaaaggccaagcgtgctctcaagggcttgaggattagaaccactcctgcaaattcagaattcaagatttttggtctcagcgagaggatctgcaaagaacaaacgtttccgctgaggcagagaaatggtagcaacggagattgtgataccattgaaataactgtctatgactactatgcaaagaaaggaatcgatctaaagtattctggtgatttcccctgtataaatacagggaaggcaaagcgcccaacatattttccaatcgagctatgctcgcttgttccgcttcaaagatacaccaaagctttgtctacgctacaaaggtcatcccttgtggagaagtctagacagaagcctgaagaaaggatgaccgttctaaatgatgcactgcaacgcagtaactacgattctgaccccatgttgagggcatgtggtgtttcagttgctccaaaatttacccaagttgaaggaaggatccttcaagccccaaagctgaaagccggcaatggtgatgatatcttttcacgaaatggacggtggaatttcactaataggaagttttatgaaacctgctctgtgaataagtgggcggtcgttaatttctctgcacgttgtgatgttcggaatcttatccgtgacctgatgaggaatgcatctgcaaagggaattcaaatggaggaaccttttgatgtgtttgaagagagtccctctatgaggcgtgcacctgtgtcaagaagggtggatgatatgtttgggcagataaaatcaaaacttcctggagctcctaggttcctcttgtgccttctccctgagaggaaaaattgtgaaatctatggtccttggaagagaaagtgcctggccgagtttggtattgtcacacagtgtctagctccattaagagtcaatgatccgtacctgcttaatttgctgatgaagatcaatgcaaaggtttgggacatgattttgtctttcttttgcactgtattgttccctggttcatgattatattatcctctttcctctgtttttaactagcttggtggtctgaactcgttgctgcaagttgaagcatcttcgtcaataccacatgtgtcgcaagtacccaccatcatcttaggtatggatgtttcacatggtcatccaggacaagatagaccttcggttgcagcggtggttagttctcgtcaatggcctcttatctctagatatagagcatcagtgcacacccaatctgccagactagaaatgatgtcctcgttgtttaagccgcggggtactgatgatgatggcctcatccgggaatcactgatcgacttctacactagctctggaaagcgaaaaccagaacacataattattttcagggatggagtcagtgaaagtcagtttacccaggtcatcaacattgagctggatcagatcatcgaggcatgtaagtttctggatgagaagtggtcacccaagttcactgtgattgttgctcaaaagaaccaccacaccaagttctttcagacggcatcaccagacaatgttcttcctggaactgtggtggatagtaaagtttgccatcctaagaacttcgacttctacatgtgtgcacatgctgggatgattggaacaacaaggccgacccactatcatgttctgcacgacgagataggtttcagtgccgacgagatgcaggagtttgttcattcgctctcttacgtgtaccagaggagcacgacagccatctcagtggttgctccagtgtgctacgcccacctcgctgcagcccaggtgagcacgttcctgagattggaggagatgtcagacgcgtcctccagccagggaggagggcatacctcggctggcagtgctcctgtgccggagctgcctcgcctgcatgacaaagtcaggagctccatgttcttctgctagctgatgtgcgtgcgcatcaggatcgagctccatgttttgtgttagtaaggcctagttagtaaggctgtagaaagaatgtttaatgtttgcatgctaaagtccaaacaatcaaaaccactactatatctaccagagcactgatcgatcaaacaacaagagtcagcatcaatcaatcaaaaccaccactattctatctaccgatcaatctactctatacctgaagcactcactcgctcgcaaacaaccaagggatcatggatccttgagtagctccattgtccagtccctgaccttgacgaagcatttcatggacagcctctcgtacgccatctcgtacatccggaggttcatgtaggcgaagctcaagtaggtggcgatgcactcttggtgcctgtggtacagcgccgggatggtcagagcggccaccacacttgcgtagcaggcggtcgggaaatctgtaacgctgccgacgatggacacgctccacaggcagaggaaggctctgtagaagagcagcgagtccctgcccagagcgatgtcccggaaagcgtccgaggcggcgtccagagcagagcgcagcagcgccgccgcctcgtccacggcctgctgcggaacgcgcagctccgggacgggaggctgcggcctgttcaggaggcgcgccgctttggcccacaggaagagcacggtgaggagcaggagcagcacgttggaggcgagggacaccaaggtgtagccgccgtacaagagcagccaggaggagacggtgcccgccagcaggcaggcgctcacgtcggcgcggccccggcgccacagcagcacgtcccagactgctgcagcaatccgatccgattccgatccagatatattagttagtagatccaatctcgggcggccaatccgtaataataattggctgagagaaaaggtgggagagagtaccgaatcctccgacggcacatgtcccggcgccgccgccgccgccgccaacaccaacaccagcatccaccaccatcgtcgtagttaatactaagggaagggaactagagaaggaagggaggggccgatgcaacggaagaaatggatggaattcgaccaacagctagctagagcgaagcagaacccaatcccaatcaaaacccgag

SEQ ID NO: 618 - DNA, 4033 bp, Zea mays
  source 1..4033: mol_type = genomic DNA
ggagaggaagcaggacctgggagacctcgcctcgtccgtcctcctgcctacttccttgcttttggtaggtgctgcttgttttatcttgaaatgggctctcatgatggcgaggatgaagagttgccacccccccctccggtgccaccagatgtgattcccattaaagctgaagatgctgtgggtgaatcaccagcaaaccatatattaaagccaaagagattactgatggacaggcctggtataggaagaaaagggcagccgacccagctctattcaaatcactttaaagtcgctgtgaagagtacagaagacgtcttctttcactactatgtaaacctgaagtatgaggatgatcgacccgttgatggtaaagggatcggcagaaaggtgattgataaactgcagcagacatatcgtgcagagctttctaacaaggactttgcatatgatggagaaaagagcctgtttacagttggtggtcttccacaaaaaaagaatgagttcaccgttgtcttggaggacgtatctactggaaagactgctgccaatgggagccctggaggtaatgacagtcctggaggtggtgataggaagagagtgaggaggccataccagacgaaaactttcaaagtggagataaattttgcagcagaggttcctatgagtgctattggtcaagtcattagaggcgaagaatctgagaactccctggaggcgcttcgtgttcttgatatcatactgaggcagcattccgcagaacaaggctgccttttggttaagcaatcatttttctacaacaacccttcatgctttgttgacttgggtggtggtgtgatgggttgtcgtggatttcattcaagcttccgtggcacacagagtggactttccctcaatgttgatgtctcaacaacaatgatcgtgaaacctggccctgttattgattttcttctttctaaccagaatgttaatgatcctagcagaattgattggcaaaaggccaagcgtgctctcaagggcttgaggattagaaccactcctgcaaattcagaattcaagatttttggtctcagcgagaggatctgcaaagaacaaacgtttccgctgaggcagagaaatggtagcaacggagattgtgataccattgaaataactgtctatgactactatgcaaagaaaggaatcgatctaaagtattctggtgatttcccctgtataaatacagggaaggcaaagcgcccaacatattttccaatcgagctatgctcgcttgttccgcttcaaagatacaccaaagctttgtctacgctacaaaggtcatcccttgtggagaagtctagacagaagcctgaagaaaggatgaccgttctaaatgatgcactgcaacgcagtaactacgattctgaccccatgttgagggcatgtggtgtttcagttgctccaaaatttacccaagttgaaggaaggatccttcaagccccaaagctgaaagccggcaatggtgatgatatcttttcacgaaatggacggtggaatttcactaataggaagttttatgaaacctgctctgtgaataagtgggcggtcgttaatttctctgcacgttgtgatgttcggaatcttatccgtgacctgatgaggaatgcatctgcaaagggaattgtatggtttagcttttcacatatcttctattgtagcagttttctgctgctgacgttttcttctggcagcaaatggaggaaccttttgatgtgtttgaagagagtccctctatgaggcgtgcacctgtgtcaagaagggtggatgatatgtttgggcagataaaatcaaaacttcctggagctcctaggttcctcttgtgccttctccctgagaggaaaaattgtgaaatctatggtccttggaagagaaagtgcctggccgagtttggtattgtcacacagtgtctagctccattaagagtcaatgatccgtacctgcttaatttgctgatgaagatcaatgcaaagcttggtggtctgaactcgttgctgcaagttgaagcatcttcgtcaataccacatgtgtcgcaagtacccaccatcatcttaggtatggatgtttcacatggtcatccaggacaagatagaccttcggttgcagcggtggttagttctcgtcaatggcctcttatctctagatatagagcatcagtgcacacccaatctgccagactagaaatgatgtcctcgttgtttaagccgcggggtactgatgatgatggcctcatccgggaatcactgatcgacttctacactagctctggaaagcgaaaaccagaacacataattattttcagggatggagtcagtgaaagtcagtttacccaggtcatcaacattgagctggatcagatcatcgaggcatgtaagtttctggatgagaagtggtcacccaagttcactgtgattgttgctcaaaagaaccaccacaccaagttctttcagacggcatcaccagacaatgttcttcctggaactgtggtggatagtaaagtttgccatcctaagaacttcgacttctacatgtgtgcacatgctgggatgattggaacaacaaggccgacccactatcatgttctgcacgacgagataggtttcagtgccgacgagatgcaggagtttgttcattcgctctcttacgtgtaccagaggagcacgacagccatctcagtggttgctccagtgtgctacgcccacctcgctgcagcccaggtgagcacgttcctgagattggaggagatgtcagacgcgtcctccagccagggaggagggcatacctcggctggcagtgctcctgtgccggagctgcctcgcctgcatgacaaagtcaggagctccatgttcttctgctagctgatgtgcgtgcgcatcaggatcgagctccatgttttgtgttagtaaggcctagttagtaaggctgtagaaagaatgtttaatgtttgcatgctaaagtccaaacaatcaaaaccactactatatctaccagagcactgatcgatcaaacaacaagagtcagcatcaatcaatcaaaaccaccactattctatctaccgatcaatctactctatacctgaagcactcactcgctcgcaaacaaccaagggatcatggatccttgagtagctccattgtccagtccctgaccttgacgaagcatttcatggacagcctctcgtacgccatctcgtacatccggaggttcatgtaggcgaagctcaagtaggtggcgatgcactcttggtgcctgtggtacagcgccgggatggtcagagcggccaccacacttgcgtagcaggcggtcgggaaatctgtaacgctgccgacgatggacacgctccacaggcagaggaaggctctgtagaagagcagcgagtccctgcccagagcgatgtcccggaaagcgtccgaggcggcgtccagagcagagcgcagcagcgccgccgcctcgtccacggcctgctgcggaacgcgcagctccgggacgggaggctgcggcctgttcaggaggcgcgccgctttggcccacaggaagagcacggtgaggagcaggagcagcacgttggaggcgagggacaccaaggtgtagccgccgtacaagagcagccaggaggagacggtgcccgccagcaggcaggcgctcacgtcggcgcggccccggcgccacagcagcacgtcccagactgctgcagcaatccgatccgattccgatccagatatattagttagtagatccaatctcgggcggccaatccgtaataataattggctgagagaaaaggtgggagagagtaccgaatcctccgacggcacatgtcccggcgccgccgccgccgccgccaacaccaacaccagcatccaccaccatcgtcgtagttaatactaagggaagggaactagagaaggaagggaggggccgatgcaacggaagaaatggatggaattcgaccaacagctagctagagcgaagcagaacccaatcccaatcaaaacccgag

SEQ ID NO: 619 - DNA, 1658 bp, Zea mays
  source 1..1658: mol_type = genomic DNA
aagaagcaactatgatgcagagcccatgttgaaggcatgcgggattacaattgctagaaatttcacagaagttgatggtagggtattgcagccacctaagcttacagctgggaatggtgaagacatttttacacgcaatggtagatggaacttcaacaataagaggctcattagagcttgtagtgtcgagaaatgggcggtggtaaacttttctgcacgatgcaatgtcagggatcttgtccgggatctcatcaagtgtggaggcatgaagggcattatggttgatgctccttttgctgtatttgatgagaatccttcaatgagacggtcacctgctataagaagggttgaagacatgtttgaacaagtgaaaactaagcttcctggagcaccaaagtttcttttgtgtgttctagctgaaaggaagaattctgatatttatgggccttggaagaagaaatgccttgctgaatttgggatcgttacacaatgtgtggcaccaactagagtgaacgaccagtatcttacaaatgtcctacttaagataaatgcaaagctgggtggcatgaattcgttgctccaaattgaaacatccccagcaattcctcttgtatccaaggtcccaactataatcttgggaatggatgtgtcacacggttctcctggacattctgatgtaccatctattgctgctgttgttagttctcgtgaatggcctcttatctcgaaatacagagcttctgtccgcacccaatcacctaaaatggaaatgattgactcattgtttaagccacgggaagctgaagatgatggtctgatccgggagtgtctgattgacttctacaccagttctgggaagagaaagcctgaccaagttatcatattcagggacggtgttagcgaaagtcagtttaatcaggtgctgaacattgagttgcaacaaatcatcgaggcttgcaaatttcttgatgagaaatggaatcccaagttcacgttgattattgcccagaagaatcatcacactaaatttttcattcctggaaagccagataatgtcccaccaggaactgtggtggacaacaaagtctgccatccaaagaacttcgatttctacatgtgtgcgcatgctggaatgatcgggactacgaggccaactcactaccacatcctgcatgatgagataggcttcagtcctgatgatctgcaggagctggtgcattcgctctcttatgtgtaccaaaggagcacaacagccatatcagtcgttgctcccatctgctacgcacatctggcagctgctcaggttggccagttcataaagttcgatgagatgtcggagacgtcctccagtcatggcgggcatacttcggcgggcagcgttccggtccaggagctgccgcgcctgcatgagaaagaaggctcgagctggtacgatgttaaatgttagttttttaagcgtcgctgcggctatgttggtgcctcaggaagacttggaacctggttaggatgtcgttaaatctaccccttatcgttcctggttcgttgggctgttgttcttattgtccgtcctggtgtctgatttctgctttgttgcatgcaagtgtgaggcccagcttgatattgaaaagtttggcgtacatgtcgttcatttggcactc

SEQ ID NO: 620 - DNA, 1777 bp, Zea mays
  source 1..1777: mol_type = genomic DNA
aagaagcaactatgatgcagagcccatgttgaaggcatgcgggattacaattgctagaaatttcacagaagttgatggtagggtattgcagccacctaagcttacagctgggaatggtgaagacatttttacacgcaatggtagatggaacttcaacaataagaggctcattagagcttgtagtgtcgagaaatgggcggtggtaaacttttctgcacgatgcaatgtcagggatcttgtccgggatctcatcaagtgtggaggcatgaagggcattatggttgatgctccttttgctgtatttgatgagaatccttcaatgagacggtcacctgctataagaagggttgaagacatgtttgaacaagtgaaaactaagcttcctggagcaccaaagtttcttttgtgtgttctagctgaaaggaagaattctgatatttatgggccttggaagaagaaatgccttgctgaatttgggatcgttacacaatgtgtggcaccaactagagtgaacgaccagtatcttacaaatgtcctacttaagataaatgcaaagctgggtggcatgaattcgttgctccaaattgaaacatccccagcaattcctcttgtatccaaggtcccaactataatcttgggaatggatgtgtcacacggttctcctggacattctgatgtaccatctattgctgctgttgttagttctcgtgaatggcctcttatctcgaaatacagagcttctgtccgcacccaatcacctaaaatggaaatgattgactcattgtttaagccacgggaagctgaagatgatggtctgatccgggagtgtctgattgacttctacaccagttctgggaagagaaagcctgaccaagttatcatattcagggacggtgttagcgaaagtcagtttaatcaggtgctgaacattgagttgcaacaaatcatcgaggcttgcaaatttcttgatgagaaatggaatcccaagttcacgttgattattgcccagaagaatcatcacactaaatttttcattcctggaaagccagataatgtcccaccaggaactgtggtggacaacaaagtctgccatccaaagaacttcgatttctacatgtgtgcgcatgctggaatgatcgggactacgaggccaactcactaccacatcctgcatgatgagataggcttcagtcctgatgatctgcaggagctggtgcattcgctctcttatgtgtaccaaaggagcacaacagccatatcagtcgttgctcccatctgctacgcacatctggcagctgctcaggttggccagttcataaagttcgatgagatgtcggagacgtcctccagtcatggcgggcatacttcggcgggcagcgttccggtccaggagctgccgcgcctgcatgagaaagtgaggagctcgatgttcttttgctgagccgtggttttacttttttggtggatggtgaacccctctagttatgtcggtagacgctcttggatgacgctctagttgtggtccaggaaggctcgagctggtacgatgttaaatgttagttttttaagcgtcgctgcggctatgttggtgcctcaggaagacttggaacctggttaggatgtcgttaaatctaccccttatcgttcctggttcgttgggctgttgttcttattgtccgtcctggtgtctgatttctgctttgttgcatgcaagtgtgaggcccagcttgatattgaaaagtttggcgtacatgtcgttcatttggcactctggact

SEQ ID NO: 621 - DNA, 3118 bp, Zea mays
  source 1..3118: mol_type = genomic DNA
cggaaagaagcccggccgggtcggaaggggagcagttctcgccttctcggggaggtcgccagcgggttgggcagaggctttgcagcttttgggtcagacgcagtgttctccaaggctcactaaatggagtctcacaatggcgaggctgatgatttgcctccaccaccccctttggctgctggtgttgaaccacttaaagccgatgaaacaaagatgccattgaaacctaggagtctggtccagaggaatggctttggcagaaaggggcagcagataaagctgataacaaaccacttcaaagtttctctcatgaaggctgaagattttttctatcattactatgtcaatttgaagtatgaagatgatacaccggttgatcggaaagggtcgggaagaaaagtgatcgaaaaactgcagcaaacttatgctgctgaacttgcaaataaagattttgcatatgatggtgagaagagcctgtttacaattggtgcccttcctcaagttaaaatggaattcactgttgtggatgaagacgtttcaactggaaagactcctgcaaatggcagtccaggcaatgatagtcctcctggaagtgacaggaaaagggtccgaaggccttacaatacaaagacatataaggttgaactatcttttgcggcaaaaatccctatgagtgcaatctcacaggctttgaggggtcaggagtcagagcacactcaggaagcaattcgagtgattgacattattctgaggcagcactcagctaagcagggttgcctattagtaaggcaatcgttcttccacaataatccttccaattttgttgacctgggtggtggtgtagtgggatgtagagggttccattctagttttcgtgcaacccagagtggactttcactcaatatcgatgtgtccaccacaatgatagtgaaacctggtcctgtcattgactttctgattgccaatcagaaagttaatgatccaagcatgattgattgggcaaaggccaagcgctcactgaagaacttaaggataaaaacaagtccggcgaaccaagaacagaagattgttggtctcagcgacaggccttgccgtgagcaattattcacactgaaacataaaaatggtgaatctgaagagatcactgtttttgattactttgtaaagaaccgtggcataaagctggaatattctggtgatcttccttgtatcaatgtgggaaaaccaaagcgtccaacttattttccagttgagttatgcagtcttcttcctttgcaacggtacactaaagcattgagcacacttcaaagatcatcactcgttgagaaatctaggcagaaaccacaagaaaggatgtctgttttgtctgatgtgctgcaaagaagcaactatgatgcagaacccatgctgaaggcttgtgggattacaattgctagaaatttcatagaagttgatggtagggtactgcagccccctaagcttaaagctgggaacggagaagacatttttacgcgcaatggcagatggaatttcaataataagaagctcattagagctagcagtgtcgagaaatgggcagtagtaaacttttctgcacgatgcaatgtccgggatcttgtccgtgatctcatcaagtgtggaggcatgaagggcattatggttgatgcaccatttgctgtatttgatgagaatccttcaatgagacggtcacctgctgtaagaagggttgaagacatgtttgaacaagtgaaaactaagcttcctggagcacccaagtttcttttgtgtgttctagcggaaagaaagaattccgatatttatgggccttggaagaagaaatgccttgctgaatttgggatcgttacacagtgtgtggcaccaactagagtcaatgatcagtatcttacaaatgtcttgttaaagattaacgcaaagttgggtggcttgaattcgttgctccaaattgaaacatccccagcaattcctctcgtatccaaggtcccaactataatcttgggtatggacgtatcacacggatctcctggacattctgatataccgtctgttgctgctgttgttagttctcgtgaatggcctcttatctcaaaatacagagcatctgtccgcacccaatcaccaaaaatggaaatgattgactcgttgtttaagccacgggaaactgatgacgatggtctgattcgggagtgtctgattgacttctacaccagttcagggaagagaaagcccgaccaagtcatcatcttcagggacggtgttagtgaaagtcagtttaatcaggtgctgaacattgagttgcaacaaatcattgaggcttgcaaatttcttgatgagaaatggaatcccaagttcacattgatcattgcccagaagaatcaccacactaaatttttcattcctggaaagccagataatgttccagctggcactgttgttgacaacaaagtctgtcatccaaggaacttcgatttctacatgtgttcacatgctggaatgattggaactaccaggccaactcactatcacatcctgcatgacgagataggcttcaatcctgatgacctgcaggagctggtgcactcgctctcttatgtgtaccaaaggagcacaacagccatatcagttgttgctcccatctgctacgcccaccttgcagccgcccaggttgggcagttcataaagttcgacgagatgtcggagacttcatctagccatggggggcatacctcggcgggcagcgtccctgtacaggagctgccccgtctgcatgagaaagtgaggagctccatgttcttctgctgagcagcagggaatgtgtcccttggttttacctttttgggtgtatggtcgggggttctgaacccatgaacttgttgcctcacttggttccagcctcaggaagaactttgtaggatgctgaatggtaggatttttaagcatcgttgcagttgtgctgggtggcacgctgcaaccattttggctagcttgttgcagcacttggtgccttcctgagaggaagtagacttggaacctggtagcacgtccttaaaccatccttttaagcgttgctggttcggcctctgagctgtgtttgtcgtgc

SEQ ID NO: 622 - DNA, 2831 bp, Zea mays
  source 1..2831: mol_type = genomic DNA
gggcgctccattttggagatttcgcaacctctgcctcgttctgccatttttttttcttgcctgcaccaacgtcatctaaccagtcattagttggtgaaatcctccactcccctgcagaccacgtcagccttcaccttgccgtctccgttacgcgccgcgagcccgcgagcgtttggggagttttggagcggaggaggcaagggaggacggacagggaagtttggttgtggaaatggatgtggtggaatcctcgccgtcgtcgtcgccgatatcgtctccggccgggtcttcggagtccatagacctcaacttcctgccgttcctcaagagggagcccaagtcggagcccgcgtcaccagagctcgggcccctgccgctgcctgcgcccccaacccagacgccccagcagcagcatgcagcggctccggctcctgaggccacggcgcctctgtcgccagcgactcctgacctctcgtccgctccggtgatggcgccgctgcagtcgctgccgcctaacctggacgaggacgcgctccttcgggagtactaccgcctcgcgggcctctacctctcgtctgcgaggtccggggcgatcatcccagcgctagctccggaggcggccgcaccggcggtggtgcagtcggggtccgggtctgtcgtgaagaagcgccggccgcgttcgtcggacctcgtgcgggtctcctcgctcggcgtgcaggaccagatctacttccgcgacctcgtgcgcagggcgcgcatcactttcgaatgcctccgcgggcttctactcagggacgacgagcgcgccgagtccctcggccttgcggccgtcgccgggttcggcgttgccagggaccggcgccgcgtccgcgcggacctgcgtgccgcagcgctcatgggggaccacgacctctggctcaatcgcgaccgccgcatcgtcgggccgatgcccgggatctcggtgggtgacgctttcttcttccgcatggagctttgcgtgcttggactccatggccaggtgcaggccggaattgattatgtcagtgcagggaggtctgcatctggggagcctatagccacatctataattgtatctggtgggtatgaggatgatgatgatcacggcgatgtacttgtgtacactgggcatggcggccgtgatcccaacctccacaagcattgcgtcgatcagaagctggagggcggcaatcttgccctcgagcgcagcatggcttatggtattgagattcgtgtaatccgtgctgtcaagtcaagacgaagccctgttggtaaggtttacttctacgatggcctctacaaggttgttgactactggctcgaccgtgggaaatctgggtttggtgtttataagtatagactgctgcggattgagggccaagaacccatgggtagtgtgaattatcgagtagctgaacagcttaaggtggatgtgtttgctataaggccaacagggtatttgagctttgatatctccatgggccgtgataccttgtcagttgcactcttcaatgatgttgatgatgatcaggacccactcttattcgaatatctggcacgtccaatatttcctacctctgctgtccaggggaagtttgctgaaggtggtggtggtggttgtgattgtgctgagatttgctcaattggatgtaactgtgcagggaggaatggtggcgagtttgcatatgataggactggaaccctgctacgaggcaagccactggtatatgagtgtgggccatactgcagatgcccacctagttgccccaacagggttagtcagaaggggcttcaacataggcttgaggtattccggtcaagggagactgggtggggagttcggtctttggatctcattaaggctggcacattcatttgtgagttcagcgggattatccttactcaccagcagtcagaggttgtggcagcaaacggcgattgcttggtgcgtccaagtaggtttcctccaaggtggttggattggggtgatatatctgatgtctaccctgattatgtggcgccagaccatccttctattcctgagttaaaatttgcaattgatgtgtcaagggcaaggaatgtggcatgctatttcagccacagttgcagtccaaacgtgtttgtccagtttgtgctgtttgatcattacaatgtgtcttacccccacctcatgatctttgccatggaaaacattccaccgttgagggagctaagcattgactatgggatggttgacgaatggattggacagttaactatgtagctggagtatctatttagaaggcagtaatctccttcttttacctttatttttgaagttttcattatgcttcactttgggatcatcaagccaactgctggctaaaattcctcagctgtccagcagtggaggtttccaactagcataatgttcctctggcgttgaaagaggcttgcataaggtgaccaagctatcatcaacagaacatcagccgttcattgtatatgttgcctgataacctaggtgccttagccaattttctagatgatctcgcttttgaagtataatgtgtgctgctgtaggaagcttgtttggcgtggctggcgctgagtttcagccttaaccttcgtgttatgagttgtcgctgttggaactcattttctgtacatatatctgtaaattatctagctggaaatgtgcccgcttctgttgggaaatgttggtccatatgtggcaaagttatttggataccttgtggaattgaagattccgcggagccaggtttgtccgtaggtcattgcattaatgattttgtgaaattatttgtggtgaa

SEQ ID NO: 623 - DNA, 2495 bp, Zea mays
  source 1..2495: mol_type = genomic DNA
gctctattttggggagattttgcaacctctccctgactgcgccatttttttttctcgcctccaccaacgtcagctctccagtcaccagttggacaagcgggacgggacaacatcctcaccagccgcaatcctccactcctccccgcagccctcgaccctcgtcagcctctccagttcacctcgccgtctccgtcatgccccgcgagggtttggggaattttggagcggaggaggaggcgagggatggtggacaggaaggtttggttacggaaatggatgtggaggaatcctcgccgtcttcgtcgccgatgtcgtctccggccgggtcgtcagattccatagacctcaacttcctgccgtttctcaagagggagcccaaatcggagccgtcgtcaccagagctcgggcccctgccgctgcctgtctccctcacccagacgccgccgcagcagcatgcagcggcggcggctccagcaactgaggcctcggtgcctccgcctccggcgactcctgacctctcgtccgcgtcgatgatgaccccgctgcagtcgctgccgcctaacccagacgaggactcgctccttcgggagtactaccgccttgcgagactatatctctcgtctgcggggtccggggcgatcgtcccgacaccggcaccggaggcggccgcaccggcggtggtacagtccggggccgggtccgtcgtgaaaaagcgccggccgcggtcatcggagctcgtgcgggtctcctcgctcggtgtgcaggatcagatctacttccgcgacctcgtgcgccgggcgcgcatcactttcgagtgcctccgcgggctgctactcagggacgacgagcgtgctgagtccctcggcctcgctggtgccgccgggtttggcgttgccagggaccggcgccgcgcccgcgcagacatgcgtgccgcagcgctcatggcagaccacgacctctggctcaatcgcgaccgccgcatcgtggggccgatgcctgggatctcggttggtgacgctttcttcttccgcatggagctctgcgtgcttggcctccatggccaggtacaggcaggaattgattatgtcagtgcagggaggtcggcctctggggagcctatagccacatctataattgtatctggtgggtatgaggatgatgacgatcatggcgacgtacttgtgtacactgggcatggcggccgggatcccaacctccacaagcattgcgtcgatcagaagctggagggtggcaatcttgccctcgagcgcagcatggcttatggtattgagattcgtgtaatccgtgccgtcaaatcaagacgaagccctattggtaaggtatacttctatgatggcctctacaaagttgttgactactggctcgaccgtgggaaatctgggtttggtgtttataagtataaaatgctgcgcattgagggccaagaacccatgggtactgtgaattatcgagcagctgaacaacttaaggtggatgtgtttgctgtaaggccaacaggttatttcagctttgatatctccatgggccgagagaccttgccagttgcactctataatgatgttgacgatgatcaggacccactcttatttgagtatctaacacggccaatttttcctacctctgctgtccaggggaaatttgctgagggtggtggtggtggtggttgtgattgtgctgagatttgctcaattggatgtaactgtgcaggaaggaatggtggcgagtttgcatataataagactggaaccctgctacgaggcaagccactagtatatgagtgtgggccatattgcaggtgcccacctagttgtcctaacagggttagtcagaaggggcttcaacataggcttgaggtattccggtcaagggagactgggtggggagttcgttctttggatctcattaaggctggcacattcatttgtgagttcagtgggattgtccttactcaccagcagtcagaggtcatggcagcgaatggtgattgcttggtgcgtccaaataggttccctccaaggtggttggattggggtgatatatctgatgtgtaccctgattatgtggcgccagaccatcctgttattcctgagttaaactttgcaattgacgtgtcaagggcaaggaatgtggcatgctatttcagccacagttgcagtccaaacgtgtttatccagtttgtgctgtttgatcattacaatgtgtcttacccccacctaatgatctttgccatggaaaacattccaccattgagggaactaagcatcgactatgggatggttgatgaatggactggacaattaaccatgtagctggagtaacctatttaaaaggcagtgttctctttctttcttttccctttatttttggaattctcataatgcttcacctggggatcatcaagccaactggactaaaattcctcagctggtaattctccttattcctcatgtgctatttttctttgggtacttcat

SEQ ID NO: 624 - DNA, 2246 bp, Zea mays
  source 1..2246: mol_type = genomic DNA
accactcaccacagtctccagtctccactgcatctaaaaaaaaacgtaaaacccccaccacgccgtagcggagagaagagaagagaggagcgcgcgatcgatgtcgggctccggcgatcgtcgcggcggcggtcctccgggttcccatagtggctgggaaaccatggggaagaagtcgaagaaacccgggcaagccggggggagacagtgggcaccatggagttccacaaatgtgacacctaacacagcaaggccagcatggggtggcagtggttcctcgcacccttctggaaccagctgggctcaagctccagatcatggtgctgctaccagaggcaatcctagaccgccatcacaaacatcgcgccctgttctggctccacctctggcaaatggttggcagtggcaatccaggcctcgcccatctggatctgaagtcaagaaggatgatgctcctccatctggttctgtccctgaggtggagaatgttgatggcaacaatacatcagatgatgatgatgatgatgacgatgatttgagtgatgatatcagtgatgactatgattctgacgcaagtgagaaaagttttgagactcgaaaaacgaacaagtggttcaaagagttctttgaagtattgaatacattgagtttggaacaaattaatgaacaaactcggcaatggcattgcccggcatgcaaaaatggacctggggcgattgactggtacaaagggctgcagcctttagtgagtcatgctagaacaaagggttctacaagggttaaacttcacagggaattggctgcattgctggaagaggagctttctcgcaggggaacttcagtgttaccagcgggtgaacaatttgggaaatggaaaggactgcaagaaagcactgatcgtgagatagtgtggccaccaatggttattgttatgaataccttcttggaaaaagatgaagatgataagtggaagggcatgggaaaccaagagctccttgattattttggagaatatgaagcaagtaaagcacgtcatgcctatggtccctctgggcaccgtggtatgagcgtgttaatatttgaaagctcagctgtgggctacatggaagctgaacgtctgcataaacactttgttaatcaaggtacagacaggaattcatggcacctacgcaaggttcgatttgtgcctggtgggaaaaggcaactatatggtttcttagcaaacaaagaggatatggaggcatttaacaagcattgccatggtaaaagccgtctgaagtatgagatgaggtcttacaatgagatggtggtgattcaaatgaaacagatgagtgaagacaaccaacaactgaattacctgaagaacaagatggttaagacagagcagcgatctaaagcagtagaagaatcattgggtgttgttacccagaagctacgtgagactattgaagaaaatatatttgttaggagtaaagcaaaagagaagcacatggagtacgaggaagagatgaagtcccaggaggaaatttttcatggtctaattgaggatattcacaaggccacagaggataaagaaaagcagtttgagaagttgttgcaggaagagcgctcaaaggccagacgctttgatgttgattctggaactatgaaagatcgtcagctaaggaaggaatatgtgcagaagttcattgattgccaagtcaaggatgtggcagagtttgaagttgagcgagatgagctgatcaaagtccacgaggacaagaagttgaagctcaagaaagaatacatggatctggagctggagctggagaaggagtttgacgcagccctgacgggcctgatggagaagcataagccagataccttcgaggcctccagctcgtaagggggcttcagcggctaagcgctttccttaggccccagctaagcttggagcagtctcgtacatgctcctgcttgcttatccatgaaataatgcctggacagtctgtagatgttgcgaaaacatggtgccccctgtggttgccgcgtgtgtagtaagtatctctcagtcgtagtgtggttgaagcatctgaactcttgagcggtttgcctgtgatggcatatgggtcaaactacaactggagtgtgatatctagtttatatggtccagcgctcttgttgactgcgggtggtggtttgccccggataatttactgattatgtctgctccgatcgtcaaagtgcctctttctgttttttttctt

SEQ ID NO: 625 - DNA, 2863 bp, Zea mays
  source 1..2863: mol_type = genomic DNA
gctatctcctccagcatccacccaacggatccgcggcaaccgaccacccatgggatcgctccggggcgcggcagcctcctccgcggcgccgcgcgcgggcgacctggtgaccacgcaggttagccttggtggatttgatgccaccgtcaaggcgctcgatctcgccgacttcctcgagttgaatgcgggctcggtctggcgctgccgcctcaagacctcctggactccgccggacgcctatcccgacttccttctccccaccgtcacctccgccgccgcgccgccgccacagtacgatcgcgtgcctccgcacgccttcgtccactttgcgcgcccggagggcgcgcgcgccgccgccgacgcagcgggccgatccgagctcatcctctccggcaaacccctgcgcgccgcctccgcacaggacagctcccttcgggcatcccgccgccgtagtgtctcgccattccgcttccctggctcgcgcctcgaggtcggggatctcccggcctcggacgccttcatcgccgcctggcgcggcccggcctctgggctcgagttctccgtcgacccgttcgacgggtcttgccacttcatcttcgcccgcgacaccgctttcaaagtccgggagttccgcgagtctgtggtgatgcgctgcgacgtcaagctccagttccccgtccgcgatgttgcggaagtcagggtgttccggctcgactgctcgctgctgatccggctatcggccgcaccgctggtctgttaccgcacggcggatgacgacatccacgtgtccgtgccgttcgacctgctcgacgacgatgacccgtggatacggaccacggacatcactccaagtggtgcgattgggcggtgcggtgcgtatagaatcacattctcgccgcggttctggccaaagatggaacgcgcgctgacgtacatgagggataggagggtggcgatccttgattgcgttggagggtggggggccaggagggggctcaccgtgcgtgatgagcctgagtttggggagcggatgcaggacctgttcttctgcgtgcagcacgccgagggtctcaagtttccggtgttgttcctcgtgaatgctctggtgcacaagggagtaataagtcaacaccacctcacgcctgaattcttcggtttgctccagaggaaggaggatgatgtgaatgtggctgccttgagggaattttggggggacaaatttccagtttttgatgcatgtgggaggctgaagaatctgcaggatagggttgccaggtacctgaaacatcttcgcaacaagattggggatgtcaattctgaggtgaggaggctggtaatcacgcccaccaaggcttattgcatgccaccagaagtggagcgctctaatcgcgtcatccggcattatagtgaagtctcagaccggtttctgagggttacttttatggatgagagaatgcagatgctcaacagtaatgtgctgaatttctctgctgcacaaatcgtcaaagatttgatgtcaaactcgttcctgcataagacaacagtgtacaagcgtgttaaaacgtttttgacagagggattccacatgtgtggcaggaagtactcgtttcttgcattctcatctaaccagctgagggacaggtcagcatggttcttcgcagaggacagaacgacaacagtggaaaccattaggaaatggatggggcggttcacaagtaagaatgtagcaaagcatgccgctcggatggggcagtgcttctcctctacatatgctacggtggtgctgcagccgcatgaggtaaatgagtgtcttgatgaagttgaacataacgggtacattttctctgatggaattggcaagattacgtgcgaccttgcactcgaagttgctcagaagctgcaattgacagataatcccccatctgcttaccagattaggtatgcaggcttcaagggtgttatatctgtctgggaaggaaaaaatgatgggatacgactttccctgaggccgagcatgcacaagtttgagtctaaccatactgtgttagaggtggtctcgtggacaaagtttcagccaggattcttaaatcgtcagattattacattactgtcctccttgaatgtcccggatgctatctttgctcaaatgcaggaagccatgttatctaatctcaacaatattttgtcagactctgatgttgcttttgacattgtaaccgcctcttgtgctgagcaaggaaccactgcagcactgatgttgagtgctggcatttcacctggaactgagccacacctgaaagcaatgctgttagctataaggtcctcacagctgctaggtcttttggagaagacaaggatttttgtgcccaagggaaggtggttgatgggctgccttgatgaacttgggatccttgagcaagggcagtgctttatccgggcatcatctccatcactcaataattgtctggtgaagtatggatcaagattgtctgcagcaaacacaaatgcagagaccattctgggtactatcgtaatggcaaagaatccatgccttcatccaggggatgtccgaatccttgaagctgttgatgtgcctgaactgcatcaccttgttgattgcttggtcttccccaagaaaggtgagaggccgcacgcgaatgaagcatctgggagtgatcttgatggggatctatacttcgtaacatgggatgaaaaccttataccacctggtaaaaagagttggaaccctatggactactccccagctgaagcaaaacaactgccacgcgcagtatcccaacatttttggactatgtctttatatggttatatcgtcttctactccctccagtctggtttctaa

SEQ ID NO: 626 - DNA, 5706 bp, Zea mays
  source 1..5706: mol_type = genomic DNA
atggaggtttctcaccggggaagaagaccctcgccggagccgaggagaaatccgtcgattgccggagatttggggatccaatcgatgaaccgaacgcgctgcgacgaagccttcgacgagacgaacgcagcgcatccccatcacgaacgtcggcggactgccggacgccgtccgccgggacacaacttagccgaggagtggccgacgggcccggcgacgcgggcgatcctgaccggcttcgacgccggcctctcggcgcgtggcctcgccgacgagttggagcgcttggcaggcaccgtctggcgctgcaggatcaagacttccgtcacgccgcccgagtcctacccggacttccagctctcagtccacgccgccgccgccgccgccgtgttccaccaggacgagccgccgcgggacggtcgcgtggcccctcatgccttcgtccacttcgagcaccgcaatgccgcggaccgcgctggcgacttcttcacgacgcgcatcctcgcgcagagcagacacatgctacatggccatgcggcgcgccggcgggatggtgtcaccgacgccgccaaaccgatgctcttccccaactcgtgcatcgagatcggcgacgtcgtggcgccggacaccttcctcgtcgcgtggcgcgggaccgacgacagcgcctcggcgctcgacttcgtggtggacccgtctggcggcagctgccggctgctgttcgcccgctacaccgccttcacgtgccccgacaggcgccggcccgcggcgctgctgtgctgcgacgtgaagctcgagttcgcgctcgcccacgtcgccgaggccctggcgttccaggccgacgactcgctggtcctccggctctccgccgcgcccctcgtgtactaccgcacgtcgggcgacgacgtccacggccgcgtgcccttccaactcgtcgacgccgacgacgacccgtggatacggaccaccgacgtgacccggagcggcgccatcggccggtgcttggcgtacagggtctccttcgcggtgcagttctggccgacgatgagggtcgcgctggagtgcatgcagaggcagggggtccccgtccacgtacgcgacagacggtgccggggcttcaccgtgctcgaggaggcaggcttggtgcagccgatgcgggacgcgttcttctccccgcggcacgacgacgacgcaggggcagggctacggttcccggtgctgtacttggtcaacgtgctgatgcacaacggggtagtcaatccgcaccagatgacaccggagttcttcggtttgctgatgaggacacgcgaagatgtgaacgttgctgcgctgacggaactgttcggtgcaaagcttggagtctgtgataatccatgctggagggaatactgtatgccggtggagcgctccaaccgcgtcatccggcattaccacgagctgtcagatcgcttcttgagggttacttttacggacgagggtatgctgccgctgaaccctaacgcgctgaccctccgtgcggtgccctcgacgtcgacgcccagcacatcccggcagatgacaagcgtctacaggcgtgtccagacggccctgacggaggggctcatcatgtgtggcaggaggtactcgttcctcgcgttctcagccagccagctgaagcagaagtcggcctggttcttcgcggaggacggagcgacaacggtggcaggcataaaggagtggatggggcagttcccgatcaggaaccccgcgaagcacgccgctcggatggggctgtgcttcacgtcttcctacgcgacggtgacgatgcagcccggcgaggtggacgaggacctcgaggacgttacgcgcaacgggtacaacttctccgacgggatcggggtgatcacggaggacctcgcgctggaggtcgccgagatgctgccgctggcggacaggttcgccccgtccgcgtaccagatcagaagagaggtattcgaggagacgagagtagcgatggcgcgcagccgtactcgcagccccgagtcgactcgtcgtcttgctcatcgccttcgcgctatcaagccatccaagtccaaccaacagcatccccatcacgaacgtcggcggactgccggacgccgtccgccgggacacaacttcgccgaggagtggccgacgggcccggcgacgcgggcgatcctgaccggcttcgacgccggcctctcggcgcgtggcctcgccgacgagttggagcgcttggcaggcaccgtctggcgctgcaggatcaagacttccgtcacgccgcccgagtcctacccggacttccagctctcagtccacgccgccgccgccgccgccgtgttccaccaggacgagccgccgcgggacggtcgcgtggcccctcatgccttcgtccacttcgagcaccgcaatgccgcggaccgcgctggcgacttcttcacgacgcgcatcctcgcgcagagcagacacctgctacatggccatgcggcgcgccggcgggatggtgtcaccgacgccgccaaaccgatgctcttccccgactcgcgcatcgagatcggcgacgtcgtggcgccggacaccttcctcgtcgcgtggcgcgggaccgacgacagcgcctcggcgctcgacttcgtggtcgacccgtccggcggcagctgccggctgctgttcgcccgctacaccgccttcacgtgccccgacaggcgccggcccgcggcgctgctgtgctgcgacgtgaagctcgagttcgcgctcgcccacgtcgccgaggccctggcgttccaggccgacgactcgctggtcctgcggctctccgccgcgcccctcgtgtactaccgcacgtcgggcgacgacgtccacggccgcgtgcccttccaactcgtcgacgccgacgacgacccgtggatacggaccaccgacgtgacccggagcggcgccatcggccggtgcttggcgtacagggtctccttcgcggtgcagttctggccgacgatgagggtcgcgctggagtgcatgcagaggcagggggtccccgtccacgtacgcgacagacggtgccagggtttcaccgtgctcgaggaggcaggcttggtgcagccgatgcgggacgcgttcttctccccgcggcacgacgacgacgcaggggcagggctacggttcccggagctgtacttggtcaacgtgctgatgcacaacggggtagtcaatccgcaccagatgacaccggagttcttcggtttgctgatgaggacacgcgaagatgtgaacgttgctgcgctgacggaactgttcggtgcaaagcttggagtctgtgataatccatgctggaggttgaagaacgcgcaggacaaggctgccaagaatctcgatcttgtctgtcgcagcagcagcagcagaagaaaggctagtgattgcgatgctgaggtgcgaaggctgatcgtcactccaaccagggaatactgtatgccgcctcaagtggagcgctccaaccgcgtcatccggcattaccacgagctgtcagatcgcttcttgagggttacttttacggacgagggtatgctgccgctgaaccctaacgcgctgaccctccgtgcggtgccctcgacgtcgacgcccagcacgtcccggcagatgacaagcgtctacaggcgtgtccagacggccctgacggaggggctcatcatgtgtggcaggaggtactcgttcctcgcgttctcagccagccagctgaagcagaagtcggcctggttcttcgcggaggacggagcgacaacggtggcaggcataaaggagtggatggggcagttcccgatcaggaaccccgcgaagcacgccgctcggatggggctgtgcttcacgtcttcgtatgcgacggtgacgatgcagcccggcgaggtggacgaggacctcgaggacgttacgcgcaacgggtacaacttctccgacgggatcggggtgatcacggaggacctcgcgctggaggtcgccgagatgctgccgctggcggacaggttcgccccgtccgcgtaccagatcaggtacgcggggttcaagggcgtcgtggctgtctcgccgccggggccgggacaagaagaccgtgggacgcggaggatgtcgcttcggcccagcatgaggaagttcgagtccacgcacaacgtgctggaagtggtgtcctggaccaagttccagccagcgttcttgaaccgccagatcataacgctgctcaccaccctgggcgttcccgacgactccttctggcagctgcaggaagcgatgctaggcaagctcaggcgggttttgtcggacagcgatgtggcgtacgaggtcgtgaccaactcttgccctgagcaaggaagcaccgcagggctgatgctgggcgctggcttcgctcctgcgactgagccacacctgagagcgatgctactggccatctgcacctcgcagatgcagggccttctgaacaaaacgtggatctttgtgcccaagggaaggtggctgatgggctgtctcgacgagtttgggatccttgaacaggggcagtgctttctccgggtctcgacgccatcactcggcagccgctgcgtgaaccgttctccgatatttccctcggaatataagggcgatgccaatgcacaggtgattactggtacggttgtgatggcgaagaacccatgccttcatccaggggacgttcgtatccttgaagctgtggatgtccctgatctgtatcaccttgtcgactgcttcgtcttccccaagaaaggtgagaggccacacgccgacgaagcttccgggagcgacctcgacggcgacgtctacttcgtgacgtgggacgagagccttgtacctcctgggaggaagagctgcaccccgatggactactccccggctaaaacaaagcaacttccacacgacgtacaccaacaagataccattgatttctacttggagagcatggtatacgacaaccttggtcgaatatgcaacgcccatgctgctcatgctgatcggagcgacgacggagctatggatcccaagtgcattgagttagctcggctcgcatctatcgccgtggactccgccaagaccggggaaattgtgagaatgccaccagccctttcaccaaaagagtaccccgacttcatggggaaggaggacgccatctcttacagatccgaaaagatccttggaaggctctatcggtcagtcctaggggaaaatgacggcgattttctgtcacgaggcgcatgcatttcagatgagattcgatatgacgccgatctagaagtccctggcgcctcagactttcttcaggatgcttggcgatgcaggtgcctgtacgaagctcggctgaatgccctgctcgatcaatacaatgtgcgcagtgaggctgagctcgtgacaggggagatatggtcacttgccggatgcagcaagaagtatcagcatcaattaaaagagaggatcaactatgcgtactccaaagtccaccaagagttccggatcatctttgagagcattggtgcctctactgacaacaaaaacctggcgtatgagatgaaggcgtccgcgtggtaccaagtaacgtatcaccctgaaatcatccgatcaagggagcctggtgatgaggatgcacctacgagacttagctttgcatggatcgcagttgattacttggcacaaataaagatgaagcgccacgtagactag

SEQ ID NO: 627 - DNA, 3726 bp, Zea mays
  source 1..3726: mol_type = genomic DNA
atggcgcgcagccgtactcgcagccccgagtcgactcgccgtcttgctcatcgccttcgcgctatcaagccatccaagtccaaccaacagcatccccatcacgaacgtcggcggactgccggactccgtccgccgggacacaacttcgccgaggagtggccgacggggccagcgacgcgggcgatcctgaccggcttcgacgccggcctctcggcgcgtggcctcgccgacgagttggagcgcgtggcaggcaccgtctggcgctgcaggatcaagacttccgtcacaccgcccgagtcctacccggacttccagctctcagtccacaccgccgccgccgccgtattccaccaggaccaggacgagccgccgcgggacggtcgcgtggcccctcatgccttcgtccacttcgagcaccgcaatgccgcggaccgcgctggcgacttcttcacgacgcgcatcctcgcgcagagcagacacctggtacatggccatgcggcgcgccggcgggatggtgtcaccgacgccgccaaaccgatgctcttccccgactcgcgcatcgagatcggcgacgtcgtggcgccggacaccttcctcgtcgcgtggcgcgggaccgacgacagcgcctcggcgctcgacttcgtggtggacccgtctggcggcagctgccggctgctgttcgcccgctacaccgccttcacgtgccccgacaggcgccggcccgcggcgctgctgtgctgcgacgtgaagctcgaattcgcgctcgcccacgtcaccgaggccctggcgttccaggccgacgactcgctggtcctccggctctccgccgcgcccctcgtgtactaccgcacgtcgggcgacgacgtccacggccgcgtgcccttccaactcgtcgacgccgacgacgacccgtggatacggaccaccgacgtgacccagagcggcgccatcggccggtgcttggcgtacagggtctccttcgcggtgcagttctggccgacgatgagggtcgcgctggagtgcatgcagaggcagggggtccccgtccacgtacgcgacagacggtgtcggggcttcaccgtgctcgaggaggcaggcttggtgcagccgatgcgggacgcgttcttctccccgcggcacgagcacgacgacgacgcagggctacggttcccggagctatacttggtcaacgtgctgatgcacaacggggtagtcaatccgcaccagatgacaccggagttcttcggtttgctgatgaggacacgcgaagatgtgaacgttgctgcgctgacggaactgttcggtgcaaagcttggagtctgtgataatccatgctggaggttgaagaacgcgcaggacagggctgccaagaatctcgatcttgtctgtcgcagcagcagcagcagcagaagaagaaaggctagtgattgcgatgctgaggtccgaaggctgatcgtcactccaactagggaatactgtataccgcctcaagtggagcgctccaaccgcgtcatccgacattaccacgagctgtcagatcgcttcttaagggttacttttacggacgagggtatgctgccgctgaaccctaacgcgctgaccctccgtgcggtgccctcgacgtcgacgcccagcacgtcccggcagatgacaagcgtctacaggcgtgtccagacggccctgacggaggggctcatcatgtgtggcaggaggtactcgttcctcgcgttctcagccagccagctgaagcagaagtcggcctggttcttcgcggaggacggagcgacaacggtggcaggcataaaggagtggatggggcagttcccgatcaggaaccccgcgaagcacgccgctcggatggggctgtgcttcacgtcttcctacgcgacggtgacgatgcagcccggcgaggtggacgaggacctcgaggacgttacgcgcaacgggtacaacttctccgacgggatcggggtgatcacggaggacctcgcgctggaggtcgccgagatgctgccgctggcggacaggttcgccccttccgcgtaccagatcaggtacgcggggttcaagggcgtcgtggctgtctggccgccggggccgggacaagaagaccgtgggacgcggaggatgtcgcttcggcccagcatgaggaagttcgagtccacgcacaccgtgctggaagtggtgtcctggaccaagttccagccagcgttcttgaaccgccagatcataacgctgctcaccaccctgggcgttcccgacgacgccttctggcagctgcaggaagcgatgctaggcaagctcaggcgggttttgtcagacagcgatgtggcgtacgaggtcgtgatcaactcttgccctgagcaaggaagcaccgcagggctgatgctgggcgctggcttcgctcctgcgactgagccacacctgagagcgatgctactggccatctgcacctcgcagatgcagggccttctcaacaaaacgtggatctttgtgcccaagggaaggtggctgatgggctgtctcgacgagtttgggatccttgagcaggggcagtgctttctccgggtctcgacgccatcagtcggcagccgctgcgtgaaccgttctccgatatttccctcggagtataagggcgatgccgatgcacaggtgattactggtacggttgtgatggcgaagaacccatgccttcatccaggggacgtccgtatccttgaagctgtggatgtccctgatctgtatcaccttgtcgactgcttcgtcttccccaagaaaggtgagaggccacacgccgacgaagcttccgggagcgacctcgacggcgacgtctacttcgtgacgtgggacgagagccttgtacctcccgggaggaagagctgcaccccgatggactactccccggctaaaacaaagcaacttccacgcgacgtacaccaacaagataccattgatttctacttggagagcatggtatacgacaaccttggtcgaatatgcaacgcccatgctgctcatgctgatcggagcgacgacggagcgatggatcccaagtgcatcgagttggctcggctcgcatctatcgccgtggactccgccaagaccggggaaattgtaagaatgccaccagccctttcgccaaaagagtaccccgacttcatggggaaggaggacgccatctcttacagatccgaaaagatccttgggaggctctaccggtcagtcctaggggaaaatgacggcgattttctgtcacgagatgcatgcatttcagatgagattcgatacgacgccgacctagaagtccttggcgcctcagactttcttcaggatgcttggcgatgcaggtgcctgtacgaagcccgactgaatgccctgctcgatcaatacgatgtgtgcagtgaggctgagctcgtgacaggggagatatggtcacttgctggatgcagcaagaagtatcatcatcaattaaaagagaggatcaactatgcgtactccaatctccaccaagagttccggagcatctttgagagcattgatgcctctactgacaacaaaaacctggcgtatgagatgaaggcgtccgcgtggtaccaagtaacgtatcaccctgaaatcatccgatcaagggagcctggtgatgaggatgcacctacgagacttagctttgcatggatcgcagttgattacttggcacaaataaagatgaagcgccacgtagactag

SEQ ID NO: 628 - DNA, 3644 bp, Zea mays
  source 1..3644: mol_type = genomic DNA
ccgtgacatcgccgggatcccgcccggacctcacccggcgatatgtcgacggcggctcccgcgccgggctccacggccacggtgcgggtatccaacatcccggcctcggccatcgccgcagagctgctcgccttctttgactccgccgtcaccatcgctggcgcgaccttcgcctgcgagatagtcgccgctcaccgcggctggctcagccgcggccacggtttcgtccagtttgattcctccgccgccgccacccacgccatcgacctcgcctcctctggccgcctgccccccttcctcggctcctgcctatccgtctcccccgcccgcgctgacctcctgccccgcgcgcccgacctctccctccgcgctgccagcgcgagcctcattctaggcaaccgcgtcgccgagcgcgagctggaggtggcctactcctgcgacggcgtgcgggccgaggtcatcccgaggatgcggcgtgtggacctctacctgaagcacgattcccagagctacaagcttgaggttctctttgaggacatcaatgagtgctttgggtgccacctcgatgggacgggcgccatcttgctgcagctgacttatgcaccaagaatacacattgcaatttctgggtctacagttaaatcaaggtttacagatgatcgctttcatgcatgcaaggaggacgccaaatttgcatgggtcagagcactagatttcacacctaatagctcttttggcgagtgttccactcttgtcctgaaactgagcaaaggtgcatcagtatcatatattcttgaaagtttacccttctcaggagaattaggggaattggccattgcttcgatggatgtgtttggctcctcctccaatgtggttcctcttgttgactgcccaaatggcttttctgtgccttatgaagtactttttcgtctgaactctcttgttcacatggggaagctagttgccaggcatgttaatgctgatctgtttaaagtccttgaagatctgtcaatcgatactttaaggagaatatttgagaaaatgagcaaattaaaatctacctgctatgaacctttgcaattcatcagacatgaggctcatagcatgaatatgagaaagaaagccttgtccaacaagagggagagtggaaaattgatgaggtgttacagaattcacatcacaccatcaaaaatatactgcttggggcctgaggaagaagtttcaaattacgtggttaagtaccattctgagtatgcttctgactttgctcgagttacttttgttgatgaagattggagcaagctttctcccaatgcattgtcagctagaactgaacaaggtttcttttctaaacccttgaaaactggcctgtatcatcgtattctctccattctaaaagaaggattttgcattggccccaaaaaatatgaatttttggccttttcagcaagtcagcttcgtggtaattctgtttggatgtttgcttcaaatagttctctgactgctgagaatataaggaggtggatgggccactttgaagatatccgttcagtctccaagtgtgcagctagaatgggccaactgtttagctcatccaggcaaacatttgaagtctcatcatatgatgtagaagtaattccagatattgaagtcacaactgatggcactaaatacatattttcagatggtatcgggaagatttctactagatttgccagacaagtcgccaaattaattggcttagacccagctcatcctccttctgcttttcaaataaggtatgggggctataaaggagtcatcactattgaccctacatcctttttcaatctttctctgcgacctagtatgaagaagtttgaatcgaagagcactatgctgaacattacaaattggagtaagtctcagccatgttatgtgaaccgtgaaattatctctcttctttcaacattggggataaaggatgaagtatttgaatcgatgcaacaagatgacatgcacgaatcagatggaatgctaacaaataaagaagctgctttgtctgtcctagggaaaattggtggcggtgataccaagacggcagctgatatgcttctgcaaggctatgaaccaagttcagagccttacctattaatgattcttaaagcccatcgggctaataggctgaccgacataagaactcggtgtaagattcatgtccagaaaggccgtgttcttattggttgtttggatgaaacttgcaaattagagtatggccaagtttacatcagaattacaaagaatcacaaggagcagaagtacagtgaacagccgttcttttgcaacgatgatggcaaaacagctgtaattgtaggaaaagttgcaatcacaaaaaacccttgtctccatcctggtgatgtcagagtacttgaagctgtatatgaccctggattggatgctaggggtcttattgattgtgttgtatttcctcagagaggggaaaggcctcatccgaatgaatgctccgggggcgatttggatggcgacctcttctttattacttgggatgacaaactgattccggagaaggttgatgcacctatggactacactgcaacgaggccacgcataatggaccatgctgttacacttgaggaaattcagaagcacttcgtcagttacatgataaacgataccctcggtgccatctccaccgcccacttgatccacgcagaccgtgatccactgaaagctcgcagccccgagtgcgtccagctggccgctctgcactccatggcggtcgacttcgccaagacgggagctccagccgagatgcccctggcgctgaggccccgggagtttccggacttcatggaacggtgggagaggccaatgtacgtctccaacggcgtcctcggcaagctctaccgcgctgccctgcggcacgaggaggacgcagaagcgctcctgcctgcgggcccaccgagctgcgtgtacgacccggacctcgaggtcgccggtttcgacgagttcctggacgcagcggaggagcggtacgaggcgtacgccgagaggctgggcgccctgatgacctactactcggcggagcgcgaggacgagattctgacaggcaacatccggaacaagctggtgtacctgcggcgggacaacaagcgctacttcgagatgaaggaccgcatcatcgccgccgtcgacgcgctgcacgcggaggtgagggggtggctcagggcgtgcaaggaggacgacgcgtcgagggtggcgtcggcgtggtaccacgtgacctaccacccggaccgccgcggggagaagcggttctggagcttcccgtggatcatctgcgacaccctgctggccatcaaggcggcgcgcaggtgccggaagcgggtggaagacgccgccgtgcccatggactgcgacggttcctagacggaggtgccactgtggcagtgaagtgagcctgtgatgcgagtggaaactgtagtaataagatgcagtaccgctgagcgctgattgctgtaaaaagaagttagcgcgggttgtcttgagctcctcctaacaggcgtacgtatggtggaaccgtggaatcatgatttgccgcccttgctgatgactagaagcaggtacggttagctaagccgttacgt

SEQ ID NO: 629 - DNA, 4940 bp, Zea mays
  source 1..4940: mol_type = genomic DNA
gtgatacttgataggctataagctgctagtgcttgtggaatggaagagccacagaaggacagtgggcaaccatcaaaaagttctgattctgagctagaagctatggtattggatgataatggagcgggaaaatcccatagtatggaggaaaacagggattctcctatagatgtcgatggtgggcagtcatctatggatgtggatatcaagggaaaatcatccctcagtgatgatgttaatggaaagtcttcttccgagccatattccaatgctccaattgacatgagtgtcgaaagcctagagaagttttgcaaagaagcgtcaaggtccttctttgatgaagttggtctgattagccatcagataaattcctacaatgagtttgtctcgcatgggctccaggagctttttgattcgcttggggaagtgattgttgaacctggctatgatccttcgaagaaaggatcaggtggctggaagcatgccatcatcaagtttgggagagtgaagcttgaaaagcctgtgttttggactggcaaggatgaaggttctgttgattttaaaccttggcatgctcgtctccagaatatgacatatgcttcaagacttatagtagaagtgactattcaggtttattctttggagaaaagtgacaaatctaaaacagggaatgatggttttgttcaaaaaaggaacttcatgaatgaaactcattggatatttattggcctccttccggttatggtcaaatcaaacttatgtttgctgcatagcctcaacgaaagtgagtgcctgttcgacgcaggtggatactttttggtcaagggaatggagaaggtattcattgctcaagagcaaagatgtctaaggaggctttggattagtgaccgaccttgctggactatctcttttatgtctgaaatcaagcgtagacgtatatatattaaactagttgaatctacaaggagtgaagatttcagtgagagcaaaatcattaccatttcctttttgtatgcgacaatgccagtttggttgttgttctttgcacttggaatatcatcagataaggaagtgtttgatatgatagatatgcaagattgtgatgcttctgttatcaacacgatatctgcaactatcaaagaatctgataaactgtgtgaagacttccgtaaatcagataaagctcgtcaatatgttgatgagttggtaaaaagttcgagatttcctccagcggagtcctttgatgactatattgctaggtttctctttcctgatattagtggaaatagaaacaaagcacttttcttagggtacatggttaaatgtctgctaatggcttttactgggaagcgtaaatgtgataataaggatgatttcaggaacaaaaggctggacctacctggtgaattgcttggaagggaacttagggcacagcttaggctggcagagaaacgcatggttaaggccatccaaagagatttgaatagtgaccgtgagttacaagatcttgaacgttatatagatgcatcaattgttactaatggtctaaatcgtgccttttccactggttcttggtgccatccgtacaaaagagctgaacgatgctcaggaattgttgcgactctaaggagaactaatcctcttcaaatgatgtctgacttgaggaaaacccggcagcgggttgcttacgctgggaaagctggtgatgcaagatatccgaatccatcctattggggaaagctatgctttatgtccactccggatggtgaaaactgtggacttgtaaaaaatctagctgttactgctattgttagctcaagggtgatgcagcccttgattgagagcttcatttcttgtggaatgagtaagctgaatgacattcctactgaacacattcaaagaatggataagatctttttgaatggcaattgggtgggatcttgtgaaaattcagcttcatttgtatttcgattgaggtgcatgagacgcagcagtctgattgatcctcaggttgaaattaaaagggacaagcaccacaatgaggttcgcgtgtttactgatgcagggcgaatcctcagaccccttcttgtggttgagaatctgaataaaatcagaaaacctaaggggcgctcattctctttccatgaattaatgcaacaagaaataattgagttcattggtgttgaagaggaggaagatatacaatgtgcgtggggaatcaggcatttgtttgagagtgaaggtgcgatatctagttatactcactgtgaactggatccttcctttcttctgggattaagctgtggtatcattccttttgcaaaccacaattttgctcggagggtattgtaccaatctgaaaaacactcgcaacaagctattgggtactcaacgacaaatccacacatcagagttgatactctttctcatcaactatattatcctcagaggcctcttttcaaaacagttatagccgactgtcttggcagatcagattatgcttcttttggaagaaaaaatgatttcgcgagaccagaatattttaatggacaaaatgcaattgtagcagtcaatgttcatcaggggtttaaccaagaggattccctggttatgaatagggcttctcttgaacgaggtatgtttaggactgaacacctcaggagctataaggcagatgtagaaaacaaggatggaaccaaacgactgaaattgaaggaaaaaatagactttggaaaaacagaaagcaaaagaggacgtgttgacaatcttgatgatgatggcttaccttacgttggtgcaagtcttcagaccaatgacattgttattggcaaagtctcagaatctggagaagaccacagtattaagctgaagcatacagaaaagggaatggttcagaaagtattgctttcagcaaatgatgaagggaagaattttgctgtggttactctaagacaggttcggacaccttgccttggagataagttttccagcatgcatggccaaaaaggtgttgttggttttctagaatctcaagagaacttcccatttactcacgaaggtatagtcccggatattgtgataaatccacatgccttcccaacacgtcaaactcccggacagctgcttgaagctgctctggggaagggaatagcttgcaaaggtacaatgagatatgcaacaccattcaccacagcatcagttgacgttattgcagaacagttgcacagggctggttattcacgatggggatctgagaacgttctaaatgggcgaacaggtgaaagagtgcaatccttggttttcatgggccctaccttttaccagaggctgattcatatgtccgaagataaggtgaaattccgtaacactgggccggtgcaccccctcacgaggcagcctgttgccgacaggaaaaggtttggtggagttaagtttggagaaatggagcgtgactgcctcctcgcccatgggtcagctgccaacctgcatgaacgcctcttcctgcttagtgacttctcccagatgcacatctgccagacatgcgagcgcgtggctaatgttgtcatgaggtctgtccccggaggcaagaagatccgtggcccctactgcggcttctgcaagtcttcggagaacatagtgagaatcaatgtgccctatggcgcgaagctgctctaccaggaactcttcagcatggggatctgcctcaagtttgagacccaagtctgctagaacttgtagacctgcttgcatccagttattacatatgtacatacagctagcctatgaggatctccaagctggtgtgccggtgtgtgatgctggcatagtaaggatgggcgagctagaaaccctgttgtgtttatgtgctgttttctccctgctcatgtggtaaactatgctaaagtgaatgaacactcgtttcctgttccctctttgaatgcgctgtgttagcatgcccttttgtttgaagattgcgtcttttgtggagcaccttgtattgctccgtagggatcacaccccttaccgccggcgatggccgacgatttgagataagatataatatttctggtcgtccttgttaaagagttcatgcatatacagtacacaagaaatgtcgatcgaatatagctagtaaaacaacttcaagaaacatgtacatgcggttggatggatcctttctcatcgatgatttgtctgcattgattcatccaaatcaagatacaagaggcagcatgagatgatctgtctgtgtctgcattgatccaaatcaagacacaatagagggacagcatgaggacgaacagagacaaatccatcgccccgtgcttgagtttctccacgagctagtaagagatcagcaagatcctctctagctaactacctgagggaaacgaacagcaggggaggaccaagaagtgatgagtgggggaactccatgcgagccctctggcctctcctcccacaggctacatcttgaggacgaagaagaacagtcctcgatgcgtcttcacctagctgctgcttaatttacgagtgatgctcttcgatccaaaggtacttatactacaaatacccctccccctctctctctctgtctccatcgccccaatgcaaagccggtctttctatagctcatagctgctggaatttggacctggctttgaaacatgtcgtgcactcgcgttgggtttgaaagagatgacttgcgttgcagcgagcgagcgacacaggtcaggtcacactgcaggggggaagcgaagcacgagtgtacatgcattgaacctggacgccctctttagcttttgcgtttgggcatacagtatttttattttggccttctgggatttgggaatacgagtcatcgattccctcagtgtcgtcccgtcacagctttttttttccgttgcctttatgctgcatgcccattcagcagtcacgca

SEQ ID NO: 630 - DNA, 4130 bp, Zea mays
  source 1..4130: mol_type = genomic DNA
gtgatacttgataggctataagctgctagtgcttgtggaatggaagagccacagaaggacagtgggcaaccatcaaaaagttctgattctgagctagaagctatggtattggatgataatggagcgggaaaatcccatagtatggaggaaaacagggattctcctatagatgtcgatggtgggcagtcatctatggatgtggatatcaagggaaaatcatccctcagtgatgatgttaatggaaagtcttcttccgagccatattccaatgctccaattgacatgagtgtcgaaagcctagagaagttttgcaaagaagcgtcaaggtccttctttgatgaagttggtctgattagccatcagataaattcctacaatgagtttgtctcgcatgggctccaggagctttttgattcgcttggggaagtgattgttgaacctggctatgatccttcgaagaaaggatcaggtggctggaagcatgccatcatcaagtttgggagagtgaagcttgaaaagcctgtgttttggactggcaaggatgaaggttctgttgattttaaaccttggcatgctcgtctccagaatatgacatatgcttcaagacttatagtagaagtgactattcaggtttattctttggagaaaagtgacaaatctaaaacagggaatgatggttttgttcaaaaaaggaacttcatgaatgaaactcattggatatttattggcctccttccggttatggtcaaatcaaacttatgtttgctgcatagcctcaacgaaagtgagtgcctgttcgacgcaggtggatactttttggtcaagggaatggagaaggtattcattgctcaagagcaaagatgtctaaggaggctttggattagtgaccgaccttgctggactatctcttttatgtctgaaatcaagcgtagacgtatatatattaaactagttgaatctacaaggagtgaagatttcagtgagagcaaaatcattaccatttcctttttgtatgcgacaatgccagtttggttgttgttctttgcacttggaatatcatcagataaggaagtgtttgatatgatagatatgcaagattgtgatgcttctgttatcaacacgatatctgcaactatcaaagaatctgataaactgtgtgaagacttccgtaaatcagataaagctcgtcaatatgttgatgagttggtaaaaagttcgagatttcctccagcggagtcctttgatgactatattgctaggtttctctttcctgatattagtggaaatagaaacaaagcacttttcttagggtacatggttaaatgtctgctaatggcttttactgggaagcgtaaatgtgataataaggatgatttcaggaacaaaaggctggacctacctggtgaattgcttggaagggaacttagggcacagcttaggctggcagagaaacgcatggttaaggccatccaaagagatttgaatagtgaccgtgagttacaagatcttgaacgttatatagatgcatcaattgttactaatggtctaaatcgtgccttttccactggttcttggtgccatccgtacaaaagagctgaacgatgctcaggaattgttgcgactctaaggagaactaatcctcttcaaatgatgtctgacttgaggaaaacccggcagcgggttgcttacgctgggaaagctggtgatgcaagatatccgaatccatcctattggggaaagctatgctttatgtccactccggatggtgaaaactgtggacttgtaaaaaatctagctgttactgctattgttagctcaagggtgatgcagcccttgattgagagcttcatttcttgtggaatgagtaagctgaatgacattcctactgaacacattcaaagaatggataagatctttttgaatggcaattgggtgggatcttgtgaaaattcagcttcatttgtatttcgattgaggtgcatgagacgcagcagtctgattgatcctcaggttgaaattaaaagggacaagcaccacaatgaggttcgcgtgtttactgatgcagggcgaatcctcagaccccttcttgtggttgagaatctgaataaaatcagaaaacctaaggggcgctcattctctttccatgaattaatgcaacaagaaataattgagttcattggtgttgaagaggaggaagatatacaatgtgcgtggggaatcaggcatttgtttgagagtgaaggtgcgatatctagttatactcactgtgaactggatccttcctttcttctgggattaagctgtggtatcattccttttgcaaaccacaattttgctcggagggtattgtaccaatctgaaaaacactcgcaacaagctattgggtactcaacgacaaatccacacatcagagttgatactctttctcatcaactatattatcctcagaggcctcttttcaaaacagttatagccgactgtcttggcagatcagattatgcttcttttggaagaaaaaatgatttcgcgagaccagaatattttaatggacaaaatgcaattgtagcagtcaatgttcatcaggggtttaaccaagaggattccctggttatgaatagggcttctcttgaacgaggtatgtttaggactgaacacctcaggagctataaggcagatgtagaaaacaaggatggaaccaaacgactgaaattgaaggaaaaaatagactttggaaaaacagaaagcaaaagaggacgtgttgacaatcttgatgatgatggcttaccttacgttggtgcaagtcttcagaccaatgacattgttattggcaaagtctcagaatctggagaagaccacagtattaagctgaagcatacagaaaagggaatggttcagaaagtattgctttcagcaaatgatgaagggaagaattttgctgtggttactctaagacaggttcggacaccttgccttggagataagttttccagcatgcatggccaaaaaggtgttgttggttttctagaatctcaagagaacttcccatttactcacgaaggtatagtcccggatattgtgataaatccacatgccttcccaacacgtcaaactcccggacagctgcttgaagctgctctggggaagggaatagcttgcaaaggtacaatgagatatgcaacaccattcaccacagcatcagttgacgttattgcagaacagttgcacaggtaagtgtttcttctaacggatgaatagctgcttgccttaattcagtaacccaccccttgcacatgaaacgaagatctgagaccctttcaaagggttgggcattttttagcctcttctaggtgaactttgtaattgttaagcttattaatacatcttataagaaccttggacgtcattaatgcaccctatgctctcaagtcttaactctgttagtactttactgcttattacacatacagaagaagaaaagggaaaggtagggaaacaatgtacacagagagagagaacagaatggctggtggccatcctcatattttgtatatgagtaaacatgtatcagtaatttcacatgtatctttttgtcatattttgcaccaaaatggtggaaacacacgagtttccttcccgtttcccttttacttgtattactatcagttgctgcttatctaacggagacatccatattggtaccgctaaatataaaactgagtgcactcacacactactatgttctcagtgaggatcttacttcagataatcaagtgatgtatctgattttttttgtgtgtgtttagacttgttttcgtctgtgacttgtttagttaattttcaagattttatgtatcttgttgcattgcagggctggttattcacgatggggatctgagaacgttctaaatgggcgaacaggtgaaagagtgcaatccttggttttcatgggccctaccttttaccagaggctgattcatatgtccgaagataaggtgaaattccgtaacactgggccggtgcaccccctcacgaggcagcctgttgccgacaggaaaaggtttggtggagttaagtttggagaaatggagcgtgactgcctcctcgcccatgggtcagctgccaacctgcat

SEQ ID NO: 631 - DNA, 3951 bp, Zea mays
  source 1..3951: mol_type = genomic DNA
atggggaaaccacaaaccgatggtgaccagtcacctgtaaactcagatactgatgtgatggattgcctgaacttcgatggccatggagatgttgaagacccccacaaggaggttgcaaaaggggagcagcagccttctggcgaagttgatgaacagcagtctgttatggatgttgatttgacatgtataacatctgtgggagatgaagggaatgaaaagcagaatgctatggatgtggatttgaaagaaatactatctgaggaagatggaggggaaggaaaggcttcttcagatctaccctcacaagtaccagtggatttcaacgttgcaagcctcgagaagttctgtaaagaagcagcaagatcgtttttcagtgaaactggactggttagccatcagataaactcgtacgatcattttgtctcccatggactccaagagctctttgattctcttggggaaatcactgtggaacctgattatgacccttcaaataaacatggtgcttggaaacatgcaactgtcaaatttggtagggttaagcttgatgagccagtgtttatgcttgaaaattctgaccttgaagagcaagatctcaaatttaagcctagacatgctcgcctccagaagatgacatatgcgtctaggatgaatgtggaaatgactgttcaggtttatatattcgacacaagtgacaaagccaaaactggcaaggatacacatgttcataaaagagagataatgacagaaactaaacaaatcaacattggattgttacctgtaatggtgaagtcgaatttgtgctggctgcataaatctcaaaaaggtgactgcccgtttgattttggtggctactttttgatcaaaggaacagaaaaggtattcattgctgaagagcaaaggtttttatcaaggatttgggtcacagaccaccccagctgggatgcaagttacctatctcagatcagacgagaaaagatcaatataaaacttgttccgtccaaaagcaatgaaagctgcaaagtcataaacatttgcttcatgggtacgattatgccaatttgggtagcattttttgcacttggtgtatcgtcagacaaggaagcttttgatatgattgatatcctagactgtgatgctgacatagttaacataatatcattaactattaaagaatctcatgaagaatttgaaggcttccgcactccaggtagagcccgtcaatatgttgatgagctgatcagaaaatcaaagtttccgcccaaagaatcctttgatgagtatgtttgtaggtatatgtttcctggtgtcaatgggtttaggagcaaggcacttttcttgggttacatggtcaaatgtctgctaatggcatactctggcaatcgaaaatgtgataataaggatgatctccgtaacaaaaggctagatctttcctgccaattgcttcggagagaactctggactcatattaaaagagcagaaaggcgcatggttaagctcatgcagagagatttgagcaatgatggcaacttgcaagaccttaggcgttatgtggatgcatcaattattaccaatggattgaaccgggccttctccactggttcttggcggcatccttataaaaaagaaaggtgttcaggggttgtagcaacccttcggagaacaaatccacttcaaatgatgtctgatgttaggaagacgcgacagtggtttgcatatgctggaacggctggagatgcaagatacccgaatccatcctactggggaaaattgtgttttttgtccaccccggatgctgaaaaatgtggatttgtgaaaaaccttgctgttactgctgtggttagttctgtagtgaggaaaccgttgattgatacatttgtttcttgtggaatgaagaaactggatgatatttctctacaagatatttctgggaaggacaggattttcttgaatggaagcttgctaggagtatgtgcagacccacacgaattgactttgcgtttaagaagcttgaggcgtagcaagctaattgatcctcaggttgaaatcaaaagggacaagcaccataaagaagttcgtgtattttctgatccaggcagaattatgagaccacttcttgtagttgaaaatctaagaagaatcacaagaccaaaagatggactatactcttttcaggaacttatagatcaaaacatagttgagctgattggtgttgaagaagaggaggatatccaatgtgcgtacggaattagacatctattctccagcagggagaaagaagactggtcttcttctggctatactcattgtgaacttgatccttctttcttgctagggctgagctgcagtctcattccctttggcaaccatgataacgctaggagggttcagatgcaagctgaaaaaatatcacagcaggctatcggctactcccctacaaattctcagtacagactggacaccctttcacatcaaatgttctatccacaaagacccttgtttagaactgtggtgtcctacggtcttggagaggcgaagacagactgcagctccggacgaaaagacgacttcaacacaccagaatatttcaacggacaaaacgcgatagtctcagtgaacgttcatcagggattcaaccaagaagactctctggtgatgaatagggcctccttagagcgtggcatgtttcgcacgctacatttcaagagctacaaagcacaggtcgagaacaaagagatcacaaggcgtctcaagcacagggaaaacatcaatttcggtaaagtgcagagcaagagggggaaggtcgacagtctggacagtgatggcttaccatacgtcggagcaagtcttcagagtggtgacattgtcattggtaaggtcacggagtctggtgaagatcatagcgccaaactgatgcatactgagaaagggatggtggacaaggttgttctttcggcgaacgatgatggggttaactttgcaactgttactctaagacagtctcgctcgccatgcgtcggagacaagtttgccagcatgcatggacagaaaggagttgttggcctgttggattctcaggagaatttcccattcacttcccaagggattgttccagacatggtcataaacccacatggttttccaactcgtcaaactcctggacagctgcttgaggctgctctggggaagggcatcgcccttggtgggaaggtcaggtacgcaacgccgttcaccactccgaccgtggaggtgatcgccgaacagctgcacaaggccgggttttgcaggtggggtgaggagagcgtgctgaacgggcagaccggcgagcggatgaagtcgctggtgttcatggggccgaccttctaccagcggctggtccacatggcggaggacaaggtgaagttccggaacacgggtccggtgcacccgctcacgcggcagccggtggaggacaagaagcggttcggcggcgtcaagttcggggagatggagcgcgactgcatgctggcgcacggcgccgccgccaacctccacgagcggctcttcaccctcagcgacttctcgcggatgcacatctgccaggcctgcgagcgggtggccaacgtcatcgtgcgggccgccgagggcggcggcggcaagaaggtgcgcgggccctactgcttgttctgccgctccgcggagcgcgtcgtccgggtcgacgtgccgtacggctccaagctgctgtaccaggagctcttcagcatgggcatctgcctcaagtttgaaaccgaggtccgctagaacgaacgccatggcagttcaccagtgagactccctcgatgcatatgcaagtatgcaactgcactgcctaggatcttggtgctttatgggctggtgttgaaacctgcagttttggcggcacgattttctgggcatgcattcagtagcaggcactggttgatactgtgattc

SEQ ID NO: 632 - DNA, 1536 bp, Zea mays
  source 1..1536: mol_type = genomic DNA
ccttgatccccgctaaggtactcaccatgaaaagccgtatctgtctcggcggacaggacccgctcgtcactgagaccgggacccgcagagcattgcttgaccgctggcccgcctccgcctgttagaaccaccgggcatcgtcgacgccgccggttgcccattaaacccccgtccccgtctcgaggtgatcatcccgcagcgctacaacgcccgaactctccgtccctcactctcagtctccgacacattctacgaaccgcctcccactaccgctcattgccgccggtcgccggagacgcgctgcaccgccagctgtccgccttcgcccgccgaccccggcctgccgcagcttccccttcacccgccagggtataagctgccagtgcttgtgtcatggaagagctacagaaagacagtgcgctaccatcaaatagctctgattctgagccagaagctatggaattggatgacaatggagcaggaaaatcccatagcatcgagggaaacagggattctcctatagacactgatgaaggccagccatctatggatgttgatattaagggaaaatcatctctcaacgatgatgttaatggaaagtcttcttctgagccattttccaatcctccaatcaacatgagtgtggaaagcctagagaagttttgcaaagaagcgtcgaggtccttctttgatgaagttggtctgattagccatcagataaattcctacaatgagtttgtctcgcatgggctccaggagctttttgattcgctgggtgaagtgattgttgaacctggctatgatccttcaaagaaaggatcaggtagctggaagcatgcaatcatcaagtttgggagagtgaagcttgaaaagcctgtgttttggactggcaaagatgaggtttctgttgattttaaaccttggcatgctcgtctccagaatatgacatatgcttcaagacttagagtagaagtgactattcaggtttattctttggagaaaagtgacaaatctaaaacagggaatgatggttttgttcaaaaaaggaacttcatgaatgaaactcactggatatttattggcctccttccagttatggtgaaatcaaacttatgtttgttgcatagtcttaaggaaagtgagtgcctgtttgatgcaggtggatactttttggtcaagggaatggagaaggtataactctgtgttctctgttgttaatgtattagtatgtaggaactttcaagtgtccttttgttgctggcatgggactatagctttcttagaacccattcagaaaacatgtacatgctcataagaggggggggggtccaaatatgattgtagctatgtaaaataggattctattgtatcgaaggatactttggcacagcatccgtttgagttggtctcctggtgccatatgccgcttcttgtgtttaaactatatataggtctaaatgccgaagtaccgatatgtgtatcagtattggaaggatatggatgcacggatacagcagtttttcaaaaaaaaaaaaa

SEQ ID NO: 633 - DNA, 3318 bp, Zea mays
  source 1..3318: mol_type = genomic DNA
gtaaaagtgatctaggtctcccgcgccgccgccgccgccgcctaagctgcttccacctccgctttctgtgcagaggactcctcgccggagaatagccggcggcggctcgagacgaaactacggtgctcgtctcccgccgcccgccgcccttcactccccagcatacctagtccctactctaatccgtacagagcaacgcatcaagtgatggcgaagccggaggagaagctgcgctgcaccaaggaacccttcatcgaggacgtcggcacccggaggataaagagcatccggttcagcgtgctctcgggcagcgagattcgcaagtcagcggaggtacaggtctggaacaaccggatctatgaccgcgacatgacgccggttcccaatgggttgctcgacccgcgaatgggaatcccgactaagagaggcaaatgcaatacctgccatggtgaatttagtgactgtccaggtcatttcggctacttgaagctcgcgcttccagtttttaacgtgggcttctttaactgtattctggacgtgttgaagtgcatctgcaagagctgtagtagagttcttcttatcgagaaagaccgcagggagtttctaaagaagatgagaaatcccagggcagatgcactacagaaaagtgctacaatgaaaaaagtgagggacaaatgcaaactatcctgctgcccccgttgtgattacagaaatggtgtagttaaaaaaggcagagcgggcttgatagtagttcatgattgtagcaaagttttggatggacatacagaagaattgaagaatgcactacaaaataagaaagaaaaggtgtctgctagttcagttctagtgttagaccctgcaactgttctatctctattcagaagaatgattgatgaggattgtgaattactaaaccttggtgataggccagagaaacttattgtgacagagattgcagtgccacctgttcctatacggccttctgttgttgttggtaatagtagaacaagcaacgaagacagcattacagttattttgaagagcattgttaatacaaactccatccttaaggagacccttcatactgggggtccattcaccaagtgctttgattgctggcaataccttcaacttcaagttgttgaatatgtgaatagtgatgccccttctcttcctgagtcacaacatcggggccttgttcaacgactcaaagggaagactggacgatttcgtggcaatttgtccggaaaacgtactgagtacacaggaagaaccgtcatatctcctgatccaaatttgaaaataacagaggtggctattcctgtgttgatggctcgagtcttgacttatcctgaaagggtttcaaactataacattgagaagctgagacaatgtatacgaaatggaccattcaaatatccaggggctaattttgttacacaacctgatggcatgaagcagagcttaaagtatggtgatagaaggattactgctcgggatttaaagtgtggatgtatagttgaaagacatttagaagatggagatgttgtcctctttaatagacagccgagcctgcatagaatgtcaattatgtgtcacagggcaaggataatgccatggagaacactcagatttaatgagtctgtttgcaacccttacaatgctgattttgacggagatgaaatgaatttgcatgtccctcagacagaggaagctcgcactgaagcgcttatgctcatgggggttcagaataatttatgtactcctaagaatggtgagatactggttgcttccacgcaagacttcttgacctcatctttcctagttacaagaaaagatactttctatgatagatcttcctttactcttttgtgctcataccttggtgatggaatggagaacattgatttgccaacaccagccttgattaaacctgttgagctttggactggtaaacaactatttagtgtgttagtccgacctaatgcgcacacaaaggtgtttctgaatcttgctgttcaagaaaaaatttattcaaagaaaaagggaaaaaaagaggggggagaggaggtaaaggaaacaatgtgtggaagggaaacaatgtgtcccaatgatggttatgtttatttccgaaatagtgaactgttatctggacaagtagggaaggccactttaggtaatgggaacaaggatggcctttactctgttcttttaagagattataattctcatgctgcagcaagctgtatgaatcgtttggcaaaatttagtgcaagatttatagggaaccatggtttttccattggtgtggacgatgtccaaccaggagaacatctaaatcggcaaaagaaaaaggaaatagacggagggtacaaaaaatgccatgatcttatttctttgtttgcgaaaggcgcgctcgcattgcatcctggttgcaacgcagcccaaacgctggagcataacatcactggtgtgttaaatgaaatcagatcaattgctggaaatgtgtgcatggatacgcttcactggaggaacagcccattgattatgtctcagtgtggttccaaaggttctccaatcaatatcagtcagatggttgcatgtgttggacagcaatcagttggagggcgtcgtgccccagatggttttctaaacagaactcttcctcactttcctataaattcaaagacccctgcagctaaaggttttgttgctaattcattctatactggtttgactgctactgagtttttcttccacacaatgggtggacgagaaggtcttgttgacacggcggtcaaaacagcagaaactggatatatgtcccgcagattgatgaaaggcttggaagatctctcagttttctatgatcagacagttcgaaatgctagcggtggtatagttcaatttttgtatggagatgatggcatggatcctgcaaagatggaaggaaaagatggcatgcccttaaatttggatcaattgtttatgaaagtcatggccacatgtcctcaaaggggatcagatacattatctccagtgggcatcaaacagatgttagaggataagttcttgcagcatgacacctcatctgatggtggctgtagtgcagagttcaagaaaaacttaactgaattccttgataaacgtatagaattaatgaaatgcacaagaagggcactccatctacatgaggatcatgtagaaaagaaagattcttgcctagaagaatctattgctgctattatatctggtatatctgcaaaacaacttcaggtgcgtgtttataatcttttgtaaccctttctattatcaaag

SEQ ID NO: 634 - DNA, 5107 bp, Zea mays
  source 1..5107: mol_type = genomic DNA
atggagctacatcgtgaacctcctgaagctattctgaatgccataaaatttgatctcatgacgagtacggatatggaaaaattgagcagcatgagcataatcgaagtgagtgatgtcactagtccgaagctaggattaccaaatggttccctgcagtgtgagacttgtggatcacaacgtggacgcgactgtgatgggcattttggtgtgactaaactggcggcaacagtacacaatccatacttcatcgatgacgttgttcactttctaaaccgaatatgtcctggctgtctcagcccaagggaaggcatagatacaaagagattggagagagaaaaggttcaagcaacatgcaagtattgttcgaaggatggctctaaactttaccctagcatagtctttaagacactgtcaagtccaagagtattattattcaagagtaaacttcacagaaacgccagcgtgatggaaagaatttcgattgttgcagaagctgctgacagaatgcctaatagatcaaagggtaaaggttcgcttgaaggcctgcccctggatttttgggattttgtaccttctgagaataaacaagtccagtcaaatatgaccaagataatattgtcgccctaccaagtcttctacatgttgaagaaaagtgaccctgaacttatcaaacaatttgtttcaaggcgggagctattgtttctatcatgtttaccagtaactcctaattgccatcgtgttgtagaaattggatatgggcttccagatggacgcctaacatttgatgacagaacaaaggcttacaagaggatggttgatgtcagtaggagaattgatgactaccgccagcatccacatttcagtgttcttgcaagttcacttgtctcaagccgggtttcagaatgcctaaagtcatccaagttgtactctaaaaaggcagatggagagacatccacagatacatatggaatgaaatggctaaaggatgttgttctcagcaaaagatcagataatgtttttaggagtattatggttggagacccaaaaattaagttatgggaaattggcattcctgaagatttatcctcaagcctggttgtttctgagcacgtcagttcttataattttcaaagtacaaatctgaagtgcaacctgcaccttctagccaagcaagaactatttattcggcgaaatggaaagctaatgtttcttcggaaggcagaccagctagaaataggtgacattgcctatagaccattgcaggatggtgatattattctcatcaacaggcctccttcagttcatcaacattcattgattgcattatctgcaaaaattctaccaattcactctgtcgtatcaatcaatccactatgctgtacaccttttgcaggagattttgatggtgattgtttgcatggatatatcccacaatctatacgctcaagggttgaacttgaagagctggtaagcttacacaaccagctgttgaatatgcaagacggtcgaaatttggtgtcactaacacatgactctctagctgctgcacatttgttaacaagtacagatgtttttctgaagaaatctgaattacagcagcttcaaatgctatgcctttcagtatcaacaccagcacccgcagttattaaatctatgaattttcaaggttctctgtggactggtaaacaacttttcagcatgcttcttccttcaggcatgaatttcagttgcgatacggagttacatatcatggacagtgaggtgcttacctgctcactgggttcttcttggctacaaaataacacatctggtcttttctctgtcatgttcaaacagtatggttgcaaggcacttgacttcctttcttcagcacaagaagtactatgtgagttcttaaccatgaggggtttaagtgtctctctttcagatctctacatgttctcagaccattactcaaggagaaaactagctgagggagttaagttggcactgtatgaagctgaagaagcttttcgagtcaagaaaatattgttagatccaattaacataccagttctgaagtgtcacgatgaaactgaagatgtaacttacagacaatctgattgtatccagagcaatccatcagttatcagatcttcaatcatggcatttaaagacgtcttccgtgatctcttaaaaatggtgcaacaacatgttagtaatgataactcaatgatggtgatgataaatgcaggaagcaagggtagcatgttgaaatatgctcaacaaactgcatgtattggtcttcaacttccagctagcaaatttcccttcagaattccttcccaactctcatgtattagctggaatggacagaaatcgttgaactatgaagctgagagtactagtgaacgtgtgggaggtcaaaacctttatgctgtgataaagaattccttcattgagggtttgaatccattggaatgtcttctgcacgctatatctggcagggcaaacttctttagtgaaaatgctgatgtaccagggacattgacaagaaaattaatgtatcacttgagagatatacatgttgcctatgatggaactgttagaagttcttatgggcagcaaatagtgcaattctcttatgatagtgttgatgacctagtagataaactcggcgccccggttggatgtcgggctgcttgttccatttcagaagctgcatatggagctttggaacacccggtcaatggtttagaggactcccctctcatgaatctacaagaagtatttaagtgtcacaaggctacaaattcaggggatcatattggtttgcttttcctgtcaaggcatttgaagaagtacagatacggtctggaatatgcatccctagaagttaaaaaccatcttgagcgagtgaacttctctgatttggttgaaaccatcatgattatatacgatggacatgacaaaataagaaacgaaggaatgtggaccacccattttcatataaacaaggcaatgatgaagaaaaaaagattaggattgagatttgttgtagatgaacttgcaaaagagtatgacaccaccagagatcagctaaacaacgcaatcccatcaattcgtatctcaaggagaaaatgtttagtaggtgacgagggtgttaaaagttcatcatgctgtatcgctgtcgtagcacatgctgaacgcaactccatctctcagttggacactatcaagacaagggtgattccaagcatactggatacactgctgaaaggttttttggaatttaaggatgttgagatccagtgtccacatgatggtgaacttcttgttaaagtttgtatgtctgagcattgtaaaggggggaggttctggcctactctacaaaatgcttgcattccagtaatggagttgattgactgggagctgagtcaaccaagcaatgtatctgatattttctgttcatatggcatagactcagcatggaaatactttgttgaatccttgaaatcagcgactactgatactgggaggaacattcgccgggagcacttgctggttattgcagatagcttgtctgtaactgggcagttccatgcattaagcagtcaaggtttaaagcagcagcgcactcggttatcgatctcgtctccattttctgaagcatgtttttctaggcctgcacaaagttttataaatgctgcaaagcaatgttcagtggacaatctgtgtggaagtctcgatgcagttgcttggggcaaagagcctttcaatgggacgtcagggccttttgaaattatgcactcgggaaagccacatgaaccagaacaaaatgagagcatctatgatttcctatgcagctctaaagttcggaattttgaaaagaatcatttggatacccgtagacaaagtactgaaaatgcttcgatatgtagattagcatgcaagtcttctaaaggcagtacgaccgtcaatggtgttgctataactatcgaccaggactttcttcatgctaaagtcagtatatgggataacattatcgatatgcgtacttccttacaaaacatgctaagagagtacccgttaaatggatatgtggcggagccagataaatcacagttaatcgaggccctgaaatttcattccagaggtgctgaaaagatcggtgtgggagtaagagaaattaagatcgggttgaatcctagtcacccaggtacaaggtgcttcattttgctgagaaacgatgataccactgaagacttttcttaccacaagtgtgttcagggtgctgcagactctatctcaccccagctcggaagttatttgaagaaactatattacagagcataagcttatgcaacactcccactagttcatttttttaactaaaacgtggcaaataaaaaagaacggatggagtaggattttggaaagtgttcctggcaacatcttgttctgatcagaccatattaccaatttctgataaggaaactacgtgtcgcattttaaggatgaggtgaaaactgaaagggtctggcgctcagaactcagaaggtcttctggactggaggtgtatgtcaactcaactcaatgggactatgtaaggtgggcctgagtcatgactgcggtttcatgcctgcaattctctagtcagtagtataaatactagtctgcgtgttttctaatatgaagatccatctattttattacttaaccatagcgtagatgattggtaacagatagatacattttatttactgattaaaatgcagcagcgactccccgaacttaaaacaggtaaacgggtgtggaaacttagtggctcattcaaaactgtctaaaatcgggtttgctcaaacaaagtgtcgacatggcatgtcatgttgaaatcatttgagtctctaaatttggtttacagacttttattagtgtgcttcaatcgtagcacaccaaatcagtattcggtttgagcatccgatttctgatggttttgcacaggccggccaagttatatgatctagttttttaacttaggggatctaattgatacaacatgccaagtttaagaatggctattgtatcttactcttatttattgaacaagtaatgcacattcccagtc

SEQ ID NO: 635 - DNA, 5107 bp, Zea mays; identical to SEQ ID NO: 634
  source 1..5107: mol_type = genomic DNA

SEQ ID NO: 636 - DNA, 2691 bp, Zea mays
  source 1..2691: mol_type = genomic DNA
atggacaacacccatcatctctggcccgcagaagctcatggcgcagctggtggagaatcccatcctgatcacgcactgcagccagctccacgacaacccatccctgggcctgcccctgcaggtcggcggcagctgcgagtcctactgctgcagcgccacgcagctcgacaattgcgaagggcatttcggcttcatcaagctgccggtgcccatctaccaccccagtcacatcaccgagctgggaagatactcaacctcgtctgcctccgcctcaagaaacccaagcagaaggacaccgggaaagaatgcagattcacctcatgttcatattgccagcacattcctgatgtgaaaaaagtacaatctggatccctactttgcttgaacaatgaaatagtgctgctcttacaaaccccagcattcctcttgttccaggacctcccaccgctatgcgtcagtcaagtgaagaaattcaacggtgcccgtagcttggaactgaaagcaccattaaagcaagaggttgccgtcaggttttggagcttccttgatcaatttggcttccacacaagtggtacatctcaccgccgccccttacatccaaaagaggatggatatgtgatggataacatgtccgtcccacccaattgcctgcacgtttcaaatattttagatgacaacacagaaatgtgccctcccgatacaccaaaaggcttgttgaggaaaattctacgcacgatagaacaaatcaaaagcttaaatatcagccaaacacgtgagttaggggcagatgatcttcaggtagctgtaggagattacatggatatgggaggaccagcagaggttttccagcatgtcacctttacaagacagcctgcaccaaaacagtggcataaaaagatgaaggccctcttccttagtaagagttcaagctactcatgccgtgcagtgatcactggtgatccatacattggccttgatgtagtaggggtgcctgatgaagtagctagaagaatgacagtacaagaatgtgtcacaaactacaacattgctcggctgcaagacatgatggagaaaggactatgcctaacatacactgatctcaataccaacacatatgacttggatggaaagaaaggaaacaagaagtgcatcatgccgagggttggtgaaactgtagagcgaagagtccttgacggggatctcgtcttcctgaatagaccaccaagcactgacatgcactcagttcaagccttatatgtccatgtccatgatgaccacaccataaagatcaaccctctcatctgtggcccacttggagcagattttgatggcgattgtgttcacatcttttccccaagatcagttccaggaagggttgaagctgcagagctcttcactgtggagaaacaactgttaaactcccacaatgcgaagctgaactttcagatcaagaatgattacctactagctctgaagataatgtgtgtcaggtcgtattctagagaaaaggcaagccaaattgccatgttctcgtcagggatgattctaccgggtgattggactattcctcagattctacagactaccgatgcattaagaaccctaccaagccacccaaacaaacaatctgttggagcctcagttactgccatcatctcatcaactctttcagaaaaaggtccaaggggggccataaagctcataaatcttctgcagcccctcctaatggaatcactgcttatggatggtttcagcataagcttgaaaggtcttgatggccggtgtgcaatgcagaaggcaaatcaaagtagttcgcttgagaccgataagttcaacaagttaactgtggactccattgttaattcctctgcccttggtctgctggttgacccaaaaaaagattcaactctgaagaaattagttgaacagattggtttcttgggacaacaactgcaaaggactggtaggttatactctagcaacttagtggaggactgctacaactttctggaaaggtgcagcggaagcaccaaatgttatgatccttcaaaaggacatgattttgttacgagttcattttacaatggtttaaatccatatgaggaattactccactcaatatcagtaagggaaaagatagagcgctcatcatctaaaggactggctgaatctggcaatctttttaagaacatgatggcaatgctccgagatgtcacagtatgctatgacggaaccatgagaacttcgtgcagcaactcaattgtacaatttgactcgacaaatgtatcaagttctgtgacaccaggtgatccagttggtatcttggcagccactgcatttgtaaatgctgcatacaaggcagtgttagatccagtttttggacattccgtcgagcacccgccgggcgcacaaaatcctcgcatgattgcctcgcgtaggcaaggtcacatgaatgtggcatccttgggcgcgctccagttgcgcttggggagcgcggcgccgcctagctcggcgatggccgccttcagctccggaaactccggccggagcgggtggccggcatcggggtcgaagacgtcttcgtcgctggagccgaagaagaagtcggagttgaccggaggtcatcgcggggaggaggaacgggagcagctcctcgtcagggaaaatttccctgcagccgaatatgtatag

SEQ ID NO: 637 - DNA, 1665 bp, Zea mays
  source 1..1665: mol_type = genomic DNA
atgcggacactgtttatcagcaaagggtcaggtttttcatctcgcagcgttctgacaggagatccatatattgggctaggtgttgtagggcttccttctgaagttgcaaagagaatgacattcgaagagcaggtaactgacataaacattaacagattgcaagacgtggtagacaagggactctgtttgacctacagagatggtcaagctacatatgccatcactgttggatcaaaagggtacacaacacttaaagttggtcagactatcagtcggaggatagttgatggggatgttgtgtttcttaacaggccacccagcacacataagcattctctccaagctttctacgcatatgtgcatgatgaccatacagtcaaaatcaatcctctcatgtgtggccccttttctgctgactttgacggggattgcgtacacatatattatccacaatcgcttgctgcaaaagctgaagccttggagctttttagtgttgagaggcaactcattagttcgcacagtgggaaggttaatctccagctaggtaacgactccttggtagctatgaaggctatgtctcatacaaccatgttacacaaggaattagcaaaccagttggcaatgtttgtgccattttcacttcttgctcctgctgtaatcaagccagttccatcttggacaatatcacagatagtgcaaggtgcatttccagctaacctgacttgccaaggggacacacacttggttagggacagcacaatcataaggctggaccttggcaaagaatctgttcaggactcattccctgatttggtgtcctccatccttcgtgagaagggtccaaaagaagctctgcaatttctgaatgtgttggagccattgttgatggagtttttacttcttgacggtttgagtataagtctgcgggattttaatgttcccaaggctttattggaggaagcacaaaaggacattcgaaatcagtcccttattcttgagcagtctaggtgctctacaagtcaattcgtagaattccgagtcgaaaacaatttgaaaaatgtcaaacagcagatttcagattctgttgggaaattctctgaccttggtctgctgattgatccgaaaaaggaagcctcaatgtcaaaagtagttcaacaagttggttttgttggcttgcaactgtatcgtgaaggcaagttgtattcaagacgcttggtagaggactgcttcacaaactttgttaataaacacttggccattggagatgagtatcctccagaagcgtatggtcttgtccaaagttcatattttcatggtctcaatccttatgaagagttgatacatgctatatccactagagaagctatgatccgctcctctagaggtctgtcagaacctggaactttgttcaagaatttaatggccatcttgagggatgtagttatatgttatgatggaactgtgagaaacatttgtagcaattctatcattcaacttaagtatggggaagatgatgaaactgattcttcaagtgttgtacctcctggtgaacctgtgggtgtcttagccgccacagctatctcgaaccctgcatacaaggctgtcttggattcctcccaaagtaacaatgcttcatgggagtcaatgaaggtagtaatgttataa

SEQ ID NO: 638 - DNA, 6143 bp, Zea mays
  source 1..6143: mol_type = genomic DNA
tctttccccagaggcaccctcaatcccctttcccctcctccctccagactctcggaggcgggcgcgcggatctgtcggccggggccgatccagtcgattccaccggacaaggccgccaaaaacacactcgctcgacgcagcgagcggggccggcccttcgtgccgcggggcgcccggtggcgagggccgcagcgcgcagcgatctgaaaccctaggtggtggtgggcgccgccgccgtgtgtagacgcgatggatgcgaggttcccgtactcgccggccgaggtggccaaggtcgagttcgtgcagttcggcatcctcagccccgacgagatcagacaaatgtcggtgattcaaatagaacacgcagagaccatggagaggggcaaaccgaagcctggtgggctcagtgaccctcgattggggactatcgaccggaaaattaagtgcgagacatgcatggcagggatggcagagtgtccaggccactttgggcaccttgagcttgccaagccgatgttccacatcggattcattaagactgtgctctccatcatgcgttgtgtttgctttaactgctccaagatcctcgcggatgaggatgaaaccaaatttaagcaggctttaaaaatccggaatccaaagaatagattgaagaggatatatgatgcttgcaagagcaaaaaagtctgtgcaggtggcgatgaccttgatgttcaggaacaggatactgatgagcctattaagaaaagaggtggctgtggtgctcagcagccaaatattacagtcgatggcatgaagatggttgctgagtttaaagctccaaagaagaaaactgatgatcaggatcaactccctgagccagtggaacgcaagcaaatcctctcagctgagagggtccttaatgttcttaagcgtataagtgatgaggactgtcttctgttgggcctgaatcccaaatatgcccgtcctgattggatgatacttcaagttcttcctgttcctccaccccctgttagaccatctgtcatgatggacacctcttccagaagtgaggatgatctgactcatcagttagctatgataatacgacataatgagaatttgaggaggcaagagagaaatggtgctccagctcacattataacagagtttgctcagctgttgcaatttcatattgcaacatacttcgataatgatcttcctggccaacccagggccacacaacgttctggaaggcctattaaatcaatttgcagcaggctgaaagctaaagaaggcaggattagaggaaacttgatgggcaagcgtgttgatttctcggcccgtacagttatcacaccagatccgaacataaacattgatgaattgggagtaccatggagtattgctttgaacctgacatatcctgaaactgtcactccatataatattgagaggttgaaggaacttgttgaatatgggcctcaccctcctccaggaaagaccggtgcaaaatatattatcagggaagatggtcagaggcttgatcttcggtatgtgaagaaaagcagtgatcagcatctggagcttggttacaaggtggagaggcatctcaatgatggggattttgttcttttcaatcggcaaccaagtcttcataaaatgtctatcatggggcatcgcatcaaaattatgccctactcaactttccggttgaacttgtctgtcacttcaccatacaatgctgacttcgacggtgatgagatgaatatgcatgtcccccagtcatttgagaccagagcagaagttctggagttaatgatggtgccaaaatgcattgtctctccacaatcaaataggcctgtaatgggtattgtccaagacacactgcttgggtgtcgcaaaattactaaaagggacactctaattgaaaaggatgtatttatgaacatcttgatgtggtggcaagatttcgatggaaagattcctgcacctaccattttgaaacctaggcctatttggactgggaaacaagtttttaacttaattatccccaagcaaataaatttaattcggttttcagcatggcattcggaagaagaaaaaggatttattactcccggtgatactatggtcaggatagagaagggagagcttctgtctggcacactttgcaaaaagagtcttggaacaggctccggaagtcttatccatgtcatttgggaagaggttggtccagatgctgcccggaagttcttaggacacacacagtggcttgtaaactactggcttcttcaaaatggtttcagtattggaattggggatactattgcagatgcatccaccatggaaacaattaatgatacaatatctaaagctaagaatgctgtgaaggagcttattaaaaaagctcatgagaagcagttggaagctgagccaggacgcactatgatggaatcatttgaaaacagagtgaaccaggttcttaacaaagcccgtgatgatgctggtagcagtgctcagaatagcttgtctgaaagcaacaatttgaaggctatggtcactgcaggttcaaaaggcagtttcattaacatttcacaaatgactgcttgtgtgggacagcagaatgttgagggcaagcggatcccttttggtttcattgatcggacgttgccacatttcacaaaagatgactatggtcctgaaagtcgtggatttgtggaaaattcttacctccgaggtctgacaccgcaagaatttttctttcacgctatgggtggtagggaaggtcttatagacactgctgtgaaaacctctgagactgggtatatccagaggagacttgtgaaagctatggaggacatcatggttaaatatgatggtactgtaagaaattctcttggagatgtcatccagttcttgtatggagaagatggcatggatgctgtttggattgaatctcaaaaattggactcattgaagatgaagaagcctgagttcgataatgtattccgttatgagctggatgatgagaattggagacctaactacatgctacctgaacatgttgacgatttgaagaccatacgtgaattcagaaatgtgttcgaggcagaggttcaaaagctagaagctgatcggtaccagcttgggtctgagatcaccacaactggtgacaattcgtggcctatgcctgtgaacctcaagcgactcatctggaatgctcagaagacattcaagattgattttagaagaccttctgacatgcacccgatggaaattgtggaagcgatagataaactgcaagaaagacttaaggttgtacctggtgatgatgctatgagcattgaggcccagaagaatgcaaccttgttctttaatatcctacttcgtagcacgtttgctagcaagagggtcttgaaggaatacaggcttacaaaggaagcttttgaatgggttattggtgagattgaatcgaggtttcttcagtctttggtggcccctggcgagatgattggatgtgtggctgcacaatctattggagaaccagcaactcagatgaccctgaataccttccattatgctggtgtcagtgccaagaatgtcacccttggagttcccaggttgagggagatcattaatgttgccaagaagataaagacaccatctttgtctgtttacctgaagcctcaggtgaaccagaagaaagaattggctaagaatgtccagtgtgctttggagtacactacactgcgtagtgttacccacgccacagagatatggtatgatcctgatcctctagggaccatcattgaagaggacacagagtttgttcagtcctattatgaaatgcctgatgaggacattgacccggataaaatttctccttggttgctgcgtattgagcttaaccgtgagatgatggttgataagaagttgagcatggctgatattgccgagaagattaaccgtgagtttgatgatgatttatcatgcattttcaatgatgataatgcggataagcttatcctccgtatccgcatcacaaatgatgaagctccaaaaggagaaatacaagatgagtctgctgaggatgatgtcttcctaaaaaagatagagggcaatatgttgacagagatggcgcttcgaggcattccagatatcaacaaagtgttcatcaaagaagggaaggtcaataccttctatcaagatgacggtttcaaagcagctaatgaatggatgcttgatacagaaggtgtgaatcttttagctgtcatgtgtcacgaggatgttgatgctacaaggacaacaagtaaccatctgattgaagtgattgaggtacttggaattgaggctgtccgtcgatctctcttggatgagcttcgggtggtgatatctttcgatgggtcatatgtgaactaccggcatctggccattctttgtgatacaatgacatacagaggtcacttgatggctattacaaggcatggtatcaaccgcaacgacactggacctcttatgagatgttcctttgaagagactgttgacatcttacttgatgctgctgtatatgctgaatctgaccacctgagaggtgttactgaaaacataatgcttggtcagcttgctcctattggtactggaggctgtgcactatatctgaatgaccagatgttgcagcaagcaattgaacttcaactcccaagctatgtcgaaggcctagactttggcatgactccagcacgatcacccatcactgggacaccttaccatgaaggaatgatgtcgccaagttatctgctgagtccaaacatcagggcttcgcctattaatacagatgcttcgttctcgccgtatgttgggcacatggcattctcaccattcccttcaccaggtggttactccccatcgtcagggggatacagcccatcttctccggttttcaccccagagaaaggatatagccctctctctccatcatatagccctgcatcaccaagctatagtcccacctcaccgtcttacactcctggctctcccacctacagtccaacaagcccgaattactccccaaccagcccgacgtactcgcctaccagcccatcgtactcacccacatctccgagctacagcccaacatcaccaagctacagccctacatcaccaagctacagccctacatctcctagctatagtcctacatcaccaagctacagccccacctcaccagtttatagcccaacctcaccagcatacagccccacatcacccgcttacagccccacatcgccatcctacagtccaacttcaccatcttatagccctacatcaccttcatacagccctacgtccccttcatacagccctacctccccctcatacagccctacctctccctcctacagcccgacatcacctgcttacagcccgacatcaccaggatacagcccaacgtcaccgagctacagccctacatctccgagctacagtcctacatctccgagctacaatccttcatcagccaagtacagcccttcacatgcatactctccaagcagccccaggatgagtccatacagccagacttctccaagctacagtccaacgtcaccgacttactctcctacatcaccatcatattcacaaccaagtccatcgtacagcccaacgagcccgttcaacacctctggaggacccagcccagactacagcccgacctctccaaattacagccctagcggaagctactcccccactgcaccgggctactccccgtcgtccacaggccagggtaatgacaaggatgataagagcgctcgttgaagaggcacaggagaacaaggcgctctagagcactcgatgaaggcactcggtgatggccacatgggaagatcgaggcacttttttttcccttgagtttttgtatggttgatgaactctgagagcaaacttgtatttttccgagctgctaatagcagaaatagttgtttatgtatgatactagaactaaggactggactgtgctgcgacttgataagtggttaaccgcgtggtcgcccctcagagagtaacacatgtagtaatgtttaatgataatatcgtgactgtacttggtactactatgctatggtgtactagtgtattgcatgcgcgcgtggagcaga

SEQ ID NO: 639 - DNA, 5028 bp, Zea mays
  source 1..5028: mol_type = genomic DNA
cttttcagtactgttattttaacttttgttcccctatataggcatatatctgattgatatgctgaccaatgatttttcaggaacaagaagatgcagagcaaagccacaaaagaaggaagaggaatccacagaaaacaacaagctggagaatggatctctggatgcaacagaagaggtgcatcatggagtcgaaaaaggtgatggacatgttacccgcaagagaccaaggagatcagcggcctgttctgatttcaaagagaaatccatacgcttatccgaaaaaaaatctgttgtcatggtcaagaagaatcggatggaggaggaagaagtagatgctgtcaatctgacaaaacttggaccagaagatccaccaccttgccggaagttgatcgattttatcttgcatgatgcagaagggaacccacaaccctttgaaatgtcagaaattgatgacttctttataacagctcttatcatgcccatggatgatgatctagaaaaagagcgtgaaagaggagtacgctgtgaaggatttgggcgaattgaggactggaatatttctggttatgatgaaggtactcctgtaatctgggtgtcaactgatgttgctgactatgaatgtgtgaaaccatcaaccaattacaaatcttattttgaccacttctatgagaaggctcaggtgtgtgttgaagttttcaaaaagcttgcaaaatcagttggtgggaatcctaaccagggcctggatgaattgcttgctagtgttgttcggtcaaccaatgccatgaaaggatatagtggaaccatgagcaaagatttggtgatatccattggagaatttgtatacaatcaacttgttggtttggatgagacatcaaacaatgatgatgaaaagtttgctaccctgccagttcttctttctctaagagaccagtgcagatctagggtggaactgaccaagttgccctctaacttctcgaacacaagtctgaaaattaaggactcagagtgtgatgagacagcagaagacgatgatgatgcaaaattagctagattacttcaacaagaagaagaatggaaaatgatgaagaaacagaggggtaggcgtggaacaccatcccagaaaaatgtctacataaaaatcagtgaagctgagattgccaatgactatccccttcctgcatactataagccatttagccaggaaatggatgaatacatatttgatagtgatgacagcatattttctgatgatgtgccagttaggatactcaataactggacactgtacaatgcagattccaggcttatatctttggaattgatccctatgaaatcaggggcagaaaatgatgtggttatctttggatctggtttcatgagagatgatgatggcagttgctgttctacagctgagtctgtgaaatcttcgtcttcctccagcaaagctgaccaactggatgcaggaatccctatttatttgagcccaatcaaagaatggattatagagtttggtggctcaatgatttgtataaccattcggactgatgtggcctggtacaagctacgccaaccaacaaaacaatatgctccatggtgtgagcctgtactgaaaacagcaaggcttgctgttagcatcattaccctgttgaaagagcagagtcgtgcctcaaagctttcttttgctgatgtcataagaaaagtagctgaatttgacaaaggaaaccctgcatttatatcttcaaacatcacacttgttgagagatatattgtggtgcatggacagataatactccagcagtttgcagattttccagatgagactatccgtcggagtgcatttgtcagtggtcttttattgaagatggaacagaggaggcatacaaagttagttatgaagaaaaaaactcaagtgatgaggggagagaatctgaatccaagtgcagcaatgggtccagcatcgaggaaaaaagcaatgcgtgcaacaacaaccaggctcatcaacagaatctggagtgattactatgcacatcatttccctgaagattccaaggagggagatggaaatgaaacaaaagaaattgatgatgaacaagaagaaaatgaagatgaggatgctgaagatgaagggcagattgaagagaacatctcaaagactcctccatcaacacggtcccggaagttgctatcacaaacttgtaaggaaatcagatgggaaggtgaaacatctgggaaaacattgtctggagaaactctatataaatgtgcttatgttagggaactcagaatacctgttggtggaacagtggctctagaagatgattcaggagacacagtcatttgttttgttgagtacatgttccagaaagttgatggttcaaaaatggttcatgggaggattctgcaaaaaggttcacagacaattcttggcaatgcggcaaatgagagggaggttttcttaactaatgactgcttagaattcaaattagatgacatcaaggaattggtaatggttgatatccaatcaaggccttggggtcacaagtacagaaaagagaattctgaagctgataaagttgagcaggtcaaagcagaagagagaaagaaaaagggccagcccatggtatatttctgcaaaagcttgtactggcctgagaagggtgccttctttgccctctcccgagataaaatgggtcttggtagtggtttatgtagttcttgtgataatatagagccagattctgatgaattgaaaatattctcgaagaccagctttgtctacagaaaggttacatataatgtcaatgagtttttatacataagacctgatttttttgctgaagatgaggatcgtgcaaccttcaaggctggccgaaatgtgggtctaaagccctatgcagtttgtcaaatattgtccatccctgaaggggctggatctaaaaaactcaatccagcatcagcaaatatcagtgctagaagattttacagaccagatgacatttcatcagccaaagcctatgcatctgacatcagagaggtctactatagtgaggatgtaattgatgtgcctgtggatatgatagagggaaaatgtgaggttagaaagaagaacgatcttgcaagttcagaccttccagtgatgtttgaacatgtatttttctgtgaacttatatatgaccgtgccagtggagctctcaagcagttgcctccaaatgttaggtttatgtctatggtgcaaaggacaagtgcgttgaaaaagaacaaaggaaagcagatctgtgagcctgatcaaatagattcaggtaaatggttggatgtgcctaaagagaaccgtctagctactcttgacatttttgctggctgtggaggtttatcagaagggctgcagcaagctggtgtatcttttacaaaatgggcgattgaatacgaagagcctgctggtgaagcatttaataaaaatcatccagaggctgtggtctttgtagataactgcaatgtgattctaaaggcaattatggataaatgtggggatactgatgattgtgtttcaacttctgaagctgctgaacaagcagcaaaacttccagaagtgaacattaataatcttccagtccctggcgaagttgaattcataaatggtggtcctccgtgtcagggattctctgggatgaatagattcaaccaaagcccatggagtaaagttcagtgtgagatgattctagcattcctctcattcgctgagtatttccgtcccagattctttctgttagaaaatgttcggaactttgtttccttcaacaaagggcagaccttccgtttggcagttgcatctcttctggagatgggataccaggtccggtttggaattctagaagcaggggcttttggtgttgcccagtccaggaaaagggcgtttatttgggctgctgcacctggagagatgcttcctgattggccagagccgatgcatgtgtttgctagccctgagctgaagataacactgcctgatggccaatactatgcagctgcaagaagcactgctggtggagcgcctttccgagcgattactgttagagatacaattggggatctgcctaaagtgggaaatggtgccagcaaactcacgcttgagtatggaggtgagcccgtgtcttggttccagaagaagataagagggaatatgatggtactgaatgatcacatatctaaggagatgaatgagctgaacctaataaggtgccaacacattccgaaacggccgggttgtgattggcatgacctaccggacgagaaggttaagctgtcaaatgggcagatggctgacctgataccttggtgcctgcccaacacagccaagaggcacaatcagtggaaaggactgtacgggaggctggactgggaaggcaacttccccacatccgtcactgatccccagccaatgggcaaggtcggcatgtgcttccaccctgatcaagacaggatcatcacagtccgggaatgtgctcggtcacagggctttcctgacagctatgaatttgcgggcaacatccagaacaagcaccggcagattggcaatgccgtgcccccgcctcttgcctatgcacttgggaggaagctgaaggaagccgttgacaagcgtcaggaagccagcgcaggcgtgcctgcaccatgagaagttttccttccatcaaaccatgacccatgaagctaagcgctgaggtcgtccttgaggaccagttaattttggttttatcagtcttaatgcactcctgaatgtatatgttagagaagtgtcgattgctgattgttaccctgattcagggtagcggttatatctaaaaacttgagaaaatctagtgtactctagttgtcatgtgttccattttgttggctctaaactttcaactagttttggtgattaatgacaacatgagattaaattaaattttgtagaggcatttaaattaggccactaatagtgactatttagtcgctcaatttttttgcccctaattatggaatttgtttttt

SEQ ID NO: 640 - DNA, 3442 bp, Zea mays
  source 1..3442: mol_type = genomic DNA
cttttcagtactgttattttaacttttgttcccctatataggcatatatctgattgatatgctgaccaatgatttttcaggaacaagaagatgcagagcaaagccacaaaagaaggaagaggaatccacagaaaacaacaagctggagaatggatctctggatgcaacagaagaggtgcatcatggagtcgaaaaaggtgatggacatgttacccgcaagagaccaaggagatcagcggcctgttctgatttcaaagagaaatccatacgcttatccgaaaaaaaatctgttgtcatggtcaagaagaatcggatggaggaggaagaagtagatgctgtcaatctgacaaaacttggaccagaagatccaccaccttgccggaagttgatcgattttatcttgcatgatgcagaagggaacccacaaccctttgaaatgtcagaaattgatgacttctttataacagctcttatcatgcccatggatgatgatctagaaaaagagcgtgaaagaggagtacgctgtgaaggatttgggcgaattgaggactggaatatttctggttatgatgaaggtactcctgtaatctgggtgtcaactgatgttgctgactatgaatgtgtgaaaccatcaaccaattacaaatcttattttgaccacttctatgagaaggctcaggtgtgtgttgaagttttcaaaaagcttgcaaaatcagttggtgggaatcctaaccagggcctggatgaattgcttgctagtgttgttcggtcaaccaatgccatgaaaggatatagtggaaccatgagcaaagatttggtgatatccattggagaatttgtatacaatcaacttgttggtttggatgagacatcaaacaatgatgatgaaaagtttgctaccctgccagttcttctttctctaagagaccagtgcagatctagggtggaactgaccaagttgccctctaacttctcgaacacaagtctgaaaattaaggactcagagtgtgatgagacagcagaagacgatgatgatgcaaaattagctagattacttcaacaagaagaagaatggaaaatgatgaagaaacagaggggtaggcgtggaacaccatcccagaaaaatgtctacataaaaatcagtgaagctgagattgccaatgactatccccttcctgcatactataagccatttagccaggaaatggatgaatacatatttgatagtgatgacagcatattttctgatgatgtgccagttaggatactcaataactggacactgtacaatgcagattccaggcttatatctttggaattgatccctatgaaatcaggggcagaaaatgatgtggttatctttggatctggtttcatgagagatgatgatggcagttgctgttctacagctgagtctgtgaaatcttcgtcttcctccagcaaagctgaccaactggatgcaggaatccctatttatttgagcccaatcaaagaatggattatagagtttggtggctcaatgatttgtataaccattcggactgatgtggcctggtacaagctacgccaaccaacaaaacaatatgctccatggtgtgagcctgtactgaaaacagcaaggcttgctgttagcatcattaccctgttgaaagagcagagtcgtgcctcaaagctttcttttgctgatgtcataagaaaagtagctgaatttgacaaaggaaaccctgcatttatatcttcaaacatcacacttgttgagagatatattgtggtgcatggacagataatactccagcagtttgcagattttccagatgagactatccgtcggagtgcatttgtcagtggtcttttattgaagatggaacagaggaggcatacaaagttagttatgaagaaaaaaactcaagtgatgaggggagagaatctgaatccaagtgcagcaatgggtccagcatcgaggaaaaaagcaatgcgtgcaacaacaaccaggctcatcaacagaatctggagtgattactatgcacatcatttccctgaagattccaaggagggagatggaaatgaaacaaaagaaattgatgatgaacaagaagaaaatgaagatgaggatgctgaagatgaagggcagattgaagagaacatctcaaagactcctccatcaacacggtcccggaagttgctatcacaaacttgtaaggaaatcagatgggaaggtgaaacatctgggaaaacattgtctggagaaactctatataaatgtgcttatgttagggaactcagaatacctgttggtggaacagtggctctagaagatgattcaggagacacagtcatttgttttgttgagtacatgttccagaaagttgatggttcaaaaatggttcatgggaggattctgcaaaaaggttcacagacaattcttggcaatgcggcaaatgagagggaggttttcttaactaatgactgcttagaattcaaattagatgacatcaaggaattggtaatggttgatatccaatcaaggccttggggtcacaagtacagaaaagagaattctgaagctgataaagttgagcaggtcaaagcagaagagagaaagaaaaagggccagcccatggtatatttctgcaaaagcttgtactggcctgagaagggtgccttctttgccctctcccgagataaaatgggtcttggtagtggtttatgtagttcttgtgataatatagagccagattctgatgaattgaaaatattctcgaagaccagctttgtctacagaaaggttacatataatgtcaatgagtttttatacataagacctgatttttttgctgaagatgaggatcgtgcaaccttcaaggctggccgaaatgtgggtctaaagccctatgcagtttgtcaaatattgtccatccctgaaggggctggatctaaaaaactcaatccagcatcagcaaatatcagtgctagaagattttacagaccagatgacatttcatcagccaaagcctatgcatctgacatcagagaggtctactatagtgaggatgtaattgatgtgcctgtggatatgatagagggaaaatgtgaggttagaaagaagaacgatcttgcaagttcagaccttccagtgatgtttgaacatgtatttttctgtgaacttatatatgaccgtgccagtggagctctcaagcagttgcctccaaatgttaggtttatgtctatggtgcaaaggacaagtgcgttgaaaaagaacaaaggaaagcagatctgtgagcctgatcaaatagattcaggtaaatggttggatgtgcctaaagagaaccgtctagctactcttgacatttttgctggctgtggaggtttatcagaagggctgcagcaagctggtatgtattgttaacactgatgctgtataccatgaacatgaccaacaaat

SEQ ID NO: 641 - DNA, 5028 bp, Zea mays
  source 1..5028: mol_type = genomic DNA
cttttcagtactgttattttaacttttgttcccctatataggcatatatctgattgatatgctgaccaatgatttttcaggaacaagaagatgcagagcaaagccacaaaagaaggaagaggaatccacagaaaacaacaagctggagaatggacctctggatgcaacagaagaggtgcatcatggagtcgaaaaaggtgatggacatgttacccgcaagagaccaaggagagcagcggcctgttctgatttcaaagagaaatccatacgcttatccgaaaaaaaatctgttgttatggtcaagaagaatcggatggaggaggaagaagtagatgctgtcaatcttacaaaacttggaccagaagatccaccaccttgccggaagttgatcgattttatcttgcatgatgcagaagggaacccacaaccctttgaaatgtcagaaattgatgacttctttataacagctcttatcatgcccatggatgatgatctagaaaaagagcgtgaaaaaggagtacgctgtgaaggatttgggcgaattgaggactggaatatttctggttatgatgaaggtactcctgtaatctgggtgtcaactgatgttgctgactatgaatgtgtgaaaccatcaaccaattacaaatcttattttgaccacttctatgagaaggctcaggtgtgtgttgaagttttcaaaaagcttgcaaaatcagttggtgggaatcctaaccagggcctggatgaattgcttgctagtgttgttcggtcaaccaatgccatgaaaggatatagtggaaccatgagcaaagatttggtgatatccattggagaatttgtatacaatcaacttgttggtttggatgagacatcaaacaatgatgatgaaaagtttgctaccctgccagttcttctttctctaagagaccagtgcagatctagggtggaactgaccaagttgccctctaacttctcgaacacaagtctgaaaattaaggactcagagtgtgatgagacagcagaagacgatgatgatgcaaaattagctagattacttcaacaagaagaagaatggaaaatgatgaagaaacagaggggtaggcgtggaacaccatcccagaaaaatgtctacataaaaatcagtgaagctgagattgccaatgactatccccttcctgcatactataagccatttagccaggaaatggatgaatacatatttgatagtgatgacagcatattttctgatgatgtgccagttaggatactcaataactggacactgtacaatgcagattccaggcttatatctttggaattgatccctatgaaatcaggggcagaaaatgatgtggttgtctttggatctggtttcatgagagatgatgatggcagttgctgttctacagctgagtctgtgaaatcttcgtcttcctccagcaaagctgaccaactggatgcgggaatccctatttatctgagcccaatcaaagaatggattatagagtttggtggctcaatgatttgtataaccattcggactgatgtggcctggtacaagctacgccaaccaacaaaacaatatgctccatggtgtgagcctgtactgaaaacagcaaggcttgctgttagcatcattaccctgttgaaagagcagagtcgtgcctcaaagctttcttttgcagatgtcataagaaaagtagctgaatttgacaaaggaaaccctgcatttatatcttcaaacatcacacttgttgagagatatattgtggtgcatggacagataatactccagcagtttgcagattttccagatgagactatccgtcggagtgcatttgtcagtggtcttttattgaagatggaacagaggaggcatacaaagttagttatgaagaaaaaaactcaagtgatgaggggagagaatctgaatccaagtgcagcaatgggtccagcatcgaggaaaaaagcaatgcgtgcaacaacaaccaggctcatcaacagaatctggagtgattactatgcacatcatttccctgaagattccaaggagggagatggaaatgaaataaaagaaattgatgatgaacaagaagaaaatgaagatgaggatgctgaagatgaaggacagattgaagagaacatctcaaagactcctccatcaacacggtcccggaagttgctatcacaaacttgtaaggaaatcagatgggaaggtgaaacatctgggaaaacattgtctggagaaactctatataaatgtgcttatgttagggaactcagaatacctgttggtggaacagtagctctagaagatgattcaggagacacagtcatgtgttttgttgagtacatgttccagaaagttgatggttcaaaaatggttcatgggaggattctgcaaaaaggttcacagacaattcttgacaatgcggcaaatgagagggaggttttcttaactaatgactgcttagaattcaaattagatgacatcaaagaattggtaatggttgatatccaatcaaggccttggggtcacaagtacagaaaagagaattctgaagctgataaagttgagcaggtcaaagcagaagagagaaagaaaaagggccagcccatggtatatttctgcaaaagcttgtactggcctgagaagggtgccttctttgccctctcccgagataaaatgggtcttggtagtggtttatgtagttcttgtgataatatagagccagattctgatgaattaaaaatattctcgaagaccagctttgtctacagaaaggttacatataatgtcaatgagtttttatacataagccctgatttttttgctgaagatgaggatcgtgcaaccttcaaggctggccgaaatgtgggtctaaagccctatgcagtttgtcaaatattatccatccctgaaggggctggatctaaaaaactcaatccagcatcagcaaatatcagtgctagaagattttacagaccagatgacatttcatcagccaaagcctatgcttctgacatcagagaggtctactatagtgaggatgtaattgatgtgcctgtggatatgatagagggaaaatgtgaggttagaaagaagaacgatcttgcaagttcagaccttccagtgatgtttgaacatgtatttttctgtgaacttatatatgaccgtgccagtggagctctcaagcagttgcctccaaatgttaggtttatgtctatggtgcaaaggacaagtgcgttgaaaaagaacaaaggaaagcagatctgtgagcctgatcaaatagattcaggtaaatggttggatgtgcctaaagagaaccgtctagctactcttgacatttttgctggctgtggaggtttatcagaagggctgcagcaagctggtgtatcttttacaaaatgggcgattgaatacgaagagcctgctggtgaagcatttaataaaaatcatccagaggctgtggtctttgtagataactgcaatgtgattctaaaggcgattatggataaatgtggggatactgatgattgtgtttcaacttctgaagctgctgaacaagcagcaaaacttccagaagtgaacattaataatcttccagtccctggcgaagttgaattcataaatggtggtcctccgtgtcagggattctctgggatgaatagattcaaccaaagcccatggagtaaagttcagtgtgagatgattctagcattcctctcattcgctgagtatttccgtcccagattctttctgttagaaaatgttcggaactttgtttccttcaacaaagggcagaccttccgtttggcagttgcatctcttctggagatgggataccaggtccggtttggaattctagaagcaggggcttttggtgttgcccagtccaggaaaagggcgtttatttgggctgctgcacctggagagatgcttcctgattggccagagccgatgcatgtgtttgctagccctgagctgaagataacactgcctgatggccaatactatgcagctgcaagaagcactgctggtggagcgcctttccgagcgattactgttagagatacagttggggatctgcctaaagtgggaaatggtgccagcaaactcacgcttgagtatggaggtgagcctgtgtcttggttccagaagaagataagagggaatatgatggtactgaatgatcacatatctaaggagatgaatgagctgaacctaataaggtgtcaacacattccgaaacggccgggttgtgattggcatgacctaccggacgagaaggttaagctgtcaaatgggcagatggctgacctgataccttggtgcctgcccaacacagccaagaggcacaatcagtggaaaggactgtacgggaggctggactgggaaggcaacttccccacatccgtcactgatccccagccaatgggcaaggtcggcatgtgcttccaccctgatcaagacaggatcatcacagtccgggaatgtgctcggtcacagggctttcctgacagctatgaatttgcgggcaacatccagaacaagcaccggcagattggcaatgccgtgcccccgcctcttgcctatgcacttgggaggaagctgaaggaagccgttgacaagcgtcaggaagccagcgcaggcgtgcctgcaccatgagaagttttccttccatcaaaccatgacccatgaagctaagcgctgaggtcgtccttgaggaccagttaattttggttttatcagtcttaatggactcctgaatgtatatgttagagaagtgtcgattgctgattgttaccctgattcagggtagcggttatatctaaaaacttgagaaaatctagtgtactctagttgccatgtgttccattttgttggctctaaactttcaactagtgttggtgattaatgacaacatgagattaacttaaattttgtagaggcatttaaattatgccactaatagtgactatttagtcgctcaatttttttgcccctaattatggaatttatttttt

SEQ ID NO: 642 - DNA, 3442 bp, Zea mays
  source 1..3442: mol_type = genomic DNA
cttttcagtactgttattttaacttttgttcccctatataggcatatatctgattgatatgctgaccaatgatttttcaggaacaagaagatgcagagcaaagccacaaaagaaggaagaggaatccacagaaaacaacaagctggagaatggacctctggatgcaacagaagaggtgcatcatggagtcgaaaaaggtgatggacatgttacccgcaagagaccaaggagagcagcggcctgttctgatttcaaagagaaatccatacgcttatccgaaaaaaaatctgttgttatggtcaagaagaatcggatggaggaggaagaagtagatgctgtcaatcttacaaaacttggaccagaagatccaccaccttgccggaagttgatcgattttatcttgcatgatgcagaagggaacccacaaccctttgaaatgtcagaaattgatgacttctttataacagctcttatcatgcccatggatgatgatctagaaaaagagcgtgaaaaaggagtacgctgtgaaggatttgggcgaattgaggactggaatatttctggttatgatgaaggtactcctgtaatctgggtgtcaactgatgttgctgactatgaatgtgtgaaaccatcaaccaattacaaatcttattttgaccacttctatgagaaggctcaggtgtgtgttgaagttttcaaaaagcttgcaaaatcagttggtgggaatcctaaccagggcctggatgaattgcttgctagtgttgttcggtcaaccaatgccatgaaaggatatagtggaaccatgagcaaagatttggtgatatccattggagaatttgtatacaatcaacttgttggtttggatgagacatcaaacaatgatgatgaaaagtttgctaccctgccagttcttctttctctaagagaccagtgcagatctagggtggaactgaccaagttgccctctaacttctcgaacacaagtctgaaaattaaggactcagagtgtgatgagacagcagaagacgatgatgatgcaaaattagctagattacttcaacaagaagaagaatggaaaatgatgaagaaacagaggggtaggcgtggaacaccatcccagaaaaatgtctacataaaaatcagtgaagctgagattgccaatgactatccccttcctgcatactataagccatttagccaggaaatggatgaatacatatttgatagtgatgacagcatattttctgatgatgtgccagttaggatactcaataactggacactgtacaatgcagattccaggcttatatctttggaattgatccctatgaaatcaggggcagaaaatgatgtggttgtctttggatctggtttcatgagagatgatgatggcagttgctgttctacagctgagtctgtgaaatcttcgtcttcctccagcaaagctgaccaactggatgcgggaatccctatttatctgagcccaatcaaagaatggattatagagtttggtggctcaatgatttgtataaccattcggactgatgtggcctggtacaagctacgccaaccaacaaaacaatatgctccatggtgtgagcctgtactgaaaacagcaaggcttgctgttagcatcattaccctgttgaaagagcagagtcgtgcctcaaagctttcttttgcagatgtcataagaaaagtagctgaatttgacaaaggaaaccctgcatttatatcttcaaacatcacacttgttgagagatatattgtggtgcatggacagataatactccagcagtttgcagattttccagatgagactatccgtcggagtgcatttgtcagtggtcttttattgaagatggaacagaggaggcatacaaagttagttatgaagaaaaaaactcaagtgatgaggggagagaatctgaatccaagtgcagcaatgggtccagcatcgaggaaaaaagcaatgcgtgcaacaacaaccaggctcatcaacagaatctggagtgattactatgcacatcatttccctgaagattccaaggagggagatggaaatgaaataaaagaaattgatgatgaacaagaagaaaatgaagatgaggatgctgaagatgaaggacagattgaagagaacatctcaaagactcctccatcaacacggtcccggaagttgctatcacaaacttgtaaggaaatcagatgggaaggtgaaacatctgggaaaacattgtctggagaaactctatataaatgtgcttatgttagggaactcagaatacctgttggtggaacagtagctctagaagatgattcaggagacacagtcatgtgttttgttgagtacatgttccagaaagttgatggttcaaaaatggttcatgggaggattctgcaaaaaggttcacagacaattcttgacaatgcggcaaatgagagggaggttttcttaactaatgactgcttagaattcaaattagatgacatcaaagaattggtaatggttgatatccaatcaaggccttggggtcacaagtacagaaaagagaattctgaagctgataaagttgagcaggtcaaagcagaagagagaaagaaaaagggccagcccatggtatatttctgcaaaagcttgtactggcctgagaagggtgccttctttgccctctcccgagataaaatgggtcttggtagtggtttatgtagttcttgtgataatatagagccagattctgatgaattaaaaatattctcgaagaccagctttgtctacagaaaggttacatataatgtcaatgagtttttatacataagccctgatttttttgctgaagatgaggatcgtgcaaccttcaaggctggccgaaatgtgggtctaaagccctatgcagtttgtcaaatattatccatccctgaaggggctggatctaaaaaactcaatccagcatcagcaaatatcagtgctagaagattttacagaccagatgacatttcatcagccaaagcctatgcttctgacatcagagaggtctactatagtgaggatgtaattgatgtgcctgtggatatgatagagggaaaatgtgaggttagaaagaagaacgatcttgcaagttcagaccttccagtgatgtttgaacatgtatttttctgtgaacttatatatgaccgtgccagtggagctctcaagcagttgcctccaaatgttaggtttatgtctatggtgcaaaggacaagtgcgttgaaaaagaacaaaggaaagcagatctgtgagcctgatcaaatagattcaggtaaatggttggatgtgcctaaagagaaccgtctagctactcttgacatttttgctggctgtggaggtttatcagaagggctgcagcaagctggtatgtattgttaacactgatgctgtataccatgaacatgaccaacaaat

SEQ ID NO: 643 - DNA, 2574 bp, Zea mays
  source 1..2574: mol_type = genomic DNA
ctgatgtggcctgtggcaatgcaggtgtccgtactctgcgcttaaatcctttccgggtggagttcttgcctttctcgccgcttccgactctgccatgccaccatagatccagctagggcgttcaatcctgtgcgagagtacgcgaaatcgccgccggattgatattgaccaggggtttctccgcccaactgaggtttcgctgccatttgcagggaccgtgctccagttcggcctttcgggggaaaaggaatcgtatctgctgaatccccgggctccggggatggatcttgacatggacggctacgtagacccctacgaggaggccgcggccgagggcgactccgacgaccctgacgaggacgactcggatgcggagagcgactacgaggagaagtcgttcggcctcctcaagtccggcaagcaccgggtgcgcaacccggacggcaccttccgctgccccttctgcctcggcaagaagaagcagggttacaagatcaaggacctcctccagcatgccgacggcatcggcgtctccagcaagcaccgacgtcacggccgcgaacgcgcgaaccaccgcgcctttgcacgctttgtccgcaccgatccgtcctttgcggaagacctcgtcggtataactggcattcaaggtgccattacaactacccctgctaatgagaactacagcgccaatggcaacgggaaggccaaggctaatgtagatactgctggttccagttctgtggcggcaaaagtgggtccgccacaggaggttgagaggtttgcttggccgtgggcttgtgttcttgcagctggggcaggctttaatgctgaggactttgttggtagagtagcattgttcagttcggttgaggttgtgcctttgtttgtcgatgagatggaagtcacagaaaccttcgcaattgtgaggtttaccaatgattggagtggattcaatgatgcacttacgatagagaactatttcagcgtcaataagcttggtaagaaggaatttcagatgagagatagtggtcttggttccgtggagggagatggcgaaggcgatgtcaaggtttatgggtgggttgcccgagctgaggactacgatgcaacgactgtggtaggaagattcttgagaaagcacactgtcctgcaaacaatagacgaggtttccaagactgaattagagaaatcaggggagatggtggcgatactggcatcccagatcgaggaaaagaaccgatacttgcaggatttggagacaaagaagaatgcgacagaactctccatctcaaggcttgaggaggacaacaggaaacttcatgaggcatacaatgaagaaatgcgcaatcttcatcgcagggctcgtgaaaatgcgctacggattttccaagagaatgaaaacttgaggattgacttagaaaataagaggagagaactgaacttacgagctaaggagcttgaaaaaatgtcagctgagaatgctaacgacaggaagacactcgatgatcagaagcagaagacaaagtatgataatagtgaacttgagctagctagcatagagcaacagagggctgatgcagatgttctgaagctattggctgaccaagagagggaaaaggaagatgtacttgctagaatgcttcagctggaaaaagagctgcatgagaagcaacagcttgagctcgaagtagaacggttgaatggtacactccaagtgatgaaacatctagagggagacgatgacgggggagatatccatgaaaagatggagaagctgagtgaaagatttgagcgggaaaagaagcgcctggaggatttgagtggtgatctggtgacaaaagagcgtgaaagtaatgatgagctacaacaagcccgaaaagaattgataaagggtttggaggaagagctaaatggacggacagctgttgggatcaaaagaatgggggaactcgatgaaaagcctttcctaaatgcatgtaagagaaaatatgggaacaatgaataccaggtcaaagcagcagagctggtcacaaattggcaggaggaactaaagaatccatcctggtatccttttaagatgattcatgttgacggagaggacaaggaaattctggttgacgatgatacgaaactgaagtttctgtggattgagtttggcgatgacgtgtgtaatgcggtgaagacggcattgatggagataaacgagtataacccaagtgggaggtatgttgtgcccgagctgtggaacttcaggaaaggcaggaaggcgacgatgaaggaggtgctcaagtacctgttcagtcagatggacacgacgaccaagcgcaggaggggctgagtaggtgcccttggccatgccgtgaagcccagtcgtgtgctgctcgatcccgtagtggcagtctgtcttgtactgtgtagtgacatctgacgtaataatgttcaggcttgggtatggtttgagctaacgagccatatagtgtgcttggctaggctcgtttacgagctctttagctcgcgagtcaggtgagaacagaaaaaacaatatgtatataataattaatttctagttaattt

SEQ ID NO: 644 - DNA, 2931 bp, Zea mays
  source 1..2931: mol_type = genomic DNA
atttaataatttgctaaatctgagttttttagtaaccagggtagatatgatagtaaagattgttcagctcgacgcaaacgacaaaaccatcttgaaaatggcagaaagaaaaaattcagaaggagccctcgaatcccggtcctaggaaccgtctgtcaacgcggtcggggtacttgagtgcctttttcttctctcacgtgcgcccctaaaccccagtgtgctgtgctaatggggatcgaacgccctgcgcttaaatcctcgggtagaactctcgcctcttccgactccgccataccaccaatagatccagctatggcggtgtagtcgaattcaatcctgtgcgagaaaacacgaaatcgccgctggctcgatattggccagggctttctccgcccaactgcatcttgcagcgactgtgctccagttcgggggaaaaaaaggaaccgtatctgcttgaatccctgcgctccggggcggggatggatcttgacctggacgactacgtggacccctacgaggaggccgaggccgaggctgccgcggcggaggacggctccgacgaccccgacgaggacgactcggatgcggagagcgactacgaggaggagtcgtttggcctcctcaagtccggcaagcaccgggtgcgcaacccggacggcaccttccgctgccccttctgccccggcaagaagaagcaggggtacaagataaaggacctcctccagcacgccgacggcatcggcgtctccagcaagcaccgccgtcacggccgcgagcgcgcgaaccaccgcgccttcgcgcgctttgtccgcaccgagccgtcatttgcggaagacctcgtcggtatcactggcattcaaggtgccattaaacccacccctgctaatagagatggcagtaccaatggcgacgggaaggccaaggctaatgtagatactgctggatccagttctgtggcggcgaaagtgggtctgccgcgggaggttgagaggttttcttggccgtgggcttgtgtccttgcggctggggcagggttcaatactgaggactttgctggtagagtagccatgtttagttcggttgaggttgtgcctttgtttgtcgatgaggtcgaagtcgcagaaacctttgcagttgtgaggtttaccaatgattggagcggattcagcgacgctcttacgctggagaaccatttcagcatcaataagctagggaagaaggaatttgagatgagagataatggtataggttccgtggagggagatggtggcgaaggtgaggtcaaggtttatgggtgggttgcccgagctgaggattatgattcgccgagtgtggtagggagattcttgagaaagcacaccgtcctgaaaacaatagacgaggtttccaagactgaattagagaaatcaggggagatggtggcaatactggcatccaagatcgaggaaaagaaccgacacttgcaggatttggaaacaaagaagaatgcgacagaactctccatctcaaggcttgaggaggacaacaggaaactacatgaggcatataatgaagaaatgcgcaatcttcatcgtagggctcgtgaaaatgctttgcggattttccaagagaatgaaaacttgaggattgacttagaaagtaagaagagagaactgaacttgcgagctaaggagcttgacaaaatatcaactgagaatgctaacgacaggaagacacttgataatgagaagcagaaggcaaaatacgataacagtgaacttgagctagcaagtatagagcagcagagggctgatgcagatgttctgaagctattggctgaccaggagagggaaaaggaagatgtacttgctagaatgcttcaactagaaaaagagctgcatgagaagcagcagcttgagctcgaagtagaacggttgaatggtacactccaagtgatgaaacatttagagggagatgatgacgggggagatatccatgagaagatggagaagctgagcgaaagatttgagcgtgaaaagaagcgtctggaggaattgagtggggatctcgtgaggaaggagcgtgaaagtaatgatgagctacaagaagcccgaaaagaactgataaagggtttggaggaagagctaaatggacggacagctatcggggtcaaaagaatgggggaactcgatgaaaagcctttccaaaatgcatgtaaaacaaaatacggaaaggatgagtacgagatcaaagcagcagagctagtcacaagttggcaggatgaactaaagaagccatcctggcatccttttaagatggttgaggttaacggagaaaataaggaaattctggatgacgatgacacaaaactgaagttcctgtggatcgagtacggcgatgatgtgtgcaatgcggtgaagaccgcactgatggagattaacgagtataaccctagcgggaggtatgttgtgccggagctctggaactttaggaaaggccggaaggcgacggtgaaggaggtgctcaagtacctgttcagtcagatggacacgacgacgaagcgcaggaggggctgaggaggtgcctgatgccgagtagtgccttctatgttgttgcatcagtcgtgtgctgctcgatccccaagtggcagtctggcataggagatgcccctcttgtgtagtgaaatctggcacgataaagtgcccgcgatccaggcttgggtatgccttatgcatcatgttcatatgcttgtgcatgtggtgctgttgccgcaggcgccctagcctaacctgtatgattgttgagatgagtagtctttcttgctgctgttactcccttcgcccctcaatgtctctgaataaatcaattcctaaagttatcataaaatcgagcttttttaatcagactttttaaagtttaactgaacttatagaaaagagtcaggatttatga

SEQ ID NO: 645 - DNA, 2440 bp, Zea mays
  source 1..2440: mol_type = genomic DNA
gtttggcgggcgccgcgcgtatgtttctcgttgcgacttggaggagaaggagattcgccgtctcaccccttccctgcctgctccctcgtctaagaaaagcgggcagagcagagacggcggcggcaggccatcgcggactcccgctcaccctcgtctgccaccgcctcccaggtcaggggccgacggcgacgggtggggaggggcggcagaggtagtccgaggggaggctgtggagcggagggcggagagaggccacgccgtccggagtctccagttccgtcgccacagcttcctgccgcgcctgggccgaggtaaacgagagggatcgaggaagaagtatcccccggagccccttcccccgaacccgaaggctccggaatggcgcactgggttagcgacagtgatggcagtgacaactttgaatgggatagtgatggcaatggggaggagccagcgaacttcaatgctgctggtgccggttcatcagctctgagatcaacgaacactgatgctccaggtccatcaacacgggttgctaatggcaatgggaaggctgggccatctgcctccttggttcaaaagtatatggacatgggtttcacggaagagattgttcggaaggccatgaaggacaatggggataatggagcagattcattagttgagcttcttcttacttaccaggaactaggcaatgacctcaaagtggataacggcttcgcttctggttgtgccccccaaactgttgatgatagtgatgatgacgacattctagaaaactgggatgatgaggatgctgatggtgggagaagcaccagggttgctaactctattgatgattctgaagacgaggatttcttaaatgagatgtcacagaaggacaagaaagttgattccttagttaaaatggggtttcctgaagacgaggctgcactggctattactagatgcgggcaggatgcatctatttctgttctggtggattccatatatgcttcacagaccgcaggagatggttactgtggcaatttgtctgactacgagggtaattccaatggagggagaaacaaaggaaggttcatggacgggaacaaaaaaaagagaaaaagatatggaggtcaagcacagggaaatagaggcccattagatggtagctgtgaagaacccatgcctctcccaaatccaatggttggatttaatttgccggaccattggacaagaccagtagacagatcgctgcctacacaagctattggaccaccatacttctactacgagaatgttgctcttgctccaaagggtgtctggactaccatatctagattcttgtacgatattcagccggagtttgtggactccaagtacttctgcgctgctgccaggaaaagaggctacatacacaatctaccacttgagagaaggtcgcctctcctccccttacctccgaagacaatatttgaagcatttcctcgtaccaagaggtggtggccttcatgggacccaaggcggcagttcaattgcctccagacttgtacgtctagcgcaaaactgttagagaggattcgtgtaacccttgcaaacagttcggatccaccacctccattagttcagaagtttgtgctggaggagtgtaggaaatggaatctggcttgggttggcctaaacaaggttgctcccctagagcctgatgagatggagttcctgcttggctttcccaaggatcacaccagaggtatcagcaggacagagaggtaccgatctcttggaaactcgtttcaggttgacactgttgcttaccatctctcagtcctcaaggataggtacccacaaggcatgaacgtgttgtctctattcactggcatcggaggagccgaggtggctctccataggctcggtatacgcatgaacacagtcgtttcagtagagaagtctgaggtgaacaggactattctgaagagctggtgggatcagacacagactggtaccttgattgagatcaatgatgtgcagacgctgacagctgataggatcgaggcatatattagacgaattggcggctttgatctcgtgataggtggaagcccatgcaacaatctcgctgggagcaaccgccaccacagagatggcttggagggcgaacattcttcattgttttaccattattttaggatcttggactccgtcaagtccatcatggagcgcctgtagtttttagaaacttttgatgttctggttcgtagaattgtagccgtctttccctgtgatcaaacttgtgaatgatttgaaggtcgactggtgtaatattcatgtcactctaatttaggctactttcgttaattacctcttgtgatcaatgcaaattgaaaggcaggtttcatttcttaagtttgtatttctcaatgcgagatctagtatctttgtcgaaaaaaaaaacctaaaa

SEQ ID NO: 646 - DNA, 2058 bp, Zea mays
  source 1..2058: mol_type = genomic DNA
gagattctgatatatcaagcttcgtgattttggaagctatgacaacacttagatgctgtgaggacttctctatggagcgattagagttattgggggactctgttcttaagtatgcagtgagtgcccatcttttcatgacatttcttaataagcatgagggacagttatcgtccagaaggcaagaaacaatatgtaatgccacactttataggcttggtattgaacgcaggatacagggttacatacgtgatgctgcatttgatcctcgtcgatggcttgctcctggacagctgtccagacgtccttgtccttgtgaatgcccagtaaattctgaggttgtaactgaggatattcataggattgatgacaagtctataattataggcaaggcgtgtgacaagggacacagatggatatgttcgaaaaccatctctgattgtgttgaggctctaattggggcctattatgtcgaagggggattaaaagcagcttttgctgttctcaaatggttccagattgagactgaaatcgaggaagagttaattatggaagctctgtcgagtgcttcagtgcgaaactatcttccaaaagttgatgtagttgaattgcttgaagcaaaactaggctacacttttcaaatgaaaggtttgttaatagaggctctcacccactcatcacagcaagaatctggagcaacatactgctaccaacgcttggagttccttggtgatgcagtcttggatattttaataactcgccatctgttccttagtcataaagacacagatgagggggagctgacagatttacggtctgcatcagtaaataatgagaattttgcacaagttgcggtaaagcacaatctccatcagtttctacaacattcttcggggttcttacaagaccaaattactgaatatgtgaatagtcttgaaagttcgtccatggacagagccagccttttatccagtggaccatgtagggggccaaaagttttaggtgatattgtagaaagtatagcaggtgctattcttattgacagcaaacttgatttggatttagtttggcgggtttttaaacctcttctttcaccaattgtcacacctgagaatttggagttgccccgattcagagaacttaatgagtggtctgacaagaatgggtactttattggaattaagtgtgaaaatcgaggagacagcacaatggctatccttaacttacaactcaaggatttgcttcttgtgaggcaaggttgtgggaagaataaagtagatgcgaaagcacatgcagcttccttattgcttagggatctagaggaaaaaggacttataattccaaggaatgcaagcagagtggaacaacttgaaaagaattctggtactgtaaaacattgcaacaacgtgcttgatgttatggacacacaaaacgtagcaccacctaggcaaaaggaagtagctgtgttaagtaccaccactcctggctctgttcttgataagccattggttgtgaaggttaagttgagcaaaggaggacctcgtatatcattgtacgagtcgtgtaaaaagcttcagtggccaatgccgacctttgaattcgtgaaggtcgaaccaagcgtgtgctcctcttcctgtggttcgtcacaaaaggttgcgccccaaggattcgcatttgcttcgacaataacgttgcatataccgaacggcgatgtcatcagcctcacaggagatgggcgtgcggataagaagagctcacaggattctgctgcgttgctcatgctctatgagctgcagcggcaacgtagattccaagttcaagaagtatgaggaatcacctcgtggttccatcaccaaagatgcaatgttaccgccaccggcgattattgcttgggcatcttggagtaatgtcaccgccaaatcagtctttagtcgtcagccgcacgggggtgtaagaaaataatgtacttcattctgattctaaattataagacaccccgaattatgtaatctaattatcataatgtcctataatttgaaatggagcggtgttggttactct

SEQ ID NO: 647 - DNA, 4715 bp, Zea mays
  source 1..4715: mol_type = genomic DNA
ggcgccacccacacccaccgcctcacgcacttcgccttctcgcccagttcagctcctctctcccccttccgccgtgtctcgctcctcctggctatgccgatttataaacccccaccgcgccatgcgctccccaccgccacagccactccacccgcaccgaaccaatggcggacgccgccacctccgaggatgccgacctgccgcccccacctccgccggcgcagctcccgcctcctcgccgcccgcacaagcggcttcagccgcgggggtaccaggtggaggtgttcgctgcggcgctgcgcgggaacaccatcgcggtgctagacactggctctgggaaaaccatggtcgctatcatgctcgcgcgggagcacgtcctccgcgcgcgcgctggggaggcgctgcgccggatcgtggtattcctcgcgcccaccgtgcacctcgtccaccagcaattcgaggtgattcgggagtatacagacctcgacgcggtggagtgccatggggcatcgggggttggccactggaacgccaagcgctggaaggaagcaattgggactaaggagattgttgttatgacaccacagatactattggatgctctcaggcatgcttttctaacaatgcgtgtgatgagcttgttaatatttgatgaatgccatcgtgcttgtggaaaccatccatactcactaataatgaaggaattttacattgattcggagtggaggccagctatatttggaatgacggcgtctccagtttctaaaaagggagcttctactatagaagattgtgaagcacagattgctcaacttgagctagtattggatgccaaggtatatattgttgaagataggaatgaacttgagagcttttcaactggtgcaaaagttgtgaataaatactatgacccttacttgtttgatttggataatctggaatcaaagttacagatgctgtttgaggaggtggtgaagatatataatgaaagcattaataccatagatgattctgaagattgcgtattttctaaagagagcctcaacttacaggtttcctatttcaaagaagctttatttttgattgaagattttttgccacagggttatggggagctgatgaaatcagaatctggttctgcggaactaactaagaagggatatatttcttctaaagtggagtcactgatcaacattttcaaatcgtttggctcgtcagaggaagtgctttgcatgatttttgtagaaagaattacgacagccaaagctgttgaaaggtttatgagaggaaatgtgaacttctctcgtttttcaatttcatacttgactggagggagtacatcaaaagatgctttgagcccagcagtacaaagatttactttggatttgttccgagctgggaaggtgaatttgctttttacaacagatgtcactgaagagggtattgatgtacctaactgttcctgtgtgatacgttttgacttacccagaactgtttgtagctatgtccagtctcgtgggcgtgccagaaaaagcagttcaagttatgttcttatgattgaaaggggtaacttggcgcagcaggaacacatatttcgtataatacgaactgaatactatgttaaaacctttgcactgcataaacaaccaaatactccatcacttgatttgcctctccaagagaagtacatataccatgttgaatcaacaggagcaactatcaccgcagaatgctgtgtcaacctaatttataaatattgtgagaagcttcctaaagataggtattacttgccaaagccttgctttgaggtgggtcttaaggatgggtcatatcaatgtaccttgacaatgcctcacaatgctgcatttcgaagtatagttggtcctccaagtagttcatgtaatttagccaagcagcttgtatgcctggaggcatgcaagaaactgcacgagctgggagaactcgatgatcatctagtacccttgactgaagagcctatggatattgatacagacacaacagataaaaaatgtgtttctggaccaggaacaactaaacgaaaggagcttcatggaacgataaatgttcatggtctatctggaaactggatccatgaaagtgaaactgtgattctgaatgcttacacatttgattttcgttgtgatcaagaaggtgaactttatgctgggttcgttctcttaatggaatcagtacttgatgatgatgtggcacgttcagagatagatctcttccttatacctaataaaatggtgtacaccaccatgactccttgtggaaaaattcaactgaacaaagagcagctgtgtaaaggaaaattattccaagaattcttcttcaatggtatatttggtagattatttcatggttcccgaacggatgaactgcaaagggaatttattttcacaaaaggtcatgaaatacaatggggctcagacaacatgtacttacttttgcctttgaggaactcttcacagatacaacatgatccaaacatatactgggaagccgttgagtcttgctctggtacagtagagcagttgagaaatttgtatctagaagatggaaatctcaaccatgaaaacttatgttcacataaaagaagcaacaagggagaagacatcattcatctggccaataaatctcttcatttttccacagtcaaagattcagttgtactatctcttcatactgggaggatctattctgttcttgacttgattttagataaaactgcagatgactcatttgatgagatgtataatgggaaagcttcaccatttgcttcatttgtggactactaccatcaaaagtatggtattgttattcaacatccagggcaacctttgttgctgttaaagcaaagtcacaatgcacacaacttacttttttcaaaaatgaagtaccaagatggttcaactggcaatcctctgctcgtagaaaaagagcaaattcatgcccgagttccacctgaactactcatccatattgatgtcgcaactgatattctcaaatcattttacttgctcccttctgtaatgcatcgggttcagtctttaatgttagccagccagcttcgcagcaacattagttacattcaacgcataccaagttctctgattttggaagctataacaactttaaggtgctgcgagtccttttctctggagcggttagagttattaggagactcagtactgaaatatgtaataggatgtgatctgttcctaagatacccaatgaaacatgaaggccatctctctgatatgagatccaaggcggtatgcaatgcgacactgcataaacatggaatatggcaatccctgcagggttatatacgtgatgctgcatttgaccctcgtcgttgggttgctcctggacagatatcattgcgcccttttccttgtaattgtggaatcgaaactgcatttgttccttttaatggaggttatatcagtgacgatccatcttttgttgtgggaaaaccatgtgacagaggccacagatggatgtgctcaaaaacagtatctgattgtgttgaagcactagttggagcatattatgttggtggtggcatcgctgctgcaatttgggttatgaggtggtttggtattgatgtcaggtgtgatatggaactagtgcagaaagcaaaatataattctaatgcatctcgaatgtgctatttatcaaaaataaaagatattgaggaactggaagcaaaactgaagtacaacttctcggtcaaaggccttctgcttgaagccatatcacatccatctgtacaggaattaggagttgactattgttaccagcgtctggaatttcttggtgattctgtgctggatctattaatcacacagcatctctatgctacccacactgatgttgatcctggagaattgacagacctgcgttccgcttcggttagtaatgagaattttgcacaagcagttgtaagaaacaatattcataatcatctacagcatggatctggaatacttttggaacaagtaacagaatatgtcaggtccaacttggagtaccatggtaaagagaatcaattccttcaacaagctacatgcaaagcacctaaggttcttggagacatcatggaaagtattactggtgcaatatttatagatgtaaattttgatgttgatctggtttggaagattgttgaaccgttactttctccaatgattacccctgataagcttgcgttgccaccttatcgggagttgctggagttatgtagtcaccttggttgcttcatagagtcaaaatgtactagtgaaggagaagagttaattattgagatgaaggtgcagttgcgagatgaacaactgatagcacaaggacatgacagaaatggtaaaaccgcaaaggcaaatgcagcagcccgaattttggtcgacatgaagaaacggggtctctctcttaaacaatgcatctcgaaggctaatcaattggatattgtctcttcaaaactgcaatcagaattgacaaatttggaatcgcgacatgattgtcctcacatgaatggcactcttagcctaggtctttcctcagcgagagcagcagttgttcttcctctcaaaatggacaaaggtggacctcggactgcactttttaggctatgcaagagtttacagtggccaattccagaatttgaatttgtggaacaaaggtttaggtat

SEQ ID NO: 648 - DNA, 4513 bp, Zea mays
  source 1..4513: mol_type = genomic DNA
ggcgccacccacacccaccgcctcacgcacttcgccttctcgcccagttcagctcctctctcccccttccgccgtgtctcgctcctcctggctatgccgatttataaacccccaccgcgccatgcgctccccaccgccacagccactccacccgcaccgaaccaatggcggacgccgccacctccgaggatgccgacctgccgcccccacctccgccggcgcagctcccgcctcctcgccgcccgcacaagcggcttcagccgcgggggtaccaggtggaggtgttcgctgcggcgctgcgcgggaacaccatcgcggtgctagacactggctctgggaaaaccatggtcgctatcatgctcgcgcgggagcacgtcctccgcgcgcgcgctggggaggcgctgcgccggatcgtggtattcctcgcgcccaccgtgcacctcgtccaccagcaattcgaggtgattcgggagtatacagacctcgacgcggtggagtgccatggggcatcgggggttggccactggaacgccaagcgctggaaggaagcaattgggactaaggagattgttgttatgacaccacagatactattggatgctctcaggcatgcttttctaacaatgcgtgtgatgagcttgttaatatttgatgaatgccatcgtgcttgtggaaaccatccatactcactaataatgaaggaattttacattgattcggagtggaggccagctatatttggaatgacggcgtctccagtttctaaaaagggagcttctactatagaagattgtgaagcacagattgctcaacttgagctagtattggatgccaaggtatatattgttgaagataggaatgaacttgagagcttttcaactggtgcaaaagttgtgaataaatactatgacccttacttgtttgatttggataatctggaatcaaagttacagatgctgtttgaggaggtggtgaagatatataatgaaagcattaataccatagatgattctgaagattgcgtattttctaaagagagcctcaacttacaggtttcctatttcaaagaagctttatttttgattgaagattttttgccacagggttatggggagctgatgaaatcagaatctggttctgcggaactaactaagaagggatatatttcttctaaagtggagtcactgatcaacattttcaaatcgtttggctcgtcagaggaagtgctttgcatgatttttgtagaaagaattacgacagccaaagctgttgaaaggtttatgagaggaaatgtgaacttctctcgtttttcaatttcatacttgactggagggagtacatcaaaagatgctttgagcccagcagtacaaagatttactttggatttgttccgagctgggaaggtgaatttgctttttacaacagatgtcactgaagagggtattgatgtacctaactgttcctgtgtgatacgttttgacttacccagaactgtttgtagctatgtccagtctcgtgggcgtgccagaaaaagcagttcaagttatgttcttatgattgaaaggggtaacttggcgcagcaggaacacatatttcgtataatacgaactgaatactatgttaaaacctttgcactgcataaacaaccaaatactccatcacttgatttgcctctccaagagaagtacatataccatgttgaatcaacaggagcaactatcaccgcagaatgctgtgtcaacctaatttataaatattgtgagaagcttcctaaagataggtattacttgccaaagccttgctttgaggtgggtcttaaggatgggtcatatcaatgtaccttgacaatgcctcacaatgctgcatttcgaagtatagttggtcctccaagtagttcatgtaatttagccaagcagcttgtatgcctggaggcatgcaagaaactgcacgagctgggagaactcgatgatcatctagtacccttgactgaagagcctatggatattgatacagacacaacagataaaaaatgtgtttctggaccaggaacaactaaacgaaaggagcttcatggaacgataaatgttcatggtctatctggaaactggatccatgaaagtgaaactgtgattctgaatgcttacacatttgattttcgttgtgatcaagaaggtgaactttatgctgggttcgttctcttaatggaatcagtacttgatgatgatgtggcacgttcagagatagatctcttccttatacctaataaaatggtgtacaccaccatgactccttgtggaaaaattcaactgaacaaagagcagctgtgtaaaggaaaattattccaagaattcttcttcaatggtatatttggtagattatttcatggttcccgaacggatgaactgcaaagggaatttattttcacaaaaggtcatgaaatacaatggggctcagacaacatgtacttacttttgcctttgaggaactcttcacagatacaacatgatccaaacatatactgggaagccgttgagtcttgctctggtacagtagagcagttgagaaatttgtatctagaagatggaaatctcaaccatgaaaacttatgttcacataaaagaagcaacaagggagaagacatcattcatctggccaataaatctcttcatttttccacagtcaaagattcagttgtactatctcttcatactgggaggatctattctgttcttgacttgattttagataaaactgcagatgactcatttgatgagatgtataatgggaaagcttcaccatttgcttcatttgtggactactaccatcaaaagtatggtattgttattcaacatccagggcaacctttgttgctgttaaagcaaagtcacaatgcacacaacttacttttttcaaaaatgaagtaccaagatggttcaactggcaatcctctgctcgtagaaaaagagcaaattcatgcccgagttccacctgaactactcatccatattgatgtcgcaactgatattctcaaatcattttacttgctcccttctgtaatgcatcgggttcagtctttaatgttagccagccagcttcgcagcaacattagttacattcaacgcataccaagttctctgattttggaagctataacaactttaaggtgctgcgagtccttttctctggagcggttagagttattaggagactcagtactgaaatatgtaataggatgtgatctgttcctaagatacccaatgaaacatgaaggccatctctctgatatgagatccaaggcggtatgcaatgcgacactgcataaacatggaatatggcaatccctgcagggttatatacgtgatgctgcatttgaccctcgtcgttgggttgctcctggacagatatcattgcgcccttttccttgtaattgtggaatcgaaactgcatttgttccttttaatggaggttatatcagtgacgatccatcttttgttgtgggaaaaccatgtgacagaggccacagatggatgtgctcaaaaacagtatctgattgtgttgaagcactagttggagcatattatgttggtggtggcatcgctgctgcaatttgggttatgaggtggtttggtattgatgtcaggtgtgatatggaactagtgcagaaagcaaaatataattctaatgcatctcgaatgtgctatttatcaaaaataaaagatattgaggaactggaagcaaaactgaagtacaacttctcggtcaaaggccttctgcttgaagccatatcacatccatctgtacaggaattaggagttgactattgttaccagcgtctggaatttcttggtgattctgtgctggatctattaatcacacagcatctctatgctacccacactgatgttgatcctggagaattgacagacctgcgttccgcttcggttagtaatgagaattttgcacaagcagttgtaagaaacaatattcataatcatctacagcatggatctggaatacttttggaacaagtaacagaatatgtcaggtccaacttggagtaccatggtaaagagaatcaattccttcaacaagctacatgcaaagcacctaaggttcttggagacatcatggaaagtattactggtgcaatatttatagatgtaaattttgatgttgatctggtttggaagattgttgaaccgttactttctccaatgattacccctgataagcttgcgttgccaccttatcgggagttgctggagttatgtagtcaccttggttgcttcatagagtcaaaatgtactagtgaaggagaagagttaattattgagatgaaggtgcagttgcgagatgaacaactgatagcacaaggacatgacagaaatggtaaaaccgcaaaggcaaatgcagcagcccgaattttggtcgacatgaaggtatatcttttcaaacagaaacaaaatatcaagaaatgtctagtttaaggggttgggcaggtccattgtgaaag

SEQ ID NO: 649 - DNA, 3888 bp, Zea mays
  source 1..3888: mol_type = genomic DNA
tttttttttcagttttgaaggactatgttgttcgttctagaaaatcatacatgcatttatctagcaatcttattaaccagagtaactattggtacaatttgaatgtttatatgctaactctttattacatttctctgataggtggtgaagatatataatgaaagcattaataccatagatgattctgaagattgcgtattttctaaagagagcctcaacttacaggtttcctatttcaaagaagctttatttttgattgaagattttttgccacagggttatggggagctgatgaaatcagaatctggttctgcggaactaactaagaagggatatatttcttctaaagtggagtcactgatcaacattttcaaatcgtttggctcgtcagaggaagtgctttgcatgatttttgtagaaagaattacgacagccaaagctgttgaaaggtttatgagaggaaatgtgaacttctctcgtttttcaatttcatacttgactggagggagtacatcaaaagatgctttgagcccagcagtacaaagatttactttggatttgttccgagctgggaaggtgaatttgctttttacaacagatgtcactgaagagggtattgatgtacctaactgttcctgtgtgatacgttttgacttacccagaactgtttgtagctatgtccagtctcgtgggcgtgccagaaaaagcagttcaagttatgttcttatgattgaaaggggtaacttggcgcagcaggaacacatatttcgtataatacgaactgaatactatgttaaaacctttgcactgcataaacaaccaaatactccatcacttgatttgcctctccaagagaagtacatataccatgttgaatcaacaggagcaactatcaccgcagaatgctgtgtcaacctaatttataaatattgtgagaagcttcctaaagataggtattacttgccaaagccttgctttgaggtgggtcttaaggatgggtcatatcaatgtaccttgacaatgcctcacaatgctgcatttcgaagtatagttggtcctccaagtagttcatgtaatttagccaagcagcttgtatgcctggaggcatgcaagaaactgcacgagctgggagaactcgatgatcatctagtacccttgactgaagagcctatggatattgatacagacacaacagataaaaaatgtgtttctggaccaggaacaactaaacgaaaggagcttcatggaacgataaatgttcatggtctatctggaaactggatccatgaaagtgaaactgtgattctgaatgcttacacatttgattttcgttgtgatcaagaaggtgaactttatgctgggttcgttctcttaatggaatcagtacttgatgatgatgtggcacgttcagagatagatctcttccttatacctaataaaatggtgtacaccaccatgactccttgtggaaaaattcaactgaacaaagagcagctgtgtaaaggaaaattattccaagaattcttcttcaatggtatatttggtagattatttcatggttcccgaacggatgaactgcaaagggaatttattttcacaaaaggtcatgaaatacaatggggctcagacaacatgtacttacttttgcctttgaggaactcttcacagatacaacatgatccaaacatatactgggaagccgttgagtcttgctctggtacagtagagcagttgagaaatttgtatctagaagatggaaatctcaaccatgaaaacttatgttcacataaaagaagcaacaagggagaagacatcattcatctggccaataaatctcttcatttttccacagtcaaagattcagttgtactatctcttcatactgggaggatctattctgttcttgacttgattttagataaaactgcagatgactcatttgatgagatgtataatgggaaagcttcaccatttgcttcatttgtggactactaccatcaaaagtatggtattgttattcaacatccagggcaacctttgttgctgttaaagcaaagtcacaatgcacacaacttacttttttcaaaaatgaagtaccaagatggttcaactggcaatcctctgctcgtagaaaaagagcaaattcatgcccgagttccacctgaactactcatccatattgatgtcgcaactgatattctcaaatcattttacttgctcccttctgtaatgcatcgggttcagtctttaatgttagccagccagcttcgcagcaacattagttacattcaacgcataccaagttctctgattttggaagctataacaactttaaggtgctgcgagtccttttctctggagcggttagagttattaggagactcagtactgaaatatgtaataggatgtgatctgttcctaagatacccaatgaaacatgaaggccatctctctgatatgagatccaaggcggtatgcaatgcgacactgcataaacatggaatatggcaatccctgcagggttatatacgtgatgctgcatttgaccctcgtcgttgggttgctcctggacagatatcattgcgcccttttccttgtaattgtggaatcgaaactgcatttgttccttttaatggaggttatatcagtgacgatccatcttttgttgtgggaaaaccatgtgacagaggccacagatggatgtgctcaaaaacagtatctgattgtgttgaagcactagttggagcatattatgttggtggtggcatcgctgctgcaatttgggttatgaggtggtttggtattgatgtcaggtgtgatatggaactagtgcagaaagcaaaatataattctaatgcatctcgaatgtgctatttatcaaaaataaaagatattgaggaactggaagcaaaactgaagtacaacttctcggtcaaaggccttctgcttgaagccatatcacatccatctgtacaggaattaggagttgactattgttaccagcgtctggaatttcttggtgattctgtgctggatctattaatcacacagcatctctatgctacccacactgatgttgatcctggagaattgacagacctgcgttccgcttcggttagtaatgagaattttgcacaagcagttgtaagaaacaatattcataatcatctacagcatggatctggaatacttttggaacaagtaacagaatatgtcaggtccaacttggagtaccatggtaaagagaatcaattccttcaacaagctacatgcaaagcacctaaggttcttggagacatcatggaaagtattactggtgcaatatttatagatgtaaattttgatgttgatctggtttggaagattgttgaaccgttactttctccaatgattacccctgataagcttgcgttgccaccttatcgggagttgctggagttatgtagtcaccttggttgcttcatagagtcaaaatgtactagtgaaggagaagagttaattattgagatgaaggtgcagttgcgagatgaacaactgatagcacaaggacatgacagaaatggtaaaaccgcaaaggcaaatgcagcagcccgaattttggtcgacatgaagaaacggggtctctctcttaaacaatgcatctcgaaggctaatcaattggatattgtctcttcaaaactgcaatcagaattgacaaatttggaatcgcgacatgattgtcctcacatgaatggcactcttagcctaggtctttcctcagcgagagcagcagttgttcttcctctcaaaatggacaaaggtggacctcggactgcactttttaggctatgcaagagtttacagtggccaattccagaatttgaatttgtggaacaaaggtttaggtat

SEQ ID NO: 650 - DNA, 3152 bp, Zea mays
  source 1..3152: mol_type = genomic DNA
agcagcagcagctaccgcatcccttgccatggcgccaagctccccgtcatccgctaggcccacgcgcgcctccggccggaagcgctccgccatggccgaggagatccaccagaaccaggaggaggaggaggaggttgtggctgcgtccaccgccaagcgcagacgcaaggcggcgtcttccgggaagaagcccaagccgacgcccaagcaggccaaaccggccgtggcggggatgaagaagaagggggagaccgagaagacggagcccgttgtggacgacgtgtgcgccgaggagcccgacgaggaggagttggccatgggcgaggaggaggcggaggccgaggagcaggccatgcaggaggtggtggccgcggtcgcggccgggtcgcccggtaagaagagggtggggagaaggagcgccgccgcctcgggcgaccacgtgcccgagttcatcggcagccccgttgctgcggccgaggcgcacagcaactggcccaagcgctacgagcgcagcactgccgcaaataaaccggaggaggacgatgagctcaaggccaggtgccactaccggagcgctaaggtggacaacattgtctactgcctcggggatgacgtttatgtcaaggctggagaaaatgaggctgattacattggtcgcattactgaattttttgagggcactgatcgatgccactattttacttgccgttggtttttccgtgcagaggacacggtcatcaattcgttggtgtcgattaatgttgatggccacaagcatgaccctagacgtgtttttctttccgaggaaaagaatgacaatgtgcttgattgcatcatctccaaggtcaagatagtccatgttgatccaaatatggatccaaaagctaaggcccaactgatagaacattgtgacctatactatgacatgtcttactctgttgcatattctacatttgctaatatctcatcagaaaatgggcagtcaggcagtgaaaccgcttcgggtatttcttctgatgatgcgggtttggagacgtcatctaatatgccagagaggacagcaacccttcttgacttgtattcgggctgtgggggcatgtccactggtctttgcttgggtgctgctctttctggcctgaaacttgaaactcgatgggctgttgatcttaacagttttgcgtgccaaagtttaaaatacaatcatccacagactgaggtgcgaaatgagaaagctgatgagtttcttgctctccttaaggaatgggcagtcttatgtgaaaaatatgttcatcaagacgtggattcgaatttagcaggttcagaggatcaagaggatgctgacactcttgacaaggatgaatttgttgtacagaagcttattggaatacgctatgatggcactggaaggaaaaaaggcgtatattttaaggtccaatgggaaggatatggtcctgaagaggatacatgggaacctattgataacctgagtgactgtccgctgaaaattagagaatttgtacaagaagggcgcaaaagaaaaattctcccgcttcctggtgatgttgatgtcatttgtggaggcccaccatgtcaaggtataagtgggtttaatcggttcaggaaccgtgatgagccacttaaagatgagaaaaacaagcaaatggtgactttcatggatattgtggcatacttgaagcccaagtatgttctcatggaaaatgtcgtggacatactgaaatttgctgatggctacctaggaaaatatgctttgagctgcctagttgctatgaagtaccaagcacgccttggaatgatggtggcaggctgctatggtctgccacagttcaggatgcgtgtgttcctctggggtgctctttcttccatggtgctccctaagtatcctctgcctacatatgacgttgtagtacgtggaggagcacctaatgccttttcgcaatgtatggttgcatatgatgagacacaaaggccatccctgaagaaagctttgcttcttggtgatgcattttcagatttaccaaaggtcgaaaaccatcaacctaacgatgtaatggagtatggtggttcccccaagacagagttccagcgctacattcgacttggtcgtaaagacatgttggattggtcgtttggtgaggaggctggtccagatgaaggcaagctcttggatcaccagcccttacggcttaacaatgatgattatgagcgggttaagcaaattcctgtcaagaagggagccaacttccgtgacctaaagggtgtcaaggttggagcaaataatgttgttgagtgggatccagaagtcgaacgtgtgtacctttcgtctgggaaaccactggttcctgactatgcgatgtcattcatcaagggcaaatcactcaagccattcgggcgcctgtggtgggacgagacggttcctacagttgtgaccagagcagagcctcataaccaggttatattgcatccgactcaagcaagagtcttgactatccgggagaacgcaaggttacagggcttccccgattactaccgattgtttggaccgatcaaggagaagtatattcaagtcgggaacgcagtggcagtccctgttgcacgggcactgggctactgtctgggtcaagcctacctgggtgaatctgacgggagtcagcctctgtaccagctgcctgcaagttttacctctgtggggcgaaccgcggttcaggcgaatgccgtttctgttggcactcctgcgggggaggtagtcgagcagtaaaaggatagcggagcaaccctggttggtattttgattcgagcccatccagtagcatgtttaccaataaataatcattggtcgtgctgattcttatggttggagatgaatgtatgtagggtgtactcgagctcgagtgcttgttgtactgtaggttgaggtttctcatccattggcctgcctatttgtggatgacgtttcatttcagattagcaatgtgcttatttaaggtttcgtcatgtacctgtattctacaatccactattgtttccaaagacagcatttgatccttgttcaacgcgagcagattttcgtccaccaaagctgtgtagggatcgaaatgtcaacaatgaattgagtcattcaatcatttgtctaa

SEQ ID NO: 651 - DNA, 4033 bp, Zea mays; identical to SEQ ID NO: 618
  source 1..4033: mol_type = genomic DNA

SEQ ID NO: 652 - DNA, 1658 bp, Zea mays; identical to SEQ ID NO: 619
  source 1..1658: mol_type = genomic DNA

SEQ ID NO: 653 - DNA, 1777 bp, Zea mays; identical to SEQ ID NO: 620
  source 1..1777: mol_type = genomic DNA

SEQ ID NO: 654 - DNA, 1308 bp, Zea mays
  source 1..1308: mol_type = genomic DNA
atggagaaacgcactagagttggtgtaggatctgagactggaactgttgtctactcttttggcggcaacaaggatgggcatcccttgcaaggggaatatgcctccttctccgatgacaacagtggtgggtggtgcctgagagacaaggttgttggatctagatgctggccattgatatcacggtacagagcatctgtgcgcacccagtctccaaaggtagagatgattgattctctatttaagccactggatgatgggaaggatgatggcataatgagggaacttctactagacttctaccaaaccagtcaacaaagaaagcctaagcagataatcatcttcagggatggtgttagcgagtctcagtttagccaagtactgaacgtagaacttaatcaaattataaaggcatatcagagtatgggacagggggaccttccgaagttcacagtgatcattgctcaaaagaatcaccacacaaaactcttccaagctgattcaccagagaacgttccacctgggactgttgtggactccggcatagttcatccaagacagtatgatttctacatgtgtgctcatgccggaccaattggtacttcaaggccaacccattaccatgtgttgcttgatgagattggcttctctgcagataatctccagaagctagttctttcactttcatatgtgtaccagaggagcaccactgcgatttctgtggtggcacctatctgttatgcccacctcgcagcagctcagatgggccagttcatgaaatttgaagagtttgcagatacgtcgtcagggagtgtcaattcatcatcgccaccatcaataccagaattgccacggctgcatgctgatgtctgcagttccatgttcttctgttgacgtgattttagtttgaccgttgtggggtagggccaattctttgtgaaaggaaccttaccttatatgttggcacacagcaggctaaccgtttttgtgaagaaaccatgtaggtcgttagttgtcgtatatcgcacgcgtgcatctttttggagcggttttcggctccccccacccacaggtggcggttccgttaggtacagtttccagattttaacgatgctaatacagtaaaagcagtttgtacattctacgcagattttgcagggatacgtggttagatgatctttttgttatgcccagaaatacgtgtgcattggggggttatgaaagtgagctaaatttctgtgcctcgcatggcatccaattgtactcggagattgtgtttgtgctcgatacgcttcctgccactgaaatgcg

SEQ ID NO: 655 - DNA, 3326 bp, Zea mays
  source 1..3326: mol_type = genomic DNA
ttttttttcatttttttttaccttgcgtgacgcttcgttttcacagtgcggcggcggcggctgcttggctcgttgctcctcccattctgctcagctcagcttctgatgagttcgcctttgccgctgctagttaccagcatactagaccactgactgatcacgttataaggcttccgcgcaggcgagcttctgccgccttgtcgggtaaccaaacggacctcgccggccctctccagtggtcacatcacatcacatcacatgctcgaggtcgtcctggacatgacgccgccgccgccgccgccgcaggcgcggctccaccaggggtcatcagccaagggcgggcacgcggagcggaggaagcaaccgctgcagagcagcgtgacacagcccaaggcagagcccgcggcggcggcggccgtgctgccggtgccggagggaggcaagaggtgcagagggggcgggaggcgccgcggcagggccaaggcgcccggtgagcctcgcgccgcgctactagcgccagcgcaggcgcagacgcaggcgcctccgccgcgcacggtcattgggccgcccgtgccgagcaaggggctgtcattctgccgccggccagggttcgggacggtgggcgcgcgctgcgtcgtcaaggccaaccacttcctcgccgagctcccggacaaggacctcacccagtacgatgtgaagatcacgccggaggtgagctcgcggaccgtgaaccgggccataatggcggagctggtccgcctctaccgcgcgtccgacctggggatgcgactcccggcctacgacggccgcaagaacctctacaccgccgggacactaccgttcgacgctcgcgagttcgtcgtgcgcctcgccgatgaggacgacggctccggcgtcccgcctcgggagagggagtacagggtcgccatcaagttcgccgcgcgcgccgacctccaccacctcaggcagttcatcgccgggcggcaggcggacgcgccgcaggaggccctacaggtactcgacatcgtgctccgcgagctcgccaaccagaggtacgtgtccatagggcggtccttctactcgccggacatcaggaagccgcagcggctcggcgacggcctgcagtcgtggcgtgggttctaccagagcatccggccgacccagatgggattgtcgcttaacatcgacatgtcgtccacggcatttattgaacccctgccggtgatcgagttcgtggcccagatattaggaaaggatgtcatatcaaggccattgtccgatgctaaccgaatcaagatcaagaaggcattgcggggtgtaaaagttgaggtcactcaccgggggaatgtacggcgcaagtatcgcatttcaggcctcacaacacagccaactcatgaattgattttcccgattgatgaacaaatgaatatgaaatctgtcgtggaatacttcaaggaaatgtatggtttcaccattcagcatcctcatcttccctgccttcaggttggaaaccaaaagaaggcaaactatctacccatggaggcctgcaagatcattgaaggccagagatacacaaagaggctgaatgaaaaacagatcacatcgctgctaaaggttacatgccaaaggcctagagagcaagagatggatattctacagacagttcatcaaaatgattatgagcaagatccatatgcgaaggaatttgggatcaacattagtgagaagctaacctctgttgaagcccgagtccttcctgcaccttggttgaagtatcatgacactggaaaagagaaagagtgcttaccacaggttggtcagtggaacatggtaaacaagaaagtgataaatggatgcaaggtgagccattgggcatgtataaacttctcaaggagtgttccagaaaccacagctcggggattttgccaggaattggcacaaatgtgtcaaatttcgggcatggaatttaacagtgagcctgtgatgccaatatattcagctagaccagatcaagttgtgaaggcacttaaaaacgtgtataatattgcattgaacaaacttaagggtaaagatcttgaacttcttttggctatcctccctgacaacaatgggcagttatatggtgacatcaaacgtatttgtgaaactgatttggggttgatatcacaatgttgcttaaccaagcatgtttttaagatcagcaagcagtacttggcaaatgtctcactgaaaattaatgttaagatgggaggaagaaacactgtgctcctggacgcaataagttggaggattccgttggtcagtgacatcccaactattatatttggtgcagatgtaacacatcctgaaaccggggaggactcaagtccatcgattgctgccgttgttgcttctcaagattggccagaagttacaaagtatgctggattggtttgtgctcaggcacaccggcaagagctcattcaagacctttacaaaacatggcacgatcctcagagaggcactgtaacaggcggcatgatcagggagctcttaatatccttcaggaaggccactggacagaagccattgagaataatattctacagggacggtgttagtgaaggtcagttctatcaagttctcctttacgagttagatgccatccggaaggcatgtgcatccctagaaccaaattaccagcctcctgtaacatttgtggtggttcaaaaacgtcatcatacaagactatttgcaaataatcacaaagacagaagtagcatggacaagagtggaaatattttgccaggaaccgttgttgattctaagatatgccacccaacggagtttgatttctacctctgtagtcatgctggaatccagggaacgagtaggcctgctcactaccatgtcctctgggatgagaacaatttcacagcagacgaaatgcagacattgacaaacaacctttgctacacttatgcccggtgcacacgctcggtttctgttgtccctcctgcatactacgcacacttggcagcattccgggctcggttctacatggaaccagagatgttggacaaccagacgtccaagacctccaatggcacgagcggagtctcggtgaagcccctgcctgctgtgaaggagaaggtgaaaaggatgatgttctactgctgacaaggagaccacttaaccactcacatgctgtagctaacttgctagagtttagtaaggattagatagctttctcaaggagtgatggatcaatctgatctgttaacgacctctgtaaagtactcggaaatggctgtataatagttgttgtttcaaatgtgaaagcatct

SEQ ID NO: 656 - DNA, 2955 bp, Zea mays
  source 1..2955: mol_type = genomic DNA
atggcgccgccgccaccaccgccgccgccgccgccgcatgcgcggcaccatcagggggcagccaagggcggccacgcggagcggaggaagcaaccgctgcagagcagcgtgacgcagcccaaggcggaaccggcggcggcggcggcggcggccgtgctgccggagggaggcaagaggtgcggaggaggcggcgggaggcgccgcggcgggcgcggccgggccaaggcaccacctggtgagcctcgcgtcgcgctagcgctggcgcctccgccgcgcacggtcattggcccgcccgtgccgagcaaggggctgtcgttctgccgccgccccggattcgggaccgtgggcgcgcgctgcgtcgtcaaggccaaccacttcctcgccgagctcccggacaaggacctcatccagtatgatgtgaagatcacgccggaggtgagctcgcggaccgtgaaccgggccataatggctgagctggtccgcctctaccgctcgtccgacctggggatgcggctcccggcctacgacggccgcaagaatctctacaccgccgggaccctcccgttcgacgctcgcgagttcgtcgtgcggctcaccgatgaggacgacggcaccggcgtcccgcctcgggagagggagtacagggtcgccatcaagttcgccgcgcgcgccgacctccaccacctcaggcagttcatcgccggacggcaggcggacgcgccgcaggaagccctacaggtactcgacatcgtgctccgcgagctcgccaaccagaggtacgtgtccatagggcggtccttctactcgccggacatcaggaagccgcagcggctcggcgacggcctgcagtcatggtgtgggttctaccagagcatccggccgacccagatgggattgtcactcaacatcggtgagctgtgcgggctggggaatatttcttgccctcatgcatgtgattcctttcttttttgtcctgtggctgccgcttacatggccatgttgacggcagacatgtcgtccacggcgtttattgaacccctgccggtgatcgagttcgtggcccagatattaggaaaggatgtcatatcaaggccattggccgatgctaaccgaatcaagatcaagaaggcattacggggcgtaaaagttgaggtcacgcaccgggggaatgtaaggcgcaagtatcgcatatctgggctcacaacacagccaactcatgaactgattttcccaattgatgaacaaatgaatatgaaatctgtcgtggagtacttcaaggaaatgtatggtttcaccattcagcatcctcatcttccttgccttcaggttggaaaccaaaagaaggcgaactatttaccaatggaggcctgcaagatcgttgaaggccagagatacacgaagaggttgaatgaaaaacagatcacatcgttgctaaagattattctttattttcagacagttcatcaaaatggatatgagcaagatccatatgcgaaggaatttgggatcaacattagtgagaagctaacctatgttgaagcccgagtccttcctgcaccttggctgaagtatcatgacactggaaaagagaaagagtgcttaccacaggttggtcagtggaacatggtaaacaagaaagtgataaacggatgcaaggtgagccactgggcatgtataaacttctcaaggagtgttccagaagccacagctcggggattttgccaggaattggcacaaatgtgtcaaatttcgggcatggaatttaacagtgagcccgtgatgccaatatattcagctagaccagatcaagtagtgaaggcacttaaaagtgtgtataatattgcactgaacaaactcaagggtaaagaacttgaacttcttctggctatactccccgacaacaatggtccgttatatggtgacatcaaacgtatttgtgaaactgatttgggattgatatcacaatgttgcttaaccaagcatgtttttaagatcagcaaacagtacttggcaaatgtctcactgaaaattaatgttaagatgggaggaagaaacactgtgctcctggacgcaataagttggagcattcctttggtcagtgacatcccaactattatatttggtgcagatgtaacacaccctgaaaccggggaggactcaagtccatcaatcgctgccgttgttgcttctcaagattggccagaagttacaaagtatgctggattggtttgtgctcaggcacaccggcaagagctcattcaggacctttacaaaacatggcacgatcctcagagaggcactgtaacaggcggcatgatcagggagctgttaatatccttcaggaaggccactgggcagaagccattgagaataatattctacagggacggtgttagtgaaggccagttctatcaagttctcctttacgagttagatgccatccgtaaggcatgcgcatccctagaaccaaattaccagcctcctgtaacatttgtggtggttcaaaaacgtcatcatacgagactatttacaaacaatcacaaagacagaagtagcatggacaagagtggaaatattttgccaggaactgttgttgattctaagatatgccacccaacagagtttgatttctacctctgtagtcatgctggaatccagggaacaagtaggcccgctcactaccatgtcctctgggatgagaacaatttcacagcagacgaaatgcaaacactgacaaacaacctttgctacacttatgcccggtgcacacgctcggtttctgttgtccctcctgcatactacgcacacctggcagcattccgggcgcggttctacatggaaccagagatgtcggagaaccagacgtcgaagagctccaatggcacgaacggaggcttggtgaagcccctgcctgctgtgaaggagaaggtgaaaagggtgatgttctactgctga

SEQ ID NO: 657 - DNA, 3162 bp, Zea mays
  source 1..3162: mol_type = genomic DNA
gcaaaaccccaagcctccttcctacgatggcctctcgtgggcgcggtggtggcggagggaaaggccctagcggtgggcggggcggtgaaggcagggggcgggggatccgtggcgggggaggttaccatcacggcgacgatggaggcggcgaacgcggaggcagaggcgacccgggccgagggcgcggggtcggcggtcgtggccgcggtcccggaggccgaggtgtcgacgaccaccagcagcagccgccgccgctcgggaacacagagggcggaggccagggccgcggcggcatggcggtagcggtaccgccagcccgccccgccgcgccctgtcctctagcgccggacgccgctgccccggcatttcccgcagcagcggcctcgtcttctgcgcaagcgcctcgagcccccaccgaggcggctggagctgccttggcggatggcatggggaagttggccgtggcggacgaccggcccgctgctcctcccgtgcccgcaggtaaacccgtcgcgcaaggtcccgcgcaccagccccaggaggctccgccactctcgaggaagaggatcgtgccgccgccccgccccggtttaggcacgtctgggagaaagctggcggttcgcgcgaaccacttctttgtcgaggtgtccgtgaacgacatcttccattacgacgttttaatcaatcctgaaccaaaagcaagaaaaaccaacaggatgctgctctcagagcttgtcaagatacatggcgcgacatctctcgcccacaagacacctgcatatgatggaagcaagagcctgtacactgcaggcgagctgccgttcaaatcaatggagtttgttgtcaagttggggaaggcgggccgagaagttgactacaaggtgacaatccgatacgcggcacggcctaacgtgtaccaacttaagcaattgatcaattctcagctaaggaacacgccatttgacgcaatccaagcactggatgttgtcttgagagagtcgccttctctcaactatgtaactctttctcgatccttcttctccaagaagttcggtgatgacgacattggcggtgggctagagtgctggagaggatattaccagagcttgcgtccaactcaaatgggcctctcattgaacattgatacatgctcgacttcattttaccaacctatcgatgtggtaaaatttgttgccgattgtctccagctgacaaaccctggccaaccttttttggacagggatcgtttaaagcttaagagagccctgcgcggagttcttgttgagactgaacaccagcagggaaagagaagcatctacaggataactgggattacttctgttccattggctcaactgagcttttcttgtaacgaaggccctcagctgactgttgttgagtactttgcacaacggtacaatgtccagctgcgctacactgcttggccctgcctgcagtcgggcaatgattctaagccgatatatttaccaatggaggtgtgcaaaatcattgaagggcagaagtaccctaggaagctcagcgacacacaggtggccaacatactgaaggcaacctgtaaacgtcctcaggatagggaggagaacattattaagatggttcgccacaacaactattctgctgataagatggcacaggtgtttgggatcactgtggccaaccagatggctaatgtgcaagcccgtgttctgcctccacctatgctgaaataccacgaatctggaaaggagaaaaccgttgcaccaagcttggggcaatggaatatgattaacaagaaaatggtcaatggtggaaccattcacagctggacttgtctgagcttttcgcggatcccgcttcgtttggtagacgaaatatgccatgaattggttcaaaagtgcaattccattggcatgagtttcaatccaaggccggtgacagaagttcagaaagactcacacaacaacatagaagctgctttaagggatgttcacaggagggctccgaatctgcagctgcttattgtgattcttccagatgttactggttattatggggaaattaagaggatgtgcgagactgaccttggtatagtatctcagtgcatcaatccgaagaagaatagaaacaagcagtattttgaaaatcttgcccttaaaatcaatgtgaaggctggagggcgcaatacagtgcttgagagagcctctgtgcctaatgggataccttttgtctcagatgtgccaacaatcatttttggtgctgatgttacccatcctacagcaggagaagaatcctcggcttctgttggagctgtggttgcatccatggactggccacaggtcacaacatataaagctctggtctcggcacaagcacacagggaagagattatacaaaatctcggcggaatgataagggagttgctgatttcgttctataagaggactggcaaaaagcccaaaaggattatattttacagggatggaataagtgaaggacaattcaaccatgttttgctccttgaaatggacgcgataaggaaggcttgtgcctctctggaagatgggtatctacccccagtgacatttgtcgtaatacagaaaaggcaccacacaaggctcttccctggagttcatggaaggagagatgttactgacagaagtgggaacattcttcctggaactgtggttgataccgagatttgtcatccgcgggagtttgatttctacctttgtagccatgctggaattcagggaaccagcaggccaatacactatcatgtcctctacgatgaaaaccgtttctcggctgatgggctgcagatactcacaaacagcctgtgctacacatacgcacgatgcacgcgcgctgtctcagttgttccaccagcctactacgctcacctggcagcattccgcgggaggtactacgacgaacaaggtagcagccccgcccccgatggaacctcagttgtcggtggcgatgccgctgcagccggtgatgatccacctgcgtgccgcaggctcccccagatcaaggagaatgtgaaggaagtgatgttcttctgctagttgctcagcgcgagctgcatgtcttgattcaggctgcctcaatatacaagaggccttttttttgtgataaactggtatcgatggttgtcctgac

SEQ ID NO: 658 - DNA, 2826 bp, Zea mays
  source 1..2826: mol_type = genomic DNA
atggcttaccgcggcggcggcggccggggaggaggaggccgcgacggggaccagcagcgcccgccgcacgtccacggacgaggagccggggggcccggaggcggccgcaccttcgtctggcctccaccgccttcttccacgccgcggccggtgccgccgtaccaccaccaccaccaccaccaggtgcccatgggctaccgcgcgcccatagtgctgccgcaccaggccgcgtacggggtgccgatggccgtgtaccggggggcgccggcgcccgcgtacagggtgcccgcgccagcgtcccctcggcctcgcgtctccttctcgcctgcgcctccggcgtctccggtcactatcagggcgccgccgccatcaccgacgacgccgccagctgctcccaccactccggcgcctccacgccagcccgcgcccgcgcccgcgcccgagccggccccggccccgccccccgcgccgtcgctcgcggccctggcgaaggaggtcgagaagaagctcttcgtctccgagaccgcgctggcgccggccgcggcggcggcagcggcagcggcagcgcagggcacagctggtgccggcgctgacgacgcggcgtcggacgtcgacctggcgccggtctccaagaaggggctcgcgcacccggctcggccggccctcgccaccgtggggaggaatgtgtttgtccgcgcgaaccacttcctcgtccacgtcgccgacaacaacttgttccactatgatgtcgctattaatcccgagtcaaagtcaagagcaacgaacagggaagttctcaatgaactcatcaagttgcacgggaagacatctctgggcggcaaattgcctgcctatgatggcaggaagagtctctatactgctggttcacttccttttgaatcagaggagtttgtggttactcttgttgatcctgaaaagaaggagaaagaaagttatgtcacagtgtccagatcctttttctctacaacttttggtcacagaggtgatatcggtgaggggcttgagtgttggaggggttactaccaaagcctgcgcccaacacaaatgggcctttcgctgaatatagatatttcagcaacatccttttttaagcctgtgacaattatcaaatttgtggaggagttcctgaacctgcgtgatacatctcggccgttgtttgacagagatcgtgtgaagataaagaaagcattgcgcggtgtccgaattgaaacaactcaccaacaggaccaaatcagaagatacaagataacagggattactcccatccctatgagccagctgatattccctgttgatgataaaggaacaagaaagactgtagtgcagtacttcttggacaaatatgactacagattgaagtatgtctcttggccttgccttcaggctggcagtgattcacgacctgtatatttgcctatggaggtttgcaagattgtagaagggcagagatactctaagaagcttaatgacagacaagtgacgaacatacttagagcaacttgtaaacgtccccaggagagagagaagagcatacgtgatatggttctgcataacaagtatgcagatgataagtttgctcaggagtttggcatcgaagttagcagtgatctagtgactgttccagcccgtgtgctgcctccacccctgttgaaatatcatgactctggtagggagaaaacttgtgcaccaagtgttggacaatggaacatgatcaataagaaaatgatcaatggtggaactattgataactggacttgtttgaacttttcacgcatgcgccctgatgaggtacaaaggttctgtatggatctgactcatatgtgcaatgccactggaatggttgtcaatccacgcccatttattgaagtccggtctgctgctcctaaccatatagagaatgctttgagagatgtacacaagagagccacccaaatacttgcccaacaagcagtgggaaatcagctccagcttttgattgtaattcttcctgaagttagtggttcttatggtaaaattaaaagagtctgtgagactgacattggaattgtatctcaatgttgcttgccaaagcatgctagcaggccaaacaagcaatatttggaaaatgttgcactcaaaatcaatgtcaaggtggtggcatcaatggactggcctgaaatcaccaagtacagaggtctggtttctgctcaaccacaccgacaagagataatagaagatttatttactgtcagtaaagatccacagatggggcacaacgttaatggtggcatgatcagggacggtgtaagtgaaggtcaattcagccatgttctccttcatgaaatggatgctatcagaaagaaaaggcatcacacaaggcttttccctgaggttcacggaaggcgtgatatgactgataaaagtggaaacattcttcctggaactgtggttgaccaaatgatttgccaccctactgagtttgatttctacttgtgtagtcatgctggcattcagggaacaagtcgcccgacccattaccatgtgctctatgatgagaacgaatttactgctgatgcactgcagtcactgaccaacaatctttgctacacctatgctcgttgcacccgtgctgtatcagtggtcccaccagcgtactacgcccaccttgccgcattccgcgcacgctactatgtggaaggagaaagctcagacggtggctcgacacctggcagcagcgggcagacagtagcccgtgaggggcctgtcgaggtgcgtcaacttcccaagatcaaggacaacgtgaaggacgttatgttctactgctga

SEQ ID NO: 659 - DNA, 4671 bp, Zea mays
  source 1..4671: mol_type = genomic DNA
gtctagagatgagctacgtcttgtctatggtgtttctgagcgtacagaaagcgatggtgcagctaatttaattcagaagttgagagctataaactatgctctgggtgaactaggacagtggtgtgcttacaaggttgcactgtcattcttgacagcactacagaatgatgaaagggccaactatcaggttgatgttaagtttcaagagtcatacttgagaaaggtagttgatttgttacactgccagttgactgaaggggctgcaatgaaaagtgacagtaatgatgttgaaatgcataattctgaaaaccccaagccaaatgaacttgaggagggagagctacctgacagtcatggtgaacatgtagatgaagtcattggtgccgcagtggccgatggaaaagttaccccaagggtgcaagctttgataaaaatacttctcaagtatcagcacactgaggattttcgtgctatcatatttgtagagcgagtggttacagcattagtcctccctaaggtctttgcagaacttccatcgttgggctttatacggtgtgcaagcttgataggtcataacaataaccaggagatgcggtcgtgccaaatgcaggatacaatcacaaaatttcgtgatggccgtgttacactgttagttgcaactagtgttgcagaggaaggacttgatattaggcagtgcaatgttgtcattcgctttgaccttgcaaagactgttttggcctacattcagtctcggggtcgtgctagaaagcctggatctgactacatattgatgcttgaaagaggaaatatgtctcatgaagctttcttgagaaatgctcggaatagtgaagagacattgagaaaagaagctattgagagaactgatctcagtcatctcgatggcacttctatgctaagccctgttgatatatcacctgattctatgtatcaggttgaatcaacaggtgccgttgtcagtctgaactctgcagttggactcgtacatttttactgctcacagctgccgagtgacagatactctattcttcgaccggaatttattatgcaaaagcatgagaaaccagggggttcaacagaatattcttgcaaacttcaactcccttgtaatgccccattcgagaaacttgaaggtcctatatgcagttcaatacgcctggcccaacaagctgtttgtttagctgcttgtaagaagctacatgagatgggtgccttcacagatatgcttttacctgacagaggaagtggggaaggagaaaagactgaacaaaatgatgaaggtgatccactgcctggaacagcacgccatagagagttctttcctgaaggggttgctgaaattctacatggagaatggattttatctggaagagatggttaccaaagttcacagtttattaagttatatttgtattctgtgaactgtgtaaacattgggacttcaaaggaccctttcgttacacaactttcaaattttgctcttatttttggcaatgagctggatgcagaggttttatcgacgacgatggatctctttgttgctaggacaataataacaaaggcatctctcgtattccgtggaccaattgaaattacagaaagtcagctgatcctgcttaagagctttcatgttaggctcatgagcattgtacttgatgttgatgttgatccctcaacaactccttgggatccagcaaaagcatacctctttgttcctgtgggagctgagaaatgtatggatcttttaagagagatagattggactctagttaatagcattgtgaattctgatgcctggaacaaccctcttcagagggcacgcccagatgtctatctaggcacgaacgaaaggacacttggaggggataggagggaatatgggttcgggaagttgcgccatggaactgcatttggacagaaagcccaccctacgtatggtatcagaggagccatcgctgaattcgatgttgtcaaagcgtctggattagttcctggtcgtggatggggacattttaatgattatcaaaataaaggcaagttgttcatggcagattcatgttgggatgccaaagatcttgctggaatggttgtaactgccgcccactcaggaaaaaggttctatgtggacagtatttgctataatatgaatgcagaaaattctttccctaggaaagagggctatctgggtcccttggaatacagctcgtttgctgattactacaagcagaagtatggtgtggagttagtttataagaaacaacctcttatacgggcacgcggtgtttcatactgcaaaaatctactttctcctagatttgagcattctgaagctagcaatggagagttctcagagaatcttgacaagacatactatgtatatttaccacccgaattgtgccttgtgcatcctctccccggatcacttgttcgtggagctcagaggttaccctcaataatgagaagggtggagagcatgcttcttgcaattcaactgaaggacataattgggtatccagttcctgcaaataagatattagaagccttgactgctgcgtcatgccaggagacattctgctatgaaagagcagagctgctgggtgatgcatacttgaaatgggttgtgagtagattccttttcctaaaatatcctcaaaagcatgagggacagctcacaaggatgcggcagcagatggttagcaacatgatcctgtatcaatacgccctgaataaaaacctccaatcttatatccaagcagatcgatttgctccatcaagatgggcagctccaggagtgttacctgtatttgatgaagaaacgagagattctgaaccatccatctttgatgaggaatttactcctagcagtgagttacaaaagaacttgtatgatgactatgatggcgatagcatgcaagaagacggtgaaattgagggagattctagctgctatcgtgttctatcaagcaaaacattagcagatgttgtggaagcacttattggtgtctattatgtagctggagggaaaattgctacaaaccatctgatgaaatggatcggtattaatgcagagttggatcctcaagagatcccatcttcgaagccatataacatacctgagagcataattaaaagcatcaattttgacacattagagggtgcattgggtatcaagtttcagaataaaggcttacttgttgaagctataacacatgcatcaagaccatcatcaggtgtttcctgttaccagcgcctggaatttgttggtgatgctgtattggaccatctcattacgaagcacttattttttacttatacggacctacctccaggccgcttgactgacttgagagctgcagctgttaataatgagaactttgcaagggttgcagttaaacataagctacatgtacatcttcgccatggatcatctgcattggagacacagattcgagagtttgtgaaggatgtccaggaggagctttcgaaaccaggtttcaattcttttggccttggggattgtaaggctccaaaggttctcggagacatttttgagtctattgctggcgcaatattccttgatagtgggtgtgctacctccgtagtctggaaggtttttcagcctctgcttgatccaatggtgacgccggacacccttccgatgcaccctgtaagggagctccaagagcgctgccagcagcaagccgaaggattagaatacaaagcatcccgtacaggcaatgtagctacagttgaagtcttggttgatggcatacagattggtgtagctcagaacccacagaagaagatggcacaaaagttggcggctagaaatgcacttgttgtcttgaaagagaaggaaaccgcagcaaagaaagacactgaaaaggatggcgagaagaaaaacggttctcagttcactaggcagactctgaacgacatctgcttgagaaggcaatggccgatgccacagtacaggtgtataaacgagggtggccctgcccatgccaaaagatttgtttatgcggtaagggtaaatacatctgacagtggatggactgacgagtgcattggagagccaatgccgagtgtgaaaaaggccaaggactctgcagctgttcttctgctcgagctgctgaatcgaaattaccgtggcaagcctgatggaaaataatctttggtgatgttctgtggtggtaggtagacgtggaagcatccatcattctgattatacccccatgcagtgcttttcagcaaagcaaattaatggcctttgttgatgttcttggtggcggtattggtgatatggaggcattcaatgcaagcataagcagagctatggggagtgggattagaggattattattagttttgtctgaggtgactactaggtattttactggcgaggtactgaggtcacaactcacaaatagcagttgcaaattgcaatagaggaaatgatgataggttgatataggatattggaggcctcttattcatcgattgtataagatgtttacagaacagtgcattgatccattaaatttatattgattgatatttttatagtggatgcgcctgcagctgggaactcggggttctctatcttggcctcgccgaccaaatatcacgtacgtcgacgtccgcgaacagtat

SEQ ID NO: 660 - DNA, 1727 bp, Zea mays
  source 1..1727: mol_type = genomic DNA
accttttcttcttaatataatgatatgcagctctcctgtgttttcgaaaaaaaatattcaaaacccaactacaaaccaagaaatttcaatgttttagctgtaacaattttaaaataagtttctgccttcaattctattgtcatcattctggttgttttctctttggtttcttgagcaggttggaggaaaacatgaagtgcattgtttttgtgaaaagaatcattgtcgcaagagtagtagttcaaattctccaaaatctgaagtgccttgatttttggagatgtgagtttcttgtgggatgccactcggggttaaggaatatgtcaagggataagatgagttctatcattgaaaagttctcttcgggtgaggtaaaccttttggttgctactagtgtaggtgaggagggacttgatattcagacttgctgccttgttgtgcggtttgatctccctgaaactgttaatagctttatccaatcaagggggcgtgcccggatgagtaaatcgaaatatgtttttctcttggagaggggaaatcattctcaggagaagttacttgatgattatattactggtgaaatcattatggataaagagattaacttgagaacatcaaatgatatgttcaattgccttgaggagaacatctatcgagtcaatgatactggtgcttccattagcactgcttgcagtgtatctctattacatcgctactgtgataaccttcctagagatattttttttgttccttccccatcattcttctttgttgatgacgtcgatggaatagtatgcaaattaattcttccaccaaatgctgctttccgtcaagtgaatggtcaaccctgtccatcgaaagatgaagctaagagagatgcatgcttgaaagcatgcatcaaacttcatgaactcggtgctttgacagattttcttctacctggccaaggctctagaaagattaaggtatcaacaacaaataattcagaaagcaacaaagacgatgatgaaagttttagggaagagctttatgagatgttaatccctgcagttctgagaccttcaagatgcaaactagactcctcgtttaagttgcatttctattacatagaatttattcccataccagcagatagacgatatcagatgtttggtctttttgtgatcaatcgccttccagaggaatctgaaaagttggatgttgaattgcatcttgctcgtgcgaggattgtgaaagcaggaattaaatatttgggaaagattgagtttaacaaagaagagatgatactcgcacacaattttcaagaaatgtttttgaaagttctcctggatagatctgagttcacaccatcttatattttgttggggaatgatggtgcattggacatggattcaacattttaccttttacttcccatcaagcagaaattctatggtgataatatgattgattggccagcagtaaagcggtgtttatcatcacctgcatttcaagatccaatgggtttgtctctgcatgattcatatttaccaaatgagtctttgaagcttcttggtggaacatacaacaaagctgatgtgattggcagtttggtctatactccccacaccgacctgtttttcttcgttgatgccattctggatggaacaaatgctaaaagtgagttgaacggtgcaacgtatgcagaacattttaaacaaaggcacggtgtacggacatttttctga

SEQ ID NO: 661 - DNA, 3402 bp, Zea mays
  source 1..3402: mol_type = genomic DNA
aagcctgcacagttgggaacgcctgatttccctgtgcccgcgtatgcaggcaagaggccgctttttcactatttggggccagcatatgagagctattcgagcatccaaacaaccttgtttgcactaccagagactgttcacggagttgtgcagcgtaccaaacgcacccataaactcggtttttccatgttccaggttcaggcagctcctaaaatttataaactgctcccaggccgtccaggtcttatgtttgaggatcctttcttcaactggtttagggatgacacagatgaacaatggaccaggacaattgattttactccatcagctagcatcgggcaatcatctattttatgtctggaggtgccacaacagtgtgagcttccaagaattggcgactactttgtttactataaagagcagaatcttgactttgaatgtcggaatgggtattcatattcctgtggtagcaaccttgtaccaattgtgaaatctcctgattacatagaggtcccttatgagatactcttcaaaatcaaccatttggttcagaatgggacactcagtgggccaacagttgatcatagtttcttccgtcatgttagcccaaaatttgaacctattgatcatataaaacgagcacttttaaagatgacatatttgaaaagcacctgcttgaacccaacagattggttatctgtgcaatactccagaatacggaaatcacgccatgcatcacaaaagttatctaatatatctctggatgatggcttggtctatgtccacagggtgcaagttacccctgctaaagtgtatttttatggacctgagataaatgtctccaatcgcgttgtgcggcatttctctgcagacatagataacttccttcggatttcatttgttgatgaagactgtgagaagctccgttcagctgatttgtcacctcgatctacttctggaaatgatgcaaggagaactgctctgtataatagagttttgtcagtcctttcaaatggcatcaatattggtgacaagcactttgagtttcttgccttttcttcaagtcagcttcgagataactctgcatggatgtttgcttctcggcagggattgactgcgagcgacataaggaagtggatgggggactttcgagatatcagaaatgtggcaaagtatgctgcaagacttgggcaatctttcagttcctcaacagaaactttaaaagtacacaaatctgaggtggaacgaattcctgatattacaaatggcacaaagtacatattctctgatggagttggaaagatctcagctaattttgcagtggaggtggctatgaagtgcaaattgaaacgctttgctccttctgtttttcagataaggtatggcggttacaaaggtgttgtcgctgtagatacaagatcaaatcataagctttctttgagaaaaagcatgtcaaagttccagtcagaaaatatcactcttgatgtccttgcatacagcaagtaccaaccatgcttcctgaatcggcagttgattactcttctctcaacacttggggttagcgataatgtctttgagctaaagcagaaggaagccttaaggcagttgaacagaatggtaactgaaccacaggctgctcgtgaagcagttgaacttatgcccatgggagaagtaaccaatgtagttaaagaattgttgtcatgtggctaccagcctgatcatgagccatatctttccatgctgctacaaacttttagagcatccaagcttctagagttgaaaacaaagtcaaggatattcatcacacaggggcgagcaatgatgggttgcctggatgaaacctgcacacttaagtacggccaggtattcgtccaagcttcttacagtgcagatgaccatcgcaaggtcgttgtaactggaaaagtagttgtcgccaaaaatccttgtctccaccctggtgacatacgggttctccaggctgttgatgttcctgctctgcaccacttgtttgactgtgttgtctttccacagcagggaccaaggccgcaccctaacgagtgttcagggagtgatcttgatggggacatatattttgtttcttgggatccacatcttattccgagtcgtttggtggatcctatggactatactccagcttcagcagaaacattagaccatgatgtcactattgaggagatacaggagtacttcacaaactacatagttaatgagagtcttgggattatcgccaatgcgcatgtggtctttgcagatcaggaacgtatgaaggctgagagtccaccgtgcgttcaactggccaagctcttctctatagctgtcgatttcccaaagactggagtgccggctctgattccacatgagctacatgtcaaggagtatcctgacttcatggagaaactcgacaaagtcacctatgaatcaaagggtgtgatcgggaagctctatagggaaataaagaagcacacaccacacataaagcacttcacgagggaagtggcaaggcggtcttatgacaccgatttgattgttgatggctatgaagattacattactgaggctatagagttcaaggaagagtacgatttcaggctgggtaatcttatggaccactatggcataaaaagtgaagctgagataataagtggatgtattctaaagatggcaaagaatttcaccaagagtagtgatgctgatgcaattagaatggcggtgagatctttgaggaaagaagctaggtcgtggttcaatgagatgagcacaggagaggatggccaagatgccatggaggccaaggcctctgcttggtaccatgttacttatcatcagcagtactggggcagctacaatgaagggtatgatcggccgcatcttattagcttcccatggtgcgtatatgacaagcttgtggccatcaagcaggggaggaatctcctcacgcggatggatcgaaacttgaggttccgttgagcattgccagcaggtttgctcctgtacatatccctgatcgtttgcactcagcactgccagcaagtgtgcatgaacgatctgatgaattaagacgggcaaactgccgcaagctgacgctctggcctacgtgcgtcttgaaactttcggatgctgccgtctaactaaatgcatgttccttgatttccactgggaccttgagtttgaagtgtgtaaatatgctgcttatgatgtttttagtattggacctctatcaactgccgttctagttagtaacaatggttgccagtcatggattaccaggtttcgccgagctcctgtatggacgaccacgaaggtctatttcttccattaccaagtgcgaagtgtcacatctaacttgcgtagttgcattcaccttttttctcaaaaaaaaaa

SEQ ID NO: 662 - DNA, 9490 bp, Zea mays
  source 1..9490: mol_type = genomic DNA
caatttgccctttcttaatagtggattttccaaaaacaatatgactcggccttcatggctgatcttcagcgttatcgttgtcactttcaacatcaaaacttttgctctcacttgagtctccaaacaacacaactagcatctcattagtaatattctcaacattggtcctttccatggcttcgtagaaaccagcatgtgtggggtccacgctcttcttcttttcgaccatttcagcgttgattacagcaagaatccaaagctcaaaaacaatcgcggttgcagagttagaaagctaaaacaataactcagcacaaagcttgatagcgcgaaaaatatctttcaacccgaagcctcatatatatatatatatatataatatacacacacacacgcaaaacaccactgagcggtggggcccacagtgcagaatgtttcgctattctagcgaaaggaaggtgtttttttggaccttcggctaaaggccttcgtttatttcaagtttggatttgttacaaagaaacaaactaatacgacaggggctactgttgggggtcttcttctcccgaaggtcctaaaaaataagactaaccatttgctttcagcatactattgaatattacaggagtttcgtcgccagagcttcgacataacacaagaggagcgaagcaagcttcatccaacaggcttcatcacggtgaaacgggtatacaacgtggcttcggtataactcaaaggaagtataacgaagcacacttcatcaagcaggcttcgtcataacgaaacaatgagatgcaaggagaaggtgttactcaagttattaaatacaactgacgacattgcccttatgacatattgtaaactctgtatgtaattattgagggtataaatgtaatagcgtacgaacccttgcgattgtctataaatagatgaacattaccccgtactattcacgttggattgtaatcgctctcgcgtcaacaccttcaaacaagccgaagatatcactgcaatataaattttgataatgtttatatatttatcatggaataaatatatgactggatatcacactcatgtatttaaatccttattgatataaatgatgaggatgtgttattcacgacctttgtctgaagattattatatccgaaaggagatattttttcgaaggacgaatgttcttaacatttaataactgtgttaccttgttcttgaacatgtgacaaacattaggttttgagtatttcaattaatagtgaaattaaattaaattttagttgtccaaaatgacagacttcgatatttgttataattgttgagttaaattttaacagcatccataaacaagtaaacaacgactatgtgtgcaccagtgtctcctgtatcaacggggtggtccgtctggaggaggtaccgaggtcccgccgttcgagagacgagctacgcatttaagccggggaggtcggagcagtgagtgggagtagttcagggactgggagaggagaggaagcaggacctgggagacctcgcctcgtccgtcctcctgcctacttccttgcttttggtaagtgaaagtgattgaagtggagatgcctccaatctgcagtgctgtttcacgcgtaaaccctggccccctcgccgctggaagcccccattgttcctctttcatttcttaccgctgatgcagcttatggtttcctagggttttcgagatatttggtttcttgcatccagaggacgaagagctttcatagggttttcgagacattgtcctcacaatcgcatccattttgcagtgctgtttcacgcgtaaaccctagcccctcgccgctggaagcctccattgttcctctttcatttcttaccgctgatgcagcttatggtttcttagggttttcgagacatttggcttcttgcatccagaggacgaagagctttcctagggttttcgagacattgtcctcacattcgcagatttggttcgagacatttgttttttaggggttcacatgtttctgggtgcttttgcagcgatgcgattcatctcacaggggatggggattcctacattaccgtgcctttttttggggaaaaatgcccactttttgtgtaacaaaaacataaaaacgagccttgcagctgcgatgtctgctgctcaggtggtttctcaagaacaaatttttttaacaaaaaaagcctttcttttttcttactctcttggaaagaaggtacatggagccaatccgttaggtcgctaacttcaccaaaggatttcattttccgtacctaaaccttgtttcaacaaaatgctgcctttggccgggggcatctgattgtcattttagtctgttgattcttcaagtcaatattacgctcattttattcaatgtttcccgacagccaactacacttgtatttctttgttagtaacgtcccgcgcttgagtccttgtgatctgcacagtatgatgctgccaccaaatgcatgcagttagacaagcttaatgttgcatctgataagactgtacaacagattcgtgtgccaaatgtgtccttgctactcaaggaggtcatatggaacaagtaaaacgaaatttctgcatcagcaatcaggcacaagactgaatgacgtggttagtgccaatgaggtggggacttgggaatggaattagagttatagctattcctataattcatctcactacagaggctctccatcctactaggactgtacaacagattcgtgtgccaaatgtgtccttgctactcaaggaggtcatatggaacaagtaaaacaaaatttctgcatcagcaatcaggcacaagactgaatgacgtggttagtgccaatgaggtgggaacttgggaatggaattagagttatagctattctatagctattcctataattcatctcactacagaggctctccatcctactagaatttaatctgataaagtaggcagaaacatggaacttataatgtcgaagattgcatgtatagaatctaagtaacggaaagattcaactttgtgattatatgctgctgttacatggtattggtaaaacattctttcaagtgctcattgtcttcccttgcaaccaattcattgttgtccttgtttccttgcaggtaggtgctgcttgttttatcttgaaatgggctctcatgatggcgaggatgaagagttgccacccccccctccggtgccaccagatgtgattcccattaaagctgaagatgctgtgggtgaatcaccagcaaaccatatattaaagccaaagagattactgatggacaggcctggtataggaagaaaagggcagccgacccagctctattcaaatcactttaaagtcgctgtgaagagtacagaagacgtcttctttcactactatgtatgtctgctgactgagttcatgatcctttgttcaaaatatgtcattgtctgtcccttgtttataactaatctttggctgatgtgatattgttattttatttgactaggtaaacctgaagtatgaggatgatcgacccgttgatggtaaagggatcggcagaaaggtgattgataaactgcagcagacatatcgtgcagagctttctaacaaggactttgcatatgatggagaaaagagcctgtttacagttggtggtcttccacaaaaaaagaatgagttcaccgttgtcttggaggacgtatctactggaaagttagttttagtctttgatctgctttcttgttgtttatgcttacccagaatcagtaattgccatgttttttgtttgtggttgtaggactgctgccaatgggagccctggaggtaatgacagtcctggaggtggtgataggaagagagtgaggaggccataccagacgaaaactttcaaagtggagataaattttgcagcagaggttcctatgagtgctattggtcaagtcattagaggcgaagaatctgagaactccctggaggcgcttcgtgttcttgatatcatactgaggcagcattccgcagaacagtatgtagctatgcatcttgatggatgattataggtagatttgaggatcttctgcagttacgacatgacaatttttctcaatacttgcagaggctgccttttggttaagcaatcatttttctacaacaacccttcatgctttgttgacttgggtggtggtgtgatgggttgtcgtggatttcattcaagcttccgtggcacacagagtggactttccctcaatgttggtgcgtgttcgtcctgtatggctgtattggtgccatgtaactgcattgtctattctataatcttacatctttcatgatcatgatagcctttttttttgaaatccacagatgtctcaacaacaatgatcgtgaaacctggccctgttattgattttcttctttctaaccagaatgttaatgatcctagcagaattgattggcaaaaggtaaatgccatctttggatgaaacttctcgaataaccatgctagtgcattgaaatatctattttgatagaatgataacacaattttggggtgtgcatattcaatacaggccaagcgtgctctcaagggcttgaggattagaaccactcctgcaaattcagaattcaagatttttggtctcagcgagaggatctgcaaagaacaaacgtgtggacatgttttcttaccgctctgtttattgtcatgcaagctttactttacatttttaaaaaattgtaccctagtgtgttaagcttgtttcagaagaattttatttaacaaatattgcctttattgattttgttctgattccaatgccaagcttgcttgatggtgatatctgtgtgcttaattgctttctcattgacatatgcaattaggtttccgctgaggcagagaaatggtagcaacggagattgtgataccattgaaataactgtctatgactactatgcaaagaaaggaatcgatctaaagtattctggtgatttcccctgtataaatacagggaaggcaaagcgcccaacatattttccaatcgaggtttgtttcagttttgttagttacatcctgtcaaatctctgtttattaaatatatcttgcatctcatattcgatgggcaggcttggtggggctgtctcactgagtcactaggtcgtgggttcaaagcagcctctccacatttgtgggggggggaaggcttgcttcggtttatcccttccttagaccctaggtctgcccctttttttgcatctcatttttttgtattgtgtttctagctatgctcgcttgttccgcttcaaagatacaccaaagctttgtctacgctacaaaggtcatcccttgtggagaagtctagacagaagcctgaagaaaggatgaccgttctaaatgatgtgagctgttaccttgattttagcatgctgcgaccattcataactgcatgggatttatttctacgactgaattaatcaacagcttatgattaccctaaatgctaggcactgcaacgcagtaactacgattctgaccccatgttgagggcatgtggtgtttcagttgctccaaaatttacccaagttgaaggaaggatccttcaagccccaaaggttggtgacacttctctaagctttacgacaagtttgcatggaaatctaaaatttggatcatggataaaaataatctctggtgtttattggattctgtgcttgttagagaatcctagggtgtttggatggaattctaggatttaaagatttttttcctatcctgattgttaatatctctatggatccaaacgctcccttagttgttttctctctaaatgttgtaccaagtcattatctcagtaaaatgcatctgactaaatctaatatcttgtagctgaaagccggcaatggtgatgatatcttttcacgaaatggacggtggaatttcactaatagggtcagcagctcaacatgtttcttttttaaccttctttagttctttattaggaaggatttttctgatgtttatttgccaatactttgcccctttcagaagttttatgaaacctgctctgtgaataagtgggcggtcgttaatttctctgcacgttgtgatgttcggaatcttatccgtgacctgatgaggaatgcatctgcaaagggaattgtatggtttagcttttcacatatcttctattgtagcagttttctgctgctgacgttttcttctggcagcaaatggaggaaccttttgatgtgtttgaagagagtccctctatgaggcgtgcacctgtgtcaagaagggtggatgatatgtttgggcagataaaatcaaaacttcctggagctcctaggttcctcttgtgccttctccctgagaggaaaaattgtgaaatctatggttggtttattttttgttaccactccacataaatatctcacatcttgcaataattatacctttttggtttcaaccaggtccttggaagagaaagtgcctggccgagtttggtattgtcacacagtgtctagctccattaagagtcaatgatccgtacctgcttaatttgctgatgaagatcaatgcaaaggtttgggacatgattttgtctttcttttgcactgtattgttccctggttcatgattatattatcctctttcctctgtttttaactagcttggtggtctgaactcgttgctgcaagttgaagcatcttcgtcaataccacatgtgtcgcaagtacccaccatcatcttaggtatggatgtttcacatggtcatccaggacaagatagaccttcggttgcagcggtaagatgggtgtacctttacttgtacaattcttctgcccacatggaatctgagtggttttgtaaaatatgtgaaatggatgtctgttaatctgatgtaaaccatacctttcttctttgtttaggtggttagttctcgtcaatggcctcttatctctagatatagagcatcagtgcacacccaatctgccagactagaaatgatgtcctcgttgtttaagccgcggggtactgatgatgatggcctcatccggtaagagatatcttcttagtatgttgatgtatggtaagcgtgatgacttttggatgctaagtttatcttcgtatttgggacttccagggaatcactgatcgacttctacactagctctggaaagcgaaaaccagaacacataattattttcaggtctgaagctttggggttattgttagcttgtatcactaaatctttttgtagaaacaaattcttttttttgtttttgttttgagaagtatgtatggtacattctttgctgggatggattattgatactttcttagccgccgtggcgtaaatgtaaccatttgctgggttttagggatggagtcagtgaaagtcagtttacccaggtcatcaacattgagctggatcagatcatcgaggtaatacatttgtttgattcgtcctttgcacatttgcttgcttagttcaggaacgaattgcaaggtaacacatccttgtaattaatgcaggcatgtaagtttctggatgagaagtggtcacccaagttcactgtgattgttgctcaaaagaaccaccacaccaagttctttcagacggcatcaccagacaatgttcttcctggtaatatgtttatttttgtcatactaaagggagtgtggtgagatgcggtgacaataataaatgtgtttgtttgttacgcaggaactgtggtggatagtaaagtttgccatcctaagaacttcgacttctacatgtgtgcacatgctgggatgattgtgagttgatctcagaattgagcaaaaagatgctgctgtcttgttcttgtctctgaatcctagatggttcttcgtctcagggaacaacaaggccgacccactatcatgttctgcacgacgagataggtttcagtgccgacgagatgcaggagtttgttcattcgctctcttacgtgtaagtagtagtagtaaaatgctgttttggctgtgtgtgtgtgtgtgtgttttgtgcttacgctgcgtgtcctgctgtgcaggtaccagaggagcacgacagccatctcagtgggtaggccgcttgaatctaaagccatcttgtgcagcacagggacagcaggttgatttttttctagtgtctgtttttgtgtttgcagttgctccagtgtgctacgcccacctcgctgcagcccaggtgagcacgttcctgagattggaggagatgtcagacgcgtcctccagccagggaggagggcatacctcggctggcagtgctcctgtgccggagctgcctcgcctgcatgacaaagtcaggagctccatgttcttctgctagctgatgtgcgtgcgcatcaggatcgagctccatgttttgtgttagtaaggcctagttagtaaggctgtagaaagaatgtttaatgtttgcatgctaaagtccaaacaatcaaaaccactactatatctaccagagcactgatcgatcaaacaacaagagtcagcatcaatcaatcaaaaccaccactattctatctaccgatcaatctactctatacctgaagcactcactcgctcgcaaacaaccaagggatcatggatccttgagtagctccattgtccagtccctgaccttgacgaagcatttcatggacagcctctcgtacgccatctcgtacatccggaggttcatgtaggcgaagctcaagtaggtggcgatgcactcttggtgcctgtggtacagcgccgggatggtcagagcggccaccacacttgcgtagcaggcggtcgggaaatctgtaacgctgccgacgatggacacgctccacaggcagaggaaggctctgtagaagagcagcgagtccctgcccagagcgatgtcccggaaagcgtccgaggcggcgtccagagcagagcgcagcagcgccgccgcctcgtccacggcctgctgcggaacgcgcagctccgggacgggaggctgcggcctgttcaggaggcgcgccgctttggcccacaggaagagcacggtgaggagcaggagcagcacgttggaggcgagggacaccaaggtgtagccgccgtacaagagcagccaggaggagacggtgcccgccagcaggcaggcgctcacgtcggcgcggccccggcgccacagcagcacgtcccagactgctgcagcaatccgatccgattccgatccagatatattagttagtagatccaatctcgggcggccaatccgtaataataattggctgagagaaaaggtgggagagagtaccgaatcctccgacggcacatgtcccggcgccgccgccgccgccgccaacaccaacaccagcatccaccaccatcgtcgtagttaatactaagggaagggaactagagaaggaagggaggggccgatgcaacggaagaaatggatggaattcgaccaacagctagctagagcgaagcagaacccaatcccaatcaaaacccgag

SEQ ID NO: 663 - DNA, 9490 bp, Zea mays; identical to SEQ ID NO: 662
  source 1..9490: mol_type = genomic DNA

SEQ ID NO: 664 - DNA, 9490 bp, Zea mays; identical to SEQ ID NO: 662
  source 1..9490: mol_type = genomic DNA

SEQ ID NO: 665 - DNA, 12819 bp, Zea mays
  source 1..12819: mol_type = other DNA
gcattttagccattccatgtctttaactctgttccctttttgcttgcaggggttgcctattagtaaggcaatcattcttccacaacaatccttccaattttgttgacctgggtggtggtgtagtgggctgtagaggttttcattctagttttcgagcaacccagagtggacttttcactcaatatcggtctgttttcatatatatgccctgttttaatctatacaatacaatgttcatctctctaggctgttggtaatgtctgcgtgtattaaaataacctcgtctgtgcagatgtgtcgactacaatgatagtgaaacctggtcctgtcattgattttctgcttgacaatcagaaagttggtgatccaagcatgattgattgggctaaggtaatgctttatgccaatgcatcaaatggtatagagataaaggttgggttccatttcatgaaactttagatgtacagttttgcaatttgctttacttctgcaggccaagcgtgcaatgaagaacttgaggataaaaataagtccagcgtacctagaacagaagattattctttcaatctaatttgttgtggaataggattgaaagagctgaccaaatatgggcacccaaacgaagattcgaccaggaatcaagaagtgcgaccccggcatataatacgatggcgtctctccgctctcacaaacacatctcctgtgactataacggaaaaannnnnnnnnnnnnnnnnnnnnnnnnnnnnnnnnnnnnnnnnnnnnnnnnnnnnnnnnnnnnnnnnnnnnnnnnnnnnnnnnnnnnnnnnnnnnnnnnnnnagtgtgtatgtatttgcactttgttttgttctctaagttccttttgagttatgcatcttagttttatatatacagcttctaagtacttggtgattttcttgcttatgtagattcacactgaaacataaaaatggtaacaatggtgactctgaagagatcactgtttatgattacttcgtaaagcagcgtggcatagtgctgcaatactctggtgatcttccttgcatcaatgtgggaaaactaaagcggccaacatattttccaattgaggtaactattatttgaatcctaatgttgttccttcgatgtaaatctctttccccctgctaatgttgtgaagattgtttccatgtttaccagttatgcagtcttgtgcctttacaaagatacactaaagctttgaacacacttcagaggtcatcactcgtggagaaatctaggcagaaaccgcaggaaaggatgtctgttttatctgatgtgagtgtattttttggtttaaatcttagcatttttttctcgaacatgcaggaaagctgcgtatcattatattaagaagagaaagaaagagagctgcgtagcatttttcttgttagtaatgtaaccttagcaagcggggttattggtaggtatggtttccttaacttgttcttttttccatgtcaaattgagtaggtgctgcaaagaagcaactatgatgcagagcccatgttgaaggcatgcgggattacaattgctagaaatttcacagaagttgatggtagggtattgcagccacctaaggttggtcattactatttgtcctatattattttagatatcctgaggatagttgtgataggcttggcgagtcaacgttaaacctagccattctaatagagatgaaatccaaaaaaatatgtttggcgatgtgtcatcataacacgggtatggtgttaaatcgacaaccccttggtggcatgccatgtcataatttggcatggtgtaaagtgagcaaggattaggttattacttaggggcatgctacatcggcgctcgcttgtaatgaaaaatgtgcaagagtcttcacaccatcgatgggtgcgaagggtatggaagctagtcgaaccaactaggattcgtttaggtagctaggaatgtagggtcgcttacaggtaagttaaaggagttagtgcagagatcgactaggagacatgtaatgtaaatatcttatgtgtccaagagattaaatggaagagtcagaaggcaaaggatgtggacaatactagcttcaagctttgatgcaatggtaactgtaaatagaaatgaagtaggagttttgattgataagaactccaagaatggtgtggtggatgtgaggaggcaaggagattggattatcttagtcaagtttgtcgtgggtgatttgatcttgagtgtaattgtctgtatgcccccaaagtaggccatgatgagtgtaattggcttttctagaagacttatatggcatggttatacatactactgagaagctttttagagctttgaatgagcatgtagctataagtgcaggtttcgaggcagtccatggtggtattggagtatggtaataggaattagtagggagaggaagtcttggacttcatgatagcttttgatatgttgataaccaacactttcttttggaagagagactcccatttagtgacctaaagtagtggcaaacactctagtcagattgactttcttcttacaagaagagagaataaacgagcatgcttggattgtgtgcccttgtggtggcattcttttgtttataggtgtgtcgtgtaggggtagggatgaaagcggtcggaaatggttggtaaatgttaaaataatttccattttcatattttttatcggaaacgaaacaaaaaaggtaactcccgctccctctccatgggccatgaccacggcgtgaaacaggagccgaactaatggggcttgcacattttcactagaccaccacgagctgtggagctgatacagtttacagtgtgcggcatgagtttaatcccatatcgcttgttttggacgagtgaagtcaggcaaactctataaaagaagactataggcgccaagtgaactcacttatttagtgccttttggctgagagcctaagactgcgactagtacatggtcttatcagtttaatataactaatttaatatttaatatttgggttatgtgttcttcaataaatttatttttatagggctgtttggcttcatggccttgatttattttcggtaacattctgaatttttttctggtaaattccgattaaaatcggtaatcgaaggaaacaattgctagaatgatgtaccaattttgataccgtttccaattttttttccgatatcgattctgttttagaaaaatacctttactggtgaattcaatcgggaaaaatcgaaaacggtaaccagaatttcgataaattccgaaaccgttttcatccctatgtaggggtaaacagtactagattgtgagaacgaagtggcggaaactaaagggaggtaagacagtattcaaggaaagggccattaaatggtgcgtttagaagaaagatgacacaaaaatattggagaagatgtcaacatgcattcggaaggtggctttagaggtgtatggagcaattaaagggagtggagtttgaagttaaaggttggtggtggaatgagagtccaaagggctattaaggagaagaaagaatgctacaaacgcctgtaccatgtcgggattgtggacaacatagagaagtacaaggtagcaaagaaggttgcgaatagagctacaagtgtggcaaagagttgggcgtttgagaatttttaataacgtttgagtatgaaggaaggcgagggtggcatatttaggatggctagggttcgtgagaggaagacatgagacttcaactaagttaagtgcattaaggatgaaacagaacacctcttggtgaaggaggatgagatcaaacatagataattatagtattttgataaattgttcaatggggagaaaaaggacaactcttttgatgacaccaatatgcactttttgcgtagcatccaagaatctaaggttcgagagacattgaaaacgatgaaagggggtaaggcgatgtgccattatggtatcctaattgaggaatggagatgccttggttacataactacattatgcctaatcaagttgttcaaccatgtctttcggtcgaacaagatgcctgacaagtgaagtatattggtattgatatacaagaataagggagatatttgaagttgtacagattaccagggaattaagctgatgagcccgactatgaagctattggagagagttattgagcattgtttaagaggaataataagaatctatttgaaccaatttggtttcatgcttagaaagtcaatcgtggaagtcattttcttaataagacaagtgatggagcagtatatagagcagcagaagtacctacacgtggttttcattgacttggagaaggcttatgacaaaataccagataatgttatgtggtgggctttggacaaacaaaagtttcaatgaagtacattggactcattaaatacatatacaacaatgttgtgactagtgtttgaacaagtgacgaggacacaaatgactttacgattagaataggactacatcaaggattaggatttgagccctcacctttttgccttggtgatggataagttcacaagggacaaaggggatgccccttggtgtatgctttctgcagagtgcagacgatgtagtgctagttgatgaaagacatgcatgggtaaatagaaaactagagttgggacgttagacttgttactaaccttgattaggcgagataatcacccccacgggtactgtagcatatatataggcatataggcagacaatatgggccttatgggccttaacaccccctgtcaaactcaaggcggaagtggaggatttgaagcattgagtttgattagatgaaactgatgttgtgccctagtttgtgcttttgtgaagaaatccgcaagctgtaattctgagggcacatattgaagatcaatggtcttctgatgacaatgagatctagtgaatgagacatcaacaccaatgtgttttgtgagttcacgcttcactggatcatgacaaatttgtatagctccagtgttgtcacagcgaagaagtgtaggcgagtcacaagaaacgcctagatcagccaagagccaacgaatccagataatctcagcagtagtagtagccagggttcgaagttctgcttcagtactagatctagatacaacagcttgcttcttggatttccaagcaataggggatgatccaagaagaatacagtaaccagtgatggagcgacgatctgtaggatcactgacccaggtagcatcagagtaagcgtgaagctgagtggggaatttgagtcataaaataaacattgtgtttttgtcccccgtaaatatctaagcacacgaagtaagtgcccataatgaactgatgtaggagcagagacaaactgactcaagatctgaaccgcatgagcaatatctggcctggtgacagtaagataaactaagctgccaacaagatgtctatatcgagatggatcctccaaaggtgtcccatcagtcggacgaagagataaatgtagatccataggcgtggcaacagtgcgagtatcactaagaccagaacgatcaagaagatcttgtatgtacttggcctgagaaagataaataccattttgagtctgcaaaacctcaatgcccaagaaataactgagtgcccccaaagtcagacatttgaaattccttactcagagacgccttcacatgagcaatatggtctggatcatcgcctgtaatcaacatgtcatcaacatatagtaataacaacgtgcgtcctcgtgaagaaacatgaatggacaatgcaggatcatgatcactagaatagaaaccacaagccttgatgacagaaacaaatctctcaaaccaagcacgaggagcttgtttgagaccatacaaggctcgacggagacgacatacatgccctgatggaacctctatcccaggaggtggatgcatatagacttcctcatgtaaatcaccatgaagaaaagcatttttgacatccatctgagagatagtccaagaagatgaggctgcaacagcaagtaaagctaggacagtagtcagatgggccacaggtgcaaaagtctcatcatagtcaataccctgtgtctgttgaaaacctctggccacaagacgagctttatatcgctcaatagacccatcagatttggttttaaccttgaatacccatttgcacgtgataggtacaacaccagcaggtaacggaacatcccatgtacatgtgcgatgaagggcatttaattcatcagtcatagcaagctgccactcaggtataccagacgcctctttataagatgatggttcagcaatgactgcaccagcacgggaaaacccataacgttctggagctgcaatagtgccacggtcacgaagatgatacccctgattaaaaacaacatgagagtcatcattgttagtacaagtatcagcaacaggatcgtcatcaggactggccgtgggagtagagcgaggacgacgaatgtaagtctgagtgacaggtggtttggaagagtaagacggagatgttgtggaagtggaaggtggtgtgatgggaataaggacatctggggtagaaacagtaggtggtgatacttatgaagtttcagaaatgggaggaaggctcatgaaggaggtagactctgtggaataaaaagaagaatgagtggaagagttgtaaaagaagggacaattttcattgaagctcacatctcgagaaatacgcatgcgacgagaagatgaatcataacatcgatagcctttatgttcagggctatatccaagaaaaacacactcaacagattgagcagtcaatttagtacgttcacgaggtgataatagtacataacacgtacatccaaaaactcgaaaggtggtcatatcgtggaggagttccgaaaagaacttcaccaggtgttttgccagagagtttggatgacggttgtctattgatgaggtaaaccgcagtagaaactgcttcaccccaaaaatgtgacgggacaaaagaagatatcaacaaagtgcgagcagtttctataatgtgacgatgtttgcgttcatccacatcgttctgtgatgtnnnnnnnnnnnnnnnnnnnnnnnnnnnnnnnnnnnnnnnnnnnnnnnnnnnnnnnnnnnnnnnnnnnnnnnnnnnnnnnnnnnnnnnnnnnnnnnnnnnnaaaagaaagtgagcaagggtaccttttgaagtcaaaaactggcggaaattatcagataaatattcaccaccagaatcagaacgaaaggttttaatgtgagtggaaaattgagtgtgaatcatacgagcaaaggttttataaatagaaatcagctcagagcggcgtttcatgaaataaatccaagtgtagcgagaatgatcatcaataaaaataacatagtatttatatccaccttttgacacaaaaggtgcaggaccccaaatatcagagtgaaccaaatcaaagggttgaacagaatgagaatgactagtaaaatatggaagttgtatttgttttccaagatgacaacccttacaatgaaaatcagactcaaccgaagtatgacctaagcaacctgactttattagagtagacaatctagatccacacaaatgacctagacgatgatgccactgggcaaaagacgcaacagaagcaagggtagctgaaagcacatgcgctggagatgtagtcaaggaaggaagccgcaaagagtccaagatgtagaggcgaggagcagctctacggcgacggccagtcccaatcacttcccctgtacgaaggtcctgtacaaaacaagatgagtcatcaaatccgacaaagcaattatgatccgtaatttggcctactaaaagaaggtccatagatagctcaggaacaaagaaaatattaggtactgtaaagtgtggatctgaaagataacccttatgagtaatgtggcatacaataccatcagctgtctgcactgaagcaccatctgtgacaggtgtagtagaagccaactttgactgatcagatgtgacatgaaaggaagctcctaaatcaagtacccaggccgactctgaagtacaagcggatgaagtggcagcaacagcaactgagcctctattagatggtcctggaccacgaccacgagcagcacatcgtgcacggaaatcagtcaacttatcagggaacttgacaaagcaaaagctcagatcgatgattggtcttgccacaatgatcacaaggcttaaaaaatattcttagggtttctgggcaacaacccaacacactgtgaggattaccaccagtagaggacagagaattaagacgagtctcttcagccaagtaaagcagacaactgcagaggtgcggcagaaatcgacgacgcagatccggttccgcagcccttgcggcgtgcagcagacagcaactacagaggtgcggcagggcgcagaagccagcaggcgggttgaggtagtgcgacgcagcagacaaataggcaacatgtgggcggcggctgaggcagggcgcagtgcggcgcagcaggcaacagcaggtggacggcggctgaggcagggcgcagtgcggcgcagcaggcagcaggcgggcgcgcagcaggcagcaggcggacgacacaagagctcagatccgcggcccgcgggactgaaggaaaaccgcgacggcgcggcagaggaagcggggaaaccgcgacggcggctgcggatggcgaatggaggccgcccagatccgccgcgacggcggcagaggaagcagaaccgcgacggcggctgaggatggaaccgcgacggcggtaggtcggaccgtagaaggctggccgcgatgggcggacggcgcagcagcgacgcgacggcgccaaagaaaattgatgagggacggattagatgtaaaccctaaccctaacctcctctgataccatgttactaaccttgattaggcgagataatcacccccacgggtactgtagcatatatataggcatataggcagacaatatgggccttatgggccttaacaagactcagagtccaaatattttaggctcactaaaactaagaccgaatgtatgagatgtgattttggcactactacacatgaaggagatgctagtttgtcactactacacatgaaggagatgctagtttgtaaggtcaagtagttctcaggaaggacacctataggtatttaaggttaacactacaaagagatgaatatgttagccatagaatcaaaatagggtggatgaagtggtgtcaagcatatgccgttttctatgacaagaggatactagaaaagtttttttttatgggatgacgattaggcttgctatgttgcatggtgcagaagttggcctacaaaaagatgacatgttcaacagataagtgttgcagaaatgagtatttcgtgttggatttgtggccatacaagaagggatcttgtccggaacgatgatatatgtgataggtttagggggtagcataacaccgattgaagaaaaacttgttcaacaatggttgatatgttttggacgaagacctctagatactagtactagtgagatcctaaggcacagtagtaaaccctaaacccttggaatagaggaagaccgaagttgacatggacagagagtaaaaggagacttgaaaggatgaaatataccagaaggtttagcctaggagtgtaggcaaaatagctaaaaaggagatttgaaaggatgaaatataaccgaaggtttagcctaggagtgttgggaaatagctatccatgtgcccgaaccttgacttgtggattatgttggggtttaactgtagtctacccaacttgcttgggactaaaattttttgctgttatcctttgtggtgatggaatttcgaaaggcacaaatcttgaatctgtcttctcgttcatcttacagctgggaatggtgaagacatttttacacgcaatggtagatggaacttcaacaataaggtcagcatgtataacatattcttgtttatgtgtaaatggattttcatgatttcacctgtaatatttggaattctgttattcagaggctcattagagcttgtagtgtcgagaaatgggcggtggtaaacttttctgcacgatgcaatgtcagggatcttgtccgggatctcatcaagtgtggaggcatgaagggcattgtaagttgttttctcattatgttgcattttccccacatgttctaattcatgtgtttggtattgcatttctacatgttcttattcacttgtttggtattgcagatggttgatgctccttttgctgtatttgatgagaatccttcaatgagacggtcacctgctataagaagggttgaagacatgtttgaacaagtgaaaactaagcttcctggagcaccaaagtttcttttgtgtgttctagctgaaaggaagaattctgatatttatggttggttaatactactaaatctatgttaaactctggtgcattttactttcggctgtagcattttgccattgacctctacagggccttggaagaagaaatgccttgctgaatttgggatcgttacacaatgtgtggcaccaactagagtgaacgaccagtatcttacaaatgtcctacttaagataaatgcaaaggtctgtttctctgtcttgagatttgagagcatggctagatttgtatatggcaattaaatattttgatatttttttctttttcaaacagctgggtggcatgaattcgttgctccaaattgaaacatccccagcaattcctcttgtatccaaggtcccaactataatcttgggaatggatgtgtcacacggttctcctggacattctgatgtaccatctattgctgctgtaagtatatttttcgtaattttctgtgatatttaataaacagtagctactgtgacagttttattttgttttacttaggttgttagttctcgtgaatggcctcttatctcgaaatacagagcttctgtccgcacccaatcacctaaaatggaaatgattgactcattgtttaagccacgggaagctgaagatgatggtctgatccggtaagagatcttaacctgcattacatttgttaagttatgtacttagacatgatttctcccattacctgttggattttgatgtttctttagggagtgtctgattgacttctacaccagttctgggaagagaaagcctgaccaagttatcatattcaggtttgttattttttatgcatctgagttagttaacttctttgcgtccaagtaactgtttggtcgataaaattggttgtctatctctcgtttcctctgttttgttataagcacaaagctgatttgtgtctaattatagggacggtgttagcgaaagtcagtttaatcaggtgctgaacattgagttgcaacaaatcatcgaggtatttttttctttttgttagcaactgtatgtgcacgctctattggttgtgttgtcatggttccttttatccaagtatcctgtactgtgtggttgtccacattaacatggtcctattacctcttcaggcttgcaaatttcttgatgagaaatggaatcccaagttcacgttgattattgcccagaagaatcatcacactaaatttttcattcctggaaagccagataatgtcccaccaggtaatcttcatcacctgccagcctgcagtggcaaccgtgtaggctcaatttttggcgaccttgttatattctctaatattctcgatggctttacctgcaggaactgtggtggacaacaaagtctgccatccaaagaacttcgatttctacatgtgtgcgcatgctggaatgatcgtaagcatcatctgcctttggatttggtctgtggtcatgtgtcattttgggactgtcagtttgccctgaaatgagaaatgtcctgcatttataaccccccgcacaaaagcaactgtgttcagatttaaattgctccagtggatggcaaaatgctggaatgattgcatgttttttttttgccaggggactacgaggccaactcactaccacatcctgcatgatgagataggcttcagtcctgatgatctgcaggagctggtgcattcgctctcttatgtgtaagtaccaagcagaagctcttgtcttgttaagaaagttgcttgctcacaagcgattttctgggactttatttcaggtaccaaaggagcacaacagccatatcagtcggtaagttaccttcatttctgtgtcaaaccgttaacaccacccccagcagcgggaagtgatttcccttgtttgcctttctgcagttgctcccatctgctacgcacatctggcagctgctcaggttggccagttcataaagttcgatgagatgtcggagacgtcctccagtcatggcgggcatacttcggcgggcagcgttccggtccaggagctgccgcgcctgcatgagaaagtgaggagctcgatgttcttttgctgagccgtggttttacttttttggtggatggtgaacccctctagttatgtcggtagacgctcttggatgacgctctagttgtggtccaggaaggctcgagctggtacgatgttaaatgttagttttttaagcgtcgctgcggctatgttggtgcctcaggaagacttggaacctggttaggatgtcgttaaatctaccccttatcgttcctggttcgttgggctgttgttcttattgtccgtcctggtgtctgatttctgctttgttgcatgcaagtgtgaggcccagcttgatattgaaaagtttggcgtacatgtcgttcatttggcactc

SEQ ID NO: 666 - DNA, 12825 bp, Zea mays
  source 1..12825: mol_type = other DNA
gcattttagccattccatgtctttaactctgttccctttttgcttgcaggggttgcctattagtaaggcaatcattcttccacaacaatccttccaattttgttgacctgggtggtggtgtagtgggctgtagaggttttcattctagttttcgagcaacccagagtggacttttcactcaatatcggtctgttttcatatatatgccctgttttaatctatacaatacaatgttcatctctctaggctgttggtaatgtctgcgtgtattaaaataacctcgtctgtgcagatgtgtcgactacaatgatagtgaaacctggtcctgtcattgattttctgcttgacaatcagaaagttggtgatccaagcatgattgattgggctaaggtaatgctttatgccaatgcatcaaatggtatagagataaaggttgggttccatttcatgaaactttagatgtacagttttgcaatttgctttacttctgcaggccaagcgtgcaatgaagaacttgaggataaaaataagtccagcgtacctagaacagaagattattctttcaatctaatttgttgtggaataggattgaaagagctgaccaaatatgggcacccaaacgaagattcgaccaggaatcaagaagtgcgaccccggcatataatacgatggcgtctctccgctctcacaaacacatctcctgtgactataacggaaaaannnnnnnnnnnnnnnnnnnnnnnnnnnnnnnnnnnnnnnnnnnnnnnnnnnnnnnnnnnnnnnnnnnnnnnnnnnnnnnnnnnnnnnnnnnnnnnnnnnnagtgtgtatgtatttgcactttgttttgttctctaagttccttttgagttatgcatcttagttttatatatacagcttctaagtacttggtgattttcttgcttatgtagattcacactgaaacataaaaatggtaacaatggtgactctgaagagatcactgtttatgattacttcgtaaagcagcgtggcatagtgctgcaatactctggtgatcttccttgcatcaatgtgggaaaactaaagcggccaacatattttccaattgaggtaactattatttgaatcctaatgttgttccttcgatgtaaatctctttccccctgctaatgttgtgaagattgtttccatgtttaccagttatgcagtcttgtgcctttacaaagatacactaaagctttgaacacacttcagaggtcatcactcgtggagaaatctaggcagaaaccgcaggaaaggatgtctgttttatctgatgtgagtgtattttttggtttaaatcttagcatttttttctcgaacatgcaggaaagctgcgtatcattatattaagaagagaaagaaagagagctgcgtagcatttttcttgttagtaatgtaaccttagcaagcggggttattggtaggtatggtttccttaacttgttcttttttccatgtcaaattgagtaggtgctgcaaagaagcaactatgatgcagagcccatgttgaaggcatgcgggattacaattgctagaaatttcacagaagttgatggtagggtattgcagccacctaaggttggtcattactatttgtcctatattattttagatatcctgaggatagttgtgataggcttggcgagtcaacgttaaacctagccattctaatagagatgaaatccaaaaaaatatgtttggcgatgtgtcatcataacacgggtatggtgttaaatcgacaaccccttggtggcatgccatgtcataatttggcatggtgtaaagtgagcaaggattaggttattacttaggggcatgctacatcggcgctcgcttgtaatgaaaaatgtgcaagagtcttcacaccatcgatgggtgcgaagggtatggaagctagtcgaaccaactaggattcgtttaggtagctaggaatgtagggtcgcttacaggtaagttaaaggagttagtgcagagatcgactaggagacatgtaatgtaaatatcttatgtgtccaagagattaaatggaagagtcagaaggcaaaggatgtggacaatactagcttcaagctttgatgcaatggtaactgtaaatagaaatgaagtaggagttttgattgataagaactccaagaatggtgtggtggatgtgaggaggcaaggagattggattatcttagtcaagtttgtcgtgggtgatttgatcttgagtgtaattgtctgtatgcccccaaagtaggccatgatgagtgtaattggcttttctagaagacttatatggcatggttatacatactactgagaagctttttagagctttgaatgagcatgtagctataagtgcaggtttcgaggcagtccatggtggtattggagtatggtaataggaattagtagggagaggaagtcttggacttcatgatagcttttgatatgttgataaccaacactttcttttggaagagagactcccatttagtgacctaaagtagtggcaaacactctagtcagattgactttcttcttacaagaagagagaataaacgagcatgcttggattgtgtgcccttgtggtggcattcttttgtttataggtgtgtcgtgtaggggtagggatgaaagcggtcggaaatggttggtaaatgttaaaataatttccattttcatattttttatcggaaacgaaacaaaaaaggtaactcccgctccctctccatgggccatgaccacggcgtgaaacaggagccgaactaatggggcttgcacattttcactagaccaccacgagctgtggagctgatacagtttacagtgtgcggcatgagtttaatcccatatcgcttgttttggacgagtgaagtcaggcaaactctataaaagaagactataggcgccaagtgaactcacttatttagtgccttttggctgagagcctaagactgcgactagtacatggtcttatcagtttaatataactaatttaatatttaatatttgggttatgtgttcttcaataaatttatttttatagggctgtttggcttcatggccttgatttattttcggtaacattctgaatttttttctggtaaattccgattaaaatcggtaatcgaaggaaacaattgctagaatgatgtaccaattttgataccgtttccaattttttttccgatatcgattctgttttagaaaaatacctttactggtgaattcaatcgggaaaaatcgaaaacggtaaccagaatttcgataaattccgaaaccgttttcatccctatgtaggggtaaacagtactagattgtgagaacgaagtggcggaaactaaagggaggtaagacagtattcaaggaaagggccattaaatggtgcgtttagaagaaagatgacacaaaaatattggagaagatgtcaacatgcattcggaaggtggctttagaggtgtatggagcaattaaagggagtggagtttgaagttaaaggttggtggtggaatgagagtccaaagggctattaaggagaagaaagaatgctacaaacgcctgtaccatgtcgggattgtggacaacatagagaagtacaaggtagcaaagaaggttgcgaatagagctacaagtgtggcaaagagttgggcgtttgagaatttttaataacgtttgagtatgaaggaaggcgagggtggcatatttaggatggctagggttcgtgagaggaagacatgagacttcaactaagttaagtgcattaaggatgaaacagaacacctcttggtgaaggaggatgagatcaaacatagataattatagtattttgataaattgttcaatggggagaaaaaggacaactcttttgatgacaccaatatgcactttttgcgtagcatccaagaatctaaggttcgagagacattgaaaacgatgaaagggggtaaggcgatgtgccattatggtatcctaattgaggaatggagatgccttggttacataactacattatgcctaatcaagttgttcaaccatgtctttcggtcgaacaagatgcctgacaagtgaagtatattggtattgatatacaagaataagggagatatttgaagttgtacagattaccagggaattaagctgatgagcccgactatgaagctattggagagagttattgagcattgtttaagaggaataataagaatctatttgaaccaatttggtttcatgcttagaaagtcaatcgtggaagtcattttcttaataagacaagtgatggagcagtatatagagcagcagaagtacctacacgtggttttcattgacttggagaaggcttatgacaaaataccagataatgttatgtggtgggctttggacaaacaaaagtttcaatgaagtacattggactcattaaatacatatacaacaatgttgtgactagtgtttgaacaagtgacgaggacacaaatgactttacgattagaataggactacatcaaggattaggatttgagccctcacctttttgccttggtgatggataagttcacaagggacaaaggggatgccccttggtgtatgctttctgcagagtgcagacgatgtagtgctagttgatgaaagacatgcatgggtaaatagaaaactagagttgggacgttagacttgttactaaccttgattaggcgagataatcacccccacgggtactgtagcatatatataggcatataggcagacaatatgggccttatgggccttaacaccccctgtcaaactcaaggcggaagtggaggatttgaagcattgagtttgattagatgaaactgatgttgtgccctagtttgtgcttttgtgaagaaatccgcaagctgtaattctgagggcacatattgaagatcaatggtcttctgatgacaatgagatctagtgaatgagacatcaacaccaatgtgttttgtgagttcacgcttcactggatcatgacaaatttgtatagctccagtgttgtcacagcgaagaagtgtaggcgagtcacaagaaacgcctagatcagccaagagccaacgaatccagataatctcagcagtagtagtagccagggttcgaagttctgcttcagtactagatctagatacaacagcttgcttcttggatttccaagcaataggggatgatccaagaagaatacagtaaccagtgatggagcgacgatctgtaggatcactgacccaggtagcatcagagtaagcgtgaagctgagtggggaatttgagtcataaaataaacattgtgtttttgtcccccgtaaatatctaagcacacgaagtaagtgcccataatgaactgatgtaggagcagagacaaactgactcaagatctgaaccgcatgagcaatatctggcctggtgacagtaagataaactaagctgccaacaagatgtctatatcgagatggatcctccaaaggtgtcccatcagtcggacgaagagataaatgtagatccataggcgtggcaacagtgcgagtatcactaagaccagaacgatcaagaagatcttgtatgtacttggcctgagaaagataaataccattttgagtctgcaaaacctcaatgcccaagaaataactgagtgcccccaaagtcagacatttgaaattccttactcagagacgccttcacatgagcaatatggtctggatcatcgcctgtaatcaacatgtcatcaacatatagtaataacaacgtgcgtcctcgtgaagaaacatgaatggacaatgcaggatcatgatcactagaatagaaaccacaagccttgatgacagaaacaaatctctcaaaccaagcacgaggagcttgtttgagaccatacaaggctcgacggagacgacatacatgccctgatggaacctctatcccaggaggtggatgcatatagacttcctcatgtaaatcaccatgaagaaaagcatttttgacatccatctgagagatagtccaagaagatgaggctgcaacagcaagtaaagctaggacagtagtcagatgggccacaggtgcaaaagtctcatcatagtcaataccctgtgtctgttgaaaacctctggccacaagacgagctttatatcgctcaatagacccatcagatttggttttaaccttgaatacccatttgcacgtgataggtacaacaccagcaggtaacggaacatcccatgtacatgtgcgatgaagggcatttaattcatcagtcatagcaagctgccactcaggtataccagacgcctctttataagatgatggttcagcaatgactgcaccagcacgggaaaacccataacgttctggagctgcaatagtgccacggtcacgaagatgatacccctgattaaaaacaacatgagagtcatcattgttagtacaagtatcagcaacaggatcgtcatcaggactggccgtgggagtagagcgaggacgacgaatgtaagtctgagtgacaggtggtttggaagagtaagacggagatgttgtggaagtggaaggtggtgtgatgggaataaggacatctggggtagaaacagtaggtggtgatacttatgaagtttcagaaatgggaggaaggctcatgaaggaggtagactctgtggaataaaaagaagaatgagtggaagagttgtaaaagaagggacaattttcattgaagctcacatctcgagaaatacgcatgcgacgagaagatgaatcataacatcgatagcctttatgttcagggctatatccaagaaaaacacactcaacagattgagcagtcaatttagtacgttcacgaggtgataatagtacataacacgtacatccaaaaactcgaaaggtggtcatatcgtggaggagttccgaaaagaacttcaccaggtgttttgccagagagtttggatgacggttgtctattgatgaggtaaaccgcagtagaaactgcttcaccccaaaaatgtgacgggacaaaagaagatatcaacaaagtgcgagcagtttctataatgtgacgatgtttgcgttcatccacatcgttctgtgatgtnnnnnnnnnnnnnnnnnnnnnnnnnnnnnnnnnnnnnnnnnnnnnnnnnnnnnnnnnnnnnnnnnnnnnnnnnnnnnnnnnnnnnnnnnnnnnnnnnnnnaaaagaaagtgagcaagggtaccttttgaagtcaaaaactggcggaaattatcagataaatattcaccaccagaatcagaacgaaaggttttaatgtgagtggaaaattgagtgtgaatcatacgagcaaaggttttataaatagaaatcagctcagagcggcgtttcatgaaataaatccaagtgtagcgagaatgatcatcaataaaaataacatagtatttatatccaccttttgacacaaaaggtgcaggaccccaaatatcagagtgaaccaaatcaaagggttgaacagaatgagaatgactagtaaaatatggaagttgtatttgttttccaagatgacaacccttacaatgaaaatcagactcaaccgaagtatgacctaagcaacctgactttattagagtagacaatctagatccacacaaatgacctagacgatgatgccactgggcaaaagacgcaacagaagcaagggtagctgaaagcacatgcgctggagatgtagtcaaggaaggaagccgcaaagagtccaagatgtagaggcgaggagcagctctacggcgacggccagtcccaatcacttcccctgtacgaaggtcctgtacaaaacaagatgagtcatcaaatccgacaaagcaattatgatccgtaatttggcctactaaaagaaggtccatagatagctcaggaacaaagaaaatattaggtactgtaaagtgtggatctgaaagataacccttatgagtaatgtggcatacaataccatcagctgtctgcactgaagcaccatctgtgacaggtgtagtagaagccaactttgactgatcagatgtgacatgaaaggaagctcctaaatcaagtacccaggccgactctgaagtacaagcggatgaagtggcagcaacagcaactgagcctctattagatggtcctggaccacgaccacgagcagcacatcgtgcacggaaatcagtcaacttatcagggaacttgacaaagcaaaagctcagatcgatgattggtcttgccacaatgatcacaaggcttaaaaaatattcttagggtttctgggcaacaacccaacacactgtgaggattaccaccagtagaggacagagaattaagacgagtctcttcagccaagtaaagcagacaactgcagaggtgcggcagaaatcgacgacgcagatccggttccgcagcccttgcggcgtgcagcagacagcaactacagaggtgcggcagggcgcagaagccagcaggcgggttgaggtagtgcgacgcagcagacaaataggcaacatgtgggcggcggctgaggcagggcgcagtgcggcgcagcaggcaacagcaggtggacggcggctgaggcagggcgcagtgcggcgcagcaggcagcaggcgggcgcgcagcaggcagcaggcggacgacacaagagctcagatccgcggcccgcgggactgaaggaaaaccgcgacggcgcggcagaggaagcggggaaaccgcgacggcggctgcggatggcgaatggaggccgcccagatccgccgcgacggcggcagaggaagcagaaccgcgacggcggctgaggatggaaccgcgacggcggtaggtcggaccgtagaaggctggccgcgatgggcggacggcgcagcagcgacgcgacggcgccaaagaaaattgatgagggacggattagatgtaaaccctaaccctaacctcctctgataccatgttactaaccttgattaggcgagataatcacccccacgggtactgtagcatatatataggcatataggcagacaatatgggccttatgggccttaacaagactcagagtccaaatattttaggctcactaaaactaagaccgaatgtatgagatgtgattttggcactactacacatgaaggagatgctagtttgtcactactacacatgaaggagatgctagtttgtaaggtcaagtagttctcaggaaggacacctataggtatttaaggttaacactacaaagagatgaatatgttagccatagaatcaaaatagggtggatgaagtggtgtcaagcatatgccgttttctatgacaagaggatactagaaaagtttttttttatgggatgacgattaggcttgctatgttgcatggtgcagaagttggcctacaaaaagatgacatgttcaacagataagtgttgcagaaatgagtatttcgtgttggatttgtggccatacaagaagggatcttgtccggaacgatgatatatgtgataggtttagggggtagcataacaccgattgaagaaaaacttgttcaacaatggttgatatgttttggacgaagacctctagatactagtactagtgagatcctaaggcacagtagtaaaccctaaacccttggaatagaggaagaccgaagttgacatggacagagagtaaaaggagacttgaaaggatgaaatataccagaaggtttagcctaggagtgtaggcaaaatagctaaaaaggagatttgaaaggatgaaatataaccgaaggtttagcctaggagtgttgggaaatagctatccatgtgcccgaaccttgacttgtggattatgttggggtttaactgtagtctacccaacttgcttgggactaaaattttttgctgttatcctttgtggtgatggaatttcgaaaggcacaaatcttgaatctgtcttctcgttcatcttacagctgggaatggtgaagacatttttacacgcaatggtagatggaacttcaacaataaggtcagcatgtataacatattcttgtttatgtgtaaatggattttcatgatttcacctgtaatatttggaattctgttattcagaggctcattagagcttgtagtgtcgagaaatgggcggtggtaaacttttctgcacgatgcaatgtcagggatcttgtccgggatctcatcaagtgtggaggcatgaagggcattgtaagttgttttctcattatgttgcattttccccacatgttctaattcatgtgtttggtattgcatttctacatgttcttattcacttgtttggtattgcagatggttgatgctccttttgctgtatttgatgagaatccttcaatgagacggtcacctgctataagaagggttgaagacatgtttgaacaagtgaaaactaagcttcctggagcaccaaagtttcttttgtgtgttctagctgaaaggaagaattctgatatttatggttggttaatactactaaatctatgttaaactctggtgcattttactttcggctgtagcattttgccattgacctctacagggccttggaagaagaaatgccttgctgaatttgggatcgttacacaatgtgtggcaccaactagagtgaacgaccagtatcttacaaatgtcctacttaagataaatgcaaaggtctgtttctctgtcttgagatttgagagcatggctagatttgtatatggcaattaaatattttgatatttttttctttttcaaacagctgggtggcatgaattcgttgctccaaattgaaacatccccagcaattcctcttgtatccaaggtcccaactataatcttgggaatggatgtgtcacacggttctcctggacattctgatgtaccatctattgctgctgtaagtatatttttcgtaattttctgtgatatttaataaacagtagctactgtgacagttttattttgttttacttaggttgttagttctcgtgaatggcctcttatctcgaaatacagagcttctgtccgcacccaatcacctaaaatggaaatgattgactcattgtttaagccacgggaagctgaagatgatggtctgatccggtaagagatcttaacctgcattacatttgttaagttatgtacttagacatgatttctcccattacctgttggattttgatgtttctttagggagtgtctgattgacttctacaccagttctgggaagagaaagcctgaccaagttatcatattcaggtttgttattttttatgcatctgagttagttaacttctttgcgtccaagtaactgtttggtcgataaaattggttgtctatctctcgtttcctctgttttgttataagcacaaagctgatttgtgtctaattatagggacggtgttagcgaaagtcagtttaatcaggtgctgaacattgagttgcaacaaatcatcgaggtatttttttctttttgttagcaactgtatgtgcacgctctattggttgtgttgtcatggttccttttatccaagtatcctgtactgtgtggttgtccacattaacatggtcctattacctcttcaggcttgcaaatttcttgatgagaaatggaatcccaagttcacgttgattattgcccagaagaatcatcacactaaatttttcattcctggaaagccagataatgtcccaccaggtaatcttcatcacctgccagcctgcagtggcaaccgtgtaggctcaatttttggcgaccttgttatattctctaatattctcgatggctttacctgcaggaactgtggtggacaacaaagtctgccatccaaagaacttcgatttctacatgtgtgcgcatgctggaatgatcgtaagcatcatctgcctttggatttggtctgtggtcatgtgtcattttgggactgtcagtttgccctgaaatgagaaatgtcctgcatttataaccccccgcacaaaagcaactgtgttcagatttaaattgctccagtggatggcaaaatgctggaatgattgcatgttttttttttgccaggggactacgaggccaactcactaccacatcctgcatgatgagataggcttcagtcctgatgatctgcaggagctggtgcattcgctctcttatgtgtaagtaccaagcagaagctcttgtcttgttaagaaagttgcttgctcacaagcgattttctgggactttatttcaggtaccaaaggagcacaacagccatatcagtcggtaagttaccttcatttctgtgtcaaaccgttaacaccacccccagcagcgggaagtgatttcccttgtttgcctttctgcagttgctcccatctgctacgcacatctggcagctgctcaggttggccagttcataaagttcgatgagatgtcggagacgtcctccagtcatggcgggcatacttcggcgggcagcgttccggtccaggagctgccgcgcctgcatgagaaagtgaggagctcgatgttcttttgctgagccgtggttttacttttttggtggatggtgaacccctctagttatgtcggtagacgctcttggatgacgctctagttgtggtccaggaaggctcgagctggtacgatgttaaatgttagttttttaagcgtcgctgcggctatgttggtgcctcaggaagacttggaacctggttaggatgtcgttaaatctaccccttatcgttcctggttcgttgggctgttgttcttattgtccgtcctggtgtctgatttctgctttgttgcatgcaagtgtgaggcccagcttgatattgaaaagtttggcgtacatgtcgttcatttggcactctggact

SEQ ID NO: 667 - DNA, 8846 bp, Zea mays
  source 1..8846: mol_type = genomic DNA
tatccatcctatattttttaaacttttatctacaaacaatatcatctacagtttcgcgtcctctatttttctgcactctactagagacaatattgtccaactatctacaatctttacatgtctgactcatatgaataagatataagtgattaattggctatatttgcagagctggatgccgatcggatctacgcataacactgtaccataagacaccccacatgttaatgttactatgttttattatctcctattaaagctttctcattattattttcttacggtggcgtatatagtgagtggtctgaagtaggacgcagcgtatcctaagccagtccaccagaccactaattcacttaggtctaaaaaaaataaaacaatatatattatatttgtattttctactgtatgcattggacttaaatattaaatttatagtttcatatactattcttatctttatattctgaattatatactaaattattatggattgtacgaaattatttatgaatttttatggcatacctcatataaaaattgtagctatgtcactgctttcttgtccatgagcttgtaccaaatcccccgcattcattcctcaaatcgttgcaattcccatctgcaacaccccccctctcatccattcatcaaatctttccaattccctccccaaatccgccgcattcaattttcaaatccttacgacttgcttccccaatcgacgcaaagcaaaaaaaaaaggaaacggaaggctggcagccgcacagccgtggcccggccccacttccgttctcgcgccggaggagcccaacaccggcaggtggcaaaagcgcggctactccctgactgactcactgcgaaagcgacagtgctagtactgcagcactgtgcccgcagttaacggagaaggaaatgccgcagctatcctttcgaacgctgcccaagctttttatgcaaaaacgggagcgacaccgtcccggtaccggccgcagccacacagccagccccacgcttgcgttgccgctaataaaaccgtagaatgctccgggtccacaggcatcgggttgcctctacccggccggcggaacccttcagtgacgatgactggtgggatacactttcactgggcccacaaatcagtcgagtagttgttgcggccgatgccgctttggcggtcagcgcgcagccgtgcgccgaggaagttgagagagcacggtgggcggcgcgagtgcgtgaggtgcctcccgcgtccaaccctcccctccacgtgtcgccttgtctggcccactgatgagtgactagtgatttggtgctatggatgaaaaaaaaatgcgccccccccccccccccccccccccccccccctcgcgcgcgcgtgggcgggtgcgggatgacctcgctgcccttccttccctgtccccggtgtacacgagggccgctggtacaagagcgtgggtgggcgcgggcgcacgagccacttcacttgtgctctctgttcggaaagaagcccggccgggtcggaaggggagcagttctcgccttctcggggaggtcgccagcggtaacggaaaaaccctcgtcccctccccccctcctctcacccggtccctgctggtcgaaatctagggttttggcggggtttggatcgcctgttctttgaccggaggttgttcgtgccggtgccgcgcggacttaaggagggtttctgcggtcagtcctgctgcgccctcgtgtggtctgttctacgtacgtttctttgtttttttttcttcttcttgttttaagatcgctgcattctggtctccgtttacagggtggtgtctttgtggatggattctgtttgcgttgggtttttttttcctgtatttgtttcggttgttttccatcaaacaggtcgagtcttttcctttggttaattgatggtatgcctccgtggcgcgcatgtgacaacttttgggggtttttcttctgttgattctatttgtgacttctccgattttcatctcttttttttgggtacgtggagggttttgttgctttcctgcttgcaatggcaaaggtcggacttgtcctctttcttcgtcgtgcatttgttcttgtcacgcgcaaaactgttcatttctctgcataaagggcagtttttgaataatactcattcggtgtttgataaatgtgcatctctggaaggttcattgttgaggatattagtgcagtgccttgttctggaatctggaaggttcgtccaataaggatttcagtgcggcgttgttaatttggggtacgcgctgcaattttctttttttttttcttttggtttctttggagtcatggaaatcccgctatcgctttccaaaggaaaaaatgttctttctttttcttgcctttcttcctggatttgttcccctttccaaatcttttgcgtctttgtggtatatatatagatgtataatgacatgactattattgtaatttatttgcattctcctatgtttatagtcgttttattgtcatatgatgatatggtatagttcgttttcatttgttgacgtgcagggttgggcagaggctttgcagcttttgggtcagacgcagtgttctcgtgagtatattatgccatatagtttactattttgtgtgaacatgtagaacattccttataaaggaccagtatgatatttctgtatgagttcaatcttctatcgactaaggtagtctgttgtgtaattgtgttcgaggtcctttatttattactgtttccatagtttgttgtttaacactgtttccgtagtttgtgagatgatcacgatttcattttttttgtttttaaatttgtacagtcacatcaattgtccttttgcttacctgtatcattcttacatctatattatgcagtaacttctcttacttcttcattgtatgaaatattaagaaacaaaataaatgacagatatttaaatgttccagtttctaattgatataagtggaatgtattccattgctgttagcatgggctacaaaataataaagtatcctgatgttacatttgtgtcgcatatttggtggggatgggatttgagagtaaacattgtggtttactgaaatgtataccgtttgcataatgtaattagttgccagttgatattacttgtgagaatgtgtattgttgggggtgtggcataagttagggacccccattagtggttttaagtttggatttcagttttttgaatagtttttatcacttcagcttgttatactactgaaatcagatgtttttatctctgttggaagggtgatttacctgtgtatttgtccttctgcttcagttgcgttgctgcttgcttgaatcatgcatctagtgcctacatatatatgtctgattggggttgctttggatactcatgcagcaaggctcactaaatggagtctcacaatggcgaggctgatgatttgcctccaccaccccctttggctgctggtgttgaaccacttaaagccgatgaaacaaagatgccattgaaacctaggagtctggtccagaggaatggctttggcagaaaggggcagcagataaagctgataacaaaccacttcaaagtttctctcatgaaggctgaagattttttctatcattactatgttcgtctctaatccttgccaagtatcacttctttatttttaacctcataccttcattatcaatgctgtcatcttttactggttgcaggtcaatttgaagtatgaagatgatacaccggttgatcggaaagggtcgggaagaaaagtgatcgaaaaactgcagcaaacttatgctgctgaacttgcaaataaagattttgcatatgatggtgagaagagcctgtttacaattggtgcccttcctcaagttaaaatggaattcactgttgtggatgaagacgtttcaactggaaagtaatgccttagttattttgttttatttatcattatctactctgatgataattatccctaaaatgttaacttgactttctggctttcaggactcctgcaaatggcagtccaggcaatgatagtcctcctggaagtgacaggaaaagggtccgaaggccttacaatacaaagacatataaggttgaactatcttttgcggcaaaaatccctatgagtgcaatctcacaggctttgaggggtcaggagtcagagcacactcaggaagcaattcgagtgattgacattattctgaggcagcactcagctaagcagtacgtaaatgtttcatgcaattcagaggacatattttcaaatattgctgttattattgacggttcttgtagtgtagccattccctgtctgtaactgtgcccctttttgcttgcaggggttgcctattagtaaggcaatcgttcttccacaataatccttccaattttgttgacctgggtggtggtgtagtgggatgtagagggttccattctagttttcgtgcaacccagagtggactttcactcaatatcggtatgttatcatctacacgccctgttttaatctacacaatactatgatcgtttctctctatgcagttggtaatatctgcatgtattaatatgctgtacagatgtgtccaccacaatgatagtgaaacctggtcctgtcattgactttctgattgccaatcagaaagttaatgatccaagcatgattgattgggcaaaggtaactccatgctaaatgcaacaaataatatagggataaaggttgagttccatttcaccatacttcagatgtatatttttgcaatttgtttacttctgcacaggccaagcgctcactgaagaacttaaggataaaaacaagtccggcgaaccaagaacagaagattgttggtctcagcgacaggccttgccgtgagcaattgtaagtagcatgttattgtttgaacggtttttatgttgcttgcactttttattttttctcccaagttccttgtgagttctgcatcttagttttatgtgcgttttctaagttcttgatgattttcttgcttatgtagattcacactgaaacataaaaatggtgaatctgaagagatcactgtttttgattactttgtaaagaaccgtggcataaagctggaatattctggtgatcttccttgtatcaatgtgggaaaaccaaagcgtccaacttattttccagttgaggtaactattttttgaatcctaatgttgttccttcagtgtaaaactcttttcccctgctaatgctgtgaaggctcttttcatgtttttaccagttatgcagtcttcttcctttgcaacggtacactaaagcattgagcacacttcaaagatcatcactcgttgagaaatctaggcagaaaccacaagaaaggatgtctgttttgtctgatgtgagtgttttttttggattaaaccttagcaaagttttctagttagtattatatataacaaaaaaataacaattgggcctagcaagttggattattagtgttggttttcttaaagtgttctttttcatgtcaaattggataggtgctgcaaagaagcaactatgatgcagaacccatgctgaaggcttgtgggattacaattgctagaaatttcatagaagttgatggtagggtactgcagccccctaaggttggttattgctgtttatcctatattatttcagatatcgttcgtggttatggaattttgaaggcgtaaatcttaactgtctttttgttcagcttaaagctgggaacggagaagacatttttacgcgcaatggcagatggaatttcaataataaggtcagcgtgcatagcacattcttgtttgtgtatatggattgtcatgatgtcatatgtaatatttggaaatttgtgtttcagaagctcattagagctagcagtgtcgagaaatgggcagtagtaaacttttctgcacgatgcaatgtccgggatcttgtccgtgatctcatcaagtgtggaggcatgaagggcattgtaagtttgttttctcattttgttgcacgtttctgtatatgttcttattcacttgtttggtactgtatttccacatgttcttatgcaattgtttggtattgcagatggttgatgcaccatttgctgtatttgatgagaatccttcaatgagacggtcacctgctgtaagaagggttgaagacatgtttgaacaagtgaaaactaagcttcctggagcacccaagtttcttttgtgtgttctagcggaaagaaagaattccgatatttatggttggttaatgctacttactcactgttaacttgtggtgcattttattttctgctgtagcattatgccattgacctttacagggccttggaagaagaaatgccttgctgaatttgggatcgttacacagtgtgtggcaccaactagagtcaatgatcagtatcttacaaatgtcttgttaaagattaacgcaaaggtctgtttctctttgccttggatttgagaacatggctaccgtcatatatgccaatttttttgattttttcccttttcaaacagttgggtggcttgaattcgttgctccaaattgaaacatccccagcaattcctctcgtatccaaggtcccaactataatcttgggtatggacgtatcacacggatctcctggacattctgatataccgtctgttgctgctgtaagtatatttttgtctttttctgtgataaataataaatagtggctatgtgacagttttattttgttttcctcaggttgttagttctcgtgaatggcctcttatctcaaaatacagagcatctgtccgcacccaatcaccaaaaatggaaatgattgactcgttgtttaagccacgggaaactgatgacgatggtctgattcggtaagagatcttacctgcattacctttgttaagagcatggtatactactatactttgctgaatgtcctatgccctctgttttaatgacatgttggaattcgatgttgcttcagggagtgtctgattgacttctacaccagttcagggaagagaaagcccgaccaagtcatcatcttcaggtctgttattattttaaattttctgtttgcaaatctgagtaattttttgtatggaaggtaactgtttggttgggaaaattggttgcatagcttttatttctgttttgttatagcaccaacctgatttgtgtctctgattatagggacggtgttagtgaaagtcagtttaatcaggtgctgaacattgagttgcaacaaatcattgaggtattttttttttgctggcaactctattggcagtttggtacgctctgtaggtgttgtggttcctcttatccaagtatccagtactgcgtgcttgtccacattaacatggtccattacctttcaggcttgcaaatttcttgatgagaaatggaatcccaagttcacattgatcattgcccagaagaatcaccacactaaatttttcattcctggaaagccagataatgttccagctggtaatcttcaccttccaagtctgctgttggtgctgtgtgtaggctcatgtatcggtggccttagtatattctctaaccatctgaatggctttatctgtaggcactgttgttgacaacaaagtctgtcatccaaggaacttcgatttctacatgtgttcacatgctggaatgattgtaagcgttatctgcctttgtgtttggtctgtgcagtgcagtcaattggtgtcgttttgggtctgttatagtttgccctgaaatgaggaatttcctgtgtttataaccccacaaaagctactgtgtcccgaattaaactgtcaatgggccttcgcagcatcggtggtaaacttagttgtattgctccagtaggtggccaaatttgatgtcgttttatttgtgtactcgtgctgtcatcatctcgtctcattgtgtatccttgggtttcactggtactttggttctgtactgctgctgccgtaagtttgcctaggaagacatggtttcttcctgtgaatcgatagagctaagtgccgtgttttcttttgccagggaactaccaggccaactcactatcacatcctgcatgacgagataggcttcaatcctgatgacctgcaggagctggtgcactcgctctcttatgtgtaagtaccaaacagagtctcagggaaaaaaaaaacttttgctgacttgtcctgttacgaaactttcctgctcacaaggggttttctggcacttcaatttcaggtaccaaaggagcacaacagccatatcagttggtaagtttatcttggcaccgtttttcgtttatgtcaaactcttatcacctgcatctgtgggaatttgattccttgtctgcctgcctgcagttgctcccatctgctacgcccaccttgcagccgcccaggttgggcagttcataaagttcgacgagatgtcggagacttcatctagccatggggggcatacctcggcgggcagcgtccctgtacaggagctgccccgtctgcatgagaaagtgaggagctccatgttcttctgctgagcagcagggaatgtgtcccttggttttacctttttgggtgtatggtcgggggttctgaacccatgaacttgttgcctcacttggttccagcctcaggaagaactttgtaggatgctgaatggtaggatttttaagcatcgttgcagttgtgctgggtggcacgctgcaaccattttggctagcttgttgcagcacttggtgccttcctgagaggaagtagacttggaacctggtagcacgtccttaaaccatccttttaagcgttgctggttcggcctctgagctgtgtttgtcgtgc

SEQ ID NO: 668 - DNA, 9490 bp, Zea mays; identical to SEQ ID NO: 662
  source 1..9490: mol_type = genomic DNA

SEQ ID NO: 669 - DNA, 12819 bp, Zea mays; identical to SEQ ID NO: 665
  source 1..12819: mol_type = other DNA

SEQ ID NO: 670 - DNA, 12825 bp, Zea mays; identical to SEQ ID NO: 666
  source 1..12825: mol_type = genomic DNA

SEQ ID NO: 671 - DNA, 9511 bp, Zea mays
  source 1..9511: mol_type = genomic DNA
tacatcacttccttggaatgcatgttcaacacaccagttccggtctctacctgtaacaacggcaatacatgattgagatccttgagcaagttggcatgagtgaatgcaaaccatgcactactcctgttgatataaatcccaagctttcagccgatggtgatctagtttcagacgctacagattttcacagtctttgcaggtgctcttcagtatctgacattcacacgtcctgatattttatatgtagttcagcagatttgccttcacatgcacgatccaagagaggctcaccttactgccctcaagcgtattctgcgctacattcgtggcacattggacttggttcttcttgtgcgcccttctcagtttgaactggtggtctactcagatgcagattgggctggctgtccagttactcatagatctacgtctggatatgcagtcttccttggggacaatctagtctcctggtcctctaagcggcaaaacattatttcccgctcgagtgcagaagctgaatatcgcgatttcgccaatgcagtcgctgaggctgcctgcattcgttagctcttgactgagttgcactcccccctgcccaagaccaccctggtgtattgcgacaacattagcgcagtctacatgtcttctaatccaatccagcaccagcgtaccaagcacattgagattgaccttcactttgtccgcgagcatgttgctcttggtgatgtccgagttctccatgttccaacgacataccagtttgctgacatcttcaccaaaggacttccgtcatcggtgttctgtgaatttcggtccagtgtcaacgtccgctgccactgcggggggtgttagagaatctgttatatatgggagggcctgagcctggcaatcttgtgctggccggctatagtatacatggatagagggaattagggagaggatttccttttgcctctcttcctcctctcctatatatgtacacaccaatcattcctcctcaattccgttcacttacagggggagaggagtactggtcaggatcaatcacgatccttaccatttagggcctattcggtttgttatggattataggaggggatttaatcccctccaatccataacaaaccgaacatggccttaggagatttcttttgtctcacctcctcctcccttacatatatgtacatgtatttcctctcaatcaatcaatccattattcctaccaccatctaacactctcgtttcttgttcggcgtcgcctccacccgctcaagcactgcctcgtctctacctatgctcgctcgaggcccgccaccatttttcctggcttgggtaccagactcggaggtttgtgaggtgcctattccatgggcctatttgaactgcttttgttctgattctagtggaaaaatgccgataaacggcaccaaatgcctcgcttccgacgccgcgtaacttgccatgtttccgacgccgcgtaacttgccatgcttcccccccatggagaaacgtgagcgtggaatgagttatcctcaagcatcgatgaaaatctccttgattctcttgtttcttgtttggtgccgcctccacctactcgagcttgatcactcaagcgtcgccccgcctctgcctctactcgattgaggcctacctccatctctccttgctagccgaagctagaccctgacttgagctcaacatttttgccaccagacatgcctccctccttgcttaggcactagagttggtgtaggatctgagactggaactgttgtctactcttttggcggcaacaaggatgggcatcccttgcaaggggaatatgcctccttctccgatgacaacagtggtgggtggtgcctgagagacaaggtagggggcctccctactccatgagcagggcccgtcgctaataggtggcctacctcctattctaccttgcctcgccccacctcacccttgtcgtccttaccagagcccaaggacgtccatgagttcttgtctggaagtgaacactaagctttcttttccccgtgattctcataaaaacattattcttgtgtcccgtttctcaatgaatctactacaaaaatgagtttataaaaataactcgacctgcgggtgtaagaccgccctacgacattatgttaagaagtcctcacgcaggtcgagaaaaccctcgaattcgtgtcccacccatacaaagcggcaacgtagcccatgtgataattaccgcgaccggagctaggccttagacctgtgctttggcgtgggacagacgaggggatttatttaaccaggcctgaaattcgctcgcacggggagttgaactaaggacataaggagtgctactcagaccacctaacgaagtcaattcaggccctttcgctacaataatgagtttatgacactttattcgtaaaatttagagcacaattactgttagactatgtgtgtgtgtgtgggacgacaccactattggctgccggcccattagggttatggtctcctgtgagtgtatatgttgtaatcccttctctatgcaatacaatcaagcatcacattccaatatgctatggagctagggtttcccaccttccctcccatagtcgccggttcatcccaactcccagccgccggccttgctgcttccgctccgtcgtccccggggggttcgtctgccctcccgggcggctctccttctgatgctccttccgctcctctttcccttcctcaactctaggccgccatcgttcttctcggccatgtcaaagcccaaggccgttgtcctcaactccagtagcatcagggcaagctcctccacacctaggcgtcggactccctagcggcttggcctgatgcgctcggccaccgttccccagcgtcgaccactgcaaccaagtcttcaccagcgcctcctctagctctgttctcggcatcgctcgtccttcttcccagacagggtgctccactcaccctcctgtagccccatggtcgaggcccccttgtctcagatcccgccgtcgccgtccggatccccattgccgtcgccaagatctcgacgacgtcgccctccttgccaagttgtgcctctgccatagctcgagcctagcttcctggcgagtcgcccttcgtctcagcctcaacggtgcagctcgacaaccctctccactgctccctagctcgcggcgcgggcacggctgtgactgttcgcccctgcgccgccggcggctgaccgcatggccagtcgaggcagagccatggctgatggctgctgctatgctacttactggtagtggaggctggctggcgtgacacccagccacctccctctcttgggccgcagaccctcgcgccctgcgccctagtcggatccatgtggccgtcgtgtcatgctgctcctctccttccccacctcttgtgagccgtgtgcgccatgcgacctctaacgcgggttccatgatgcgcccctggcggcgcgacctccagcgtgggctcggccagccaagcgcagcctcagctccggcacaggcgtggccctggtagggcacggtcggacaggggccgccatgacgcctggatcccccccggccgccggcaaccaaagccaccggcctcctctctctggcagcgtcgacccgccacatctggtcgccgcggccggccctggtcctcctcggcgctggcgcgcttccccggccacgacatgacatcccctccccactggcactcttccctgccccgccggctacctcgctccccctcctttctcgcggctcagatccgccgtggatcgaccctgccatggcaagtccctgcattgtcgcgcgaccttccccgccgccggctctactacgccgttggccgcctgatccgccgccgccgcgtctccacgcgccgttggctgcctgatccgccgtgcctccactcgtcgccgaccgaccagcaggtcgctccctttctcttcccctgccttgtgcgctgtgtagcccccgttgtcgtgtcgtccacctcttccctgactgcgccgacgcccagcagcgcctccaattgtcacgcttctcccgttgccggcgtcaagctccccttccaggtccggccccttcctggttggacccgccctgccgtgcgccttccttcttcgtcgcctttgttggatccgtcgctgtcgtgaccttcctggctagatccgtcctccctttggctggattgccgtcttcatggctggatccatcgttgttgtggctttcccgaccggatccgtcgggcgtggccaccctgaccgacgcagacgtgtgtgttgtcgctagccgcccctggtgaggctcctcgacgaccggtcgcggaatgaagcaagaaggctctgaggttgatgctgtccttttgtgtcacctcgccgatcgttgaccctcgagcgtcgacccctcccgaagaacaggcttgtgctgcgtgtctcctgaccacggccacttcaacttcggctaactcggcatccagaggctatcgtcttctcggagtccacaccggtctctactccaacagcaatattcgcaccctcacgacgctgcgactggagggatttcaacctgtcggctcttaccttcggcttctactccagtctcatcgtgtgtggtgccccctttgcgattgtgaggcgatgttagactatgtgtgtgtgtgggccggcaccactattgggctgccggccattagggttagggtctcctgtgagtatattgtaaccccttctatatgcaatacaatcaagcatcacattccaataattacaacttgctttcctactttatgattgctggtttcaactctctttttattgcctccccatgccaatttaggttgacaaagaccgaaatttacatggggagatgcgataaaaagagacttaaatgtttggggatatacctaaaggcttgtgcttgagtaacagtgcttgaaaagcaacaattgatgtgcctcaaccatgattaggggctcttgtttgggactgaaagactcggtggtgttgttgtaatactatgctctgcaggttgttggatctagatgctggccattgatatcacggtacagagcatctgtgcgcacccagtctccaaaggtagagatgattgattctctatttaagccactggatgatgggaaggatgatggcataatgaggtgatttagattaacatcttttcagttctttgttatgttctagttgacctcacagtaccttcatgttgtatgaagttatttggctcagcaagtggggccttagtctgttattatctaaaagataagaggaatgacctattacccttttcactttatcaatgcattgcagggaacttctactagacttctaccaaaccagtcaacaaagaaagcctaagcagataatcatcttcaggtgtgtactgagttatttttacccagttatatatgcctatggtggtgtcattcttttatgtaaaaggtgtgtttgtttccgatgctagtttgtaagtgtgttggtgtgagtgtggtgggtgtgttgtaatttatttgttatctcctaaatacaatgatacacaactctcttacataatctacaaaaaaattgtgtcatacattgttaagctgcgttgaatgtgttacttcattttttctctccaactcgaaggatcattattttggtgcagacaggaattttttgttttcttgaatgaccattattttggtgactcaaaggaacatttggtctttctttccatgttaatttgatgttttttaatttagaataatgaatgggggtctggtaagaagtgtttgactctacagtattttactaatcttaagccaggaaaagtcaaatatctgtagtgctgattttgtatctatatagttattggtttttttgtcaataaaaaactatcatttcctaccagcttttcttaaaattgtctatgcagtttctattcaaatgtgagctcttctgtgttaaatgatgaagatcagtttatagtacagaattgacttttctttgtgtgaaatgcaccataaacatccatgttgttcttgccagtaagaactatatctgaatattcagttggtgtcctttgattttccttttgaggattaaagttgatacatttcattaaatgaatgttatatttacagtgatggtaattaaatcatgtatgttcctttctatttattttgtggatgtaagagtatatttgtggtttattttttctgtattgatttgcttttttggttgcttcacgatgaactgtgggcgttcactggtgctgtgacttttttggtgtttctgtcaagagttctcggtattcagtgttgttgaattcttatccttattgtctgcatatgcagggatggtgttagcgagtctcagtttagccaagtactgaacgtagaacttaatcaaattataaaggttcttctatgcactgttttgcttgagaattccttcgttttcttgcattttttaacaagagttagacgacgcaggcatatcagagtatgggacagggggaccttccgaagttcacagtgatcattgctcaaaagaatcaccacacaaaactcttccaagctgattcaccagagaacgttccacctggtaagtacccttgtcccacttaatactgttaaagattcttcccctttaaacggcttgagcaacttacactttttctttgcatcagggactgttgtggactccggcatagttcatccaagacagtatgatttctacatgtgtgctcatgccggaccaattgtaagttctcctgagtaattttggattttgtttgaccgggtgaaatggacgaacattccacagattgacgacccccgcgtcctggttgcccccgcgtcgggcgactcggacgctccccataatccctagcagccgccgccgcccccttcgtggtcctctccctgccgcgccgctgcctgagctggccgccggaaggtccgtctgcttgcggggagggcggcggcagggcatctccgtctccctccggcggatctgggcgggcgcggccgccaaggtcgccgtgagttgctcgtcggcgtggtcggccccggcttcgccccctcacgactcgggcggctgccaactcccctccctccccatctctttgccttgctgccgccagagctagctggcgggttgctcgcacagctagcggtgaaggcgtcgggcgggtgcttgctgccttgtcgcgcgtccaaccctcggtggcggcgtccgcccactcaggcaacgggcctgcggctaggtgcgcgtccgcgaggctggcccggtggtggcgcctacgcgccgcgacggcaatcgctgctgctcggggttggaggtgtgcctgggctgtgtgctcgcgtaccggatgcgcggagggctggatctggcgcccccatggggagcggcgtcgacgcgcggtgggctagatctggcgcgcgaggttggcggcctccgcatgccgttcgtcggaggcgccggcaggctggtcccgggctagcgcatgagccggggtggaggtcggcgttggtgcgccggcaggcctgcgcagtcggccggaattgcggtggcgggacctcctctcgtctggggcagcatcagctagtggatcgggctagcgcagggtggtggtggtggcgacaggcccaaaatcttcatcatttgtgtggtacgtcggggtaccggcgacggcggaggcagcttgctgtgtctcgaggtttcggccagacgttgtgctgggggctcttgggcgaaagtctcggcgacggtgacgcccatgggcgtcgcttcccctgttgagggtgtcgcatccccagcgctatcttccttgggtgaaagcccggtccatcgcggacaggtgacggtggcgtcacagtgacgtcactcccttcctgaaggcgtcgcttctgaagttcgtctcggccaggactttgccttcggctgttgcttcgcttctcggtgcctggtatgcgagtggaggtgggggttttgcaacgtgaagtcggagctgctacatcagtggatgtggctcggcaacgataacacgaggcgaacctcccttcttcgtggtccagaatgtttcggaggtcgggcaaaaaccggaggcagggcggagggttaagattggaagtcggagctgctctgtgcctgagcccagcaacgatgacttgttgagacctttcgtttcgggctgtctgtctgctttttgtttggttcgcctgttagctgcttcgggaagttggagttgttggatgctctgcatccttgcttgataacgatgacctttagcagttttgtgtgctctcgtgtggggttgtcgctgcctgtgttgtttgggcactctgtgtcggcggtgagtgtggtgtcgtgttgatgtcccaatccaaccgatgagttgagttgtatggtgtaggcatgttgatgtctcaatccaaccgcatgttgtttgttgtttagtccggtccggaccacttcttcttaattaatataatcggcagctctcccgcctggttcgtttcaaaaaaaaaaaaaattgtttgaccgtgcttgttagtaagcttgactgtatatgtgtcagacatgtttcatattgagcatcctaattatgctatcttacacagggtacttcaaggccaacccattaccatgtgttgcttgatgagattggcttctctgcagataatctccagaagctagttctttcactttcatatgtgtaagcacatactttcatgtctatttcctctatttccttaactcatgtgaaaataacatgtttgtgctttgtataggtaccagaggagcaccactgcgatttctgtgggtacgttgatgttttcttttgtgctaaaaaaaccatcacgcactctttgctgaatgctgttttttgctttttcagtggcacctatctgttatgcccacctcgcagcagctcagatgggccagttcatgaaatttgaagagtttgcagatacgtcgtcagggagtgtcaattcatcatcgccaccatcaataccagaattgccacggctgcatgctgatgtctgcagttccatgttcttctgttgacgtgattttagtttgaccgttgtggggtagggccaattctttgtgaaaggaaccttaccttatatgttggcacacagcaggctaaccgtttttgtgaagaaaccatgtaggtcgttagttgtcgtatatcgcacgcgtgcatctttttggagcggttttcggctccccccacccacaggtggcggttccgttaggtacagtttccagattttaacgatgctaatacagtaaaagcagtttgtacattctacgcagattttgcagggatacgtggttagatgatctttttgttatgcccagaaatacgtgtgcattggggggttatgaaagtgagctaaatttctgtgcctcgcatggcatccaattgtactcggagattgtgtttgtgctcgatacgcttcctgccactgaaatgcg

SEQ ID NO: 672 - DNA, 11016 bp, Zea mays
  source 1..11016: mol_type = genomic DNA
gtggcccttgcagggaagttttgttcccggttgattgagaagaaggaaagctcactcggtccgagggaccgtttgagagagggaagggttgaaagagacccggcctttgtggcctcctcaacggggagtaggtttgcaagaaccgaacctcggtaaaacaaatccacgtgtcactctccttatttgcttgcgatttgttttgcgccctctcttgcggactcatttattattactaacgctaaccccggcttgtagttgtgattatttttgtaaatttcagtttcgccctattcaccccccctctaggcgactatcagttggccgtcaccaggtcgccgaggtacaccaccaagtctgagcgaagatgcgtggatcgaattccgccgccgcagagaccatgaggcagagagggagttccgtttcagttctttgattctttcggaggaaaagggaaagggtaaggggagcaaaaggagagcgtgcgcatgcacgcacctgggttctcgacgtcgaggacggcggccatgacgcggtcggacgcggcgtcctgcgcggggccccagtccgtccacgcgtcctcgccataatgcaggtccgcaaacagggccactttgaacactcctcctggcccgaaccacagcggcggcagcgagcagggcgggcgcgaggctgcgccaccacttgcacaatgcggatttgctcgacggcttgggcggtgtggtcctgggagcatcgggcttggcgcgttcttgtctggtgaagccccgcgttcggagtcggagggaggtgggcgacattcacggcgggactcgcttggttgacgggatctacgcgctggtggtaggagatcccttgatggcggcacggatggcgtggggcggaggcgttcgtcgcggagccgggatctacgcgctgggggaggatcgcggaggagagggggggcgcgggcagacagctgtagacgcgctgggggaggatcgcggaggagagggggcgcgcgggcagacagctgtagagaggcagaacacggcgggtgtgcacgcctacaataagaaagtaaagattggagttattttcacaaagctgattctcataaagacataaacggctaaagctgtctcatggtcataatccgactgaaaacgaaacaaacaggcccaactacccacacagtttgggccaccctacagctggttcatgtgacagacagggctggaggtagaggggccaacatccgaaagcctgcggcgctcgcgggagacgaacaaaaattcgaatccgggctctcccgctggccgctgcagcctgcagaaggctccgcgccgtaaaaaattggacgttcccgctccctccatctttttggttcgggtttcgttttcccactgccgctcccgcctcctctctgccctgtttccacatttgaccgatcctcttcgattcgatttctacacccccagagcttgccaaacccctcgtctcccaaccctagagagcagcagcagcagcagcagctaccgcatcccttgccatggcgccaagctccccgtcatccgctaggcccacgcgcgcctccggccggaagcgctccgccatggccgaggagatccaccagaaccaggaggaggaggaggaggttgtggctgcgtccaccgccaagcgcagacgcaaggcggcgtcttccgggaagaagcccaagccgacgcccaagcaggccaaaccggccgtggcggggatgaagaagaagggggagaccgagaagacggagcccgttgtggacgacgtgtgcgccgaggagcccgacgaggaggagttggccatgggcgaggaggaggcggaggccgaggagcaggccatgcaggaggtggtggccgcggtcgcggccgggtcgcccggtaagaagagggtggggagaaggagcgccgccgcctcgggcgaccacgtgcccgagttcatcggcagccccgttgctgcggccgaggcgcacagcaactggcccaagcgctacgagcgcagcactgccgcaaataagtatattgtccctcccttcttaccctggtttagtatgactatgactggatttttgctccctgttcgttgcttgagagctgagcaatttgctatttgttaatctattgcgcatgcagaccggaggaggacgatgagctcaaggccaggtgccactaccggagcgctaaggtggacaacattgtctactgcctcggggatgacgtttatgtcaaggttttgcccatcgtcttcattgcctttatttgtcatgctgctgctgctgctctcatttacgcactgctcatgtatttgttaaggaagcatcacttaattgttttttgttgtccatttgcaatctgttgtgcgtgtggtcagcgcccagcgttacatggtcagcggcgggcctaggatttgaagtatgagtattcaaatttttggtagaacatattttttgacaatttaaaattacactattgtactgtatgatcggttgaacggtacataaatgaagagggctagtgaaaaccaaagtttagacaaaatagctgtaaaacagtatgattttatgtttttttataatattttagcttatatacataacatatacatgtatatataattgttttgccaaaaataatgagtattcaattgaatacccttgcttgcatgtaggcccaccactatacatggtggtactttcgacgcaccgtttttttggtaatttttccgaaaaaagttcggtaaacgtgaattttggtccttttacaaatctatggcgccgagcaaagagttcataaatatcaagctttgccaaaaagctttgctaaatacaatttgggaacaaaaacaactttagcctctaatagtttccaattcttaggttgttaaatatttttaaattatgctaacttaatggtaagttcaacattttcaccgtttaaatcgcttgtgtgccattggaatactcacatgtgttaagtatttgtgactagagggagtataatataaaggggtgccagccattgatcacatccattatgatctctgagagcatttgaaaattttcttgtcttatttgcctgtttatgaagttaaagtgttgtttgtgtcttaaattttagtttgatgaaaattcttagtaattcagctgaacacaaacattgatgatgcaatgcaatgatttcaagtcgtccgactaatcgcgattaatcgcgattagtcgggctggtcggtaattagtacacgatttgctggacgactcgaccagataacctagtcgtcctggtcgtccgactaatcgtcgactagggtgactagtcgtccgacttatgtgtcctggtcgtcccggctagggtttagttattaggccttttttagcccatctacagtcactgcacgtctcctctcctctcctattataacctacccgccaacagtctctggctctctacacgtctcctctcctctcttgcaccgcccctgcagtcctggactttgattgctgacggctacagcaccctgcgtccctgccctttctcctggagtcctgcagcctgctgcactactgcagtctctaatttatataatgtatacatgtatatttatatatatacctatatacgtatagctactagtgtaggacgaccagggaccgactaggaccgactaggagtcgactagtcgccctagtcgtcgcctaatcgcgactagtcacctggtcggtcctagggttcgaccagacgactaggcgacttgaaatcattgatgcaatgaacaagtatggtcgaagtaatggttgtgtgcaattcttctggattgttttgctctcacattacaacattttatatgttctttaataatagttattgaccttaagtttctggttcctttttgcttatcttaggctggagaaaatgaggctgattacattggtcgcattactgaattttttgagggcactgatcgatgccactattttacttgccgttggtttttccgtgcagaggacacggtgtgtattgagcttaatgtcatttctatttatatcaagaattagcatagaactgaaccttaacagtgcaggtcatcaattcgttggtgtcgattaatgttgatggccacaagcatgaccctagacgtgtttttctttccgaggaaaagaatgacaatgtgcttgattgcatcatctccaaggtcaagatagtccatgttgatccaaatgtaagttccctgctaagagctttgcggttttgctatacacataatatttctcactacaattgtttctttgctttagatggatccaaaagctaaggcccaactgatagaacattgtgacctatactatgacatgtcttactctgttgcatattctacatttgctaatatctcatcaggtaattgcttctacatcattcttttttggttgactagctgcatggttattaaaacgacgaaacgttgaaacactcatggatggacttttaacttttaaactatttaaacaaagtttaaacgtagttataaacaacatagggaaatttcaatatatcataatttcaggggaaatttggatccataccattaaaagatcaccactttagattcataccattactatctcacttacatgtgggtccacatgagtcaatgacatgtggggtccatgatatatatctaaagtttggatcttttaatggtatagatccaattgttcctaatttcagacaattatataaagtcaaataccaaacaagcaacataagttcacataataatattgtgtaaaatgacatgtccacaaccacattaccacaataacacaagttcaactaatagcaagtcgacaaccgtaaacaaagtggaatgggatgtctaatagtccaccatcaaaaacatagcacaaaatcaactaaagtagaatgcaatgtccacaaccacaagcacacaagtgttactcaagcactcaataaccatcatccaaatcatctaaaccaatatcatccttgtcttgctcatcaccacgggcaccactgttgtttgtttcttcttcatcatccatatcaaggtcgtcaagcacaaaattgtaacctgggcggaatctctaattgggctgggccaaaatttacaagcaggcaacttaaacgttcgaaacgtggcgtttaactatatatcgcgtttaaacgtcaaaacatgacgtttaaacgtcgttaaacaacgttttacgaggaagtgtgaaacgtttcagcgtttcagcgtttcgctgttctattagcgttttatagtttaaacgacgtttaaacgttgttttaataaccatgactagctgaatacaatttactggctttgctaaattagtggaatgacactactaaccaaatgatctcccactctaatgccttttacaatatttctatgttatgctagaaaaaaaattaacttttatgtttccaattagatttacactgaaaatcagagtttttaaggcattaagctgactggccccctttttactttttaatctttatggtgtaagatgatgtgactcttgtgtagtatatagaaataggaaatacaatagtaaataggatcatagtctcaaataaatactctctcttcgcttgagtttgtcattctaggtttatcataagttaaattgtttgaactttaaccaataatgaatatatgattaagttattttaatctaaaagaattatatattatgataattcaatttatgataaatctaataattttattttttgttgtaaaattttataaaacatcttatataaccggtcaaagttgatagtgatggacttaatacaaaactaaaataacaaactcatatgtatggagtagacagtaataatagtactatataagcaataggagtacaagttaacctaaactaacatattagctataaagtctacaaagaggataattcacattcactttaccatttaaaaagcaaaatagagtgctgaaccggtattgctctgactcaacatagggtgggagcagagagagcagcacctcctgggtctaggccgctctcgcagagagagcagagagggcgaggggagctggccgatgttggacggtgatggatggcgggggcagggtggaggggagctcgcggaggcagggccactgactgctgcaggagagagggaagaggcaggggcgcagggcggctaacatcgctgccgcctagaggcagtgaagaggtaggggatctcgcgggaggcagggccgctgctgccacctggagatcccgaatcccgaccgccgccgcctggagctcccaaccgctgacgcctggagtgtttcgcgtcgtaaggctctatgtaccccgcggccctacttagggtgtttggttcttttagagcatgtaatccctttgccattcaattttgatctctcaaatctcctccattatcactgctcccaaaaaatccttagagcgtgtttgatttttagtcacccttttaaactttagtgattaaaccttattctctaaaaaattatttggaagacatttttgtcactccgtttagtattttagtgaataaaaataactaaactttagccattgaaattgaagtttaggaggtgggagacaaacacttccttagttcctaaactttaggactaaactttgtccttagaaattatatttggaagacctattttaatcaatctctttggtattttagttttaaaagatgggaaccaaacacccccttaatcctgcgtaccctaacatcaatcttttaccccaaaccctacaaaggctaagatcttcgcaaatcgaagcgccaaggtgacatatcaaaccctaaggcggatgcctttcgagttgctgcaagtttactatgacgccctagctgtcgaactcgcctttccacttaagctctatctaagtgatgcttaattgttgcctcgagttgttctttttaggagagtacataatcatgttttagtatcattgaaggataactgaactgtctaccttagacatctctattttaaagtttgtttttggctaccggccaaatgccaaaaactgaaataaattcaacttttaaaattagcttatgaagaagccaaaagcaggtctagagatgtttttcctgtcttttttttgtatatgagatagcaacgtgtatgtacccatatggtagtactgtttcatattcacagtactagataaaattctatttgccatgtctgcataacatgtacccaaatgtatacttgttatagacaaaatcctaaatacatcatgcaattaaaatctaatagtgtaagtttctgtaaacaaaaggacaattgttaaatgtgtatgttttttttgcaaaacctcacaattgtttttctactagaaaatgggcagtcaggcagtgaaaccgcttcgggtatttcttctgatgatgcgggtttggagacgtcatctaatatgccagagaggacagcaacccttcttgacttgtattcgggctgtgggggcatgtccactggtctttgcttgggtgctgctctttctggcctgaaacttgaaactgtaatattctacctagttatctgttggatagaacatgttcttacttaccactgattctactgttatggctatgattgcagcgatgggctgttgatcttaacagttttgcgtgccaaagtttaaaatacaatcatccacagactgaggtatgcatattaagctgcatcttggattccatctgttctgtccagctgctctcaaaaagtttctttggacctttgaatgtaggtgcgaaatgagaaagctgatgagtttcttgctctccttaaggaatgggcagtcttatgtgaaaaatatgttcatcaagacgtggattcgaatttagcaggttcagaggatcaagaggatgctgacactcttgacaaggatgaatttgttgtacagaagcttattggaatacgctatgatggcactggaaggaaaaaaggcgtatattttaaggtattcaagcattatctgttcatttatacttgattccaagaaaaagttcaattactatgatgatataggaaaaagtttttgaacaatggacatttctttgcattttggtgtaatgctaaatttctgcaggtccaatgggaaggatatggtcctgaagaggatacatgggaacctattgataacctgaggttagtattttggtagtgtcatctgcttgttgccttgtatgtctatttgtactctaatccttgtttcacgaaccagtgactgtccgctgaaaattagagaatttgtacaagaagggcgcaaaagaaaaattctcccgcttcctgtgagtatttagttgggtgtggttttcctctctgtttagctccccatttttatttggtgacatctacctaatctattctttcaaaagggtgatgttgatgtcatttgtggaggcccaccatgtcaaggtataagtgggtttaatcggttcaggaaccgtgatgagccacttaaagatgagaaaaacaagcaaatggtgactttcatggatattgtggcatacttgaagcccaagtatgttctcatggaaaatgtcgtggacatactgaaatttgctgatggctacctaggaaaatatgctttgagctgcctagttgctatgaagtaccaagcacgccttggaatgatggtggcaggctgctatggtctgccacagttcaggatgcgtgtgttcctctggggtgctctttcttccatggtcagttttgtaccttgctgttttatatgctttgctagatttatattgcattgtcgactggtggctaatcaggtgtagttgacaatgtaggtgctccctaagtatcctctgcctacatatgacgttgtagtacgtggaggagcacctaatgccttttcggtaagtgcaatcactacatcgaaatcctttggaatgtgtaaaatttgttgaccaactgaatttgtttgcagcaatgtatggttgcatatgatgagacacaaaggccatccctgaagaaagctttgcttcttggtgatgcattttcagatttaccaaaggcaagtgttttgtcaagttcaagtatttctcaatgtgcatgcagtcttacacttactcctctctgcaggtcgaaaaccatcaacctaacgatgtaatggagtatggtggttcccccaagacagagttccagcgctacattcgacttggtcgtaaaggtaaaaggcccattgaactttactggttgacctcttctaattttagaagaacaatcttttttcttggtgcttttctgcagctacatatgaagtttactctatttttattctttcagacatgttggattggtcgtttggtgaggaggctggtccagatgaaggcaagctcttggatcaccagcccttacggcttaacaatgatgattatgagcgggttaagcaaattcctgtcaagaaggttggtggcttgatagtgttattgtgccttcctttgttgtttgtcctgaaacaatcttcactctttcctatgacagggagccaacttccgtgacctaaagggtgtcaaggttggagcaaataatgttgttgagtgggatccagaagtcgaacgtgtgtacctttcgtctgggaaaccactggtatgtgctgttcattgctgttgtttccacaacaatgcaacatttatgctacatgttcaaacttaaaacagatgagatggtgcaagtactgtgagattcatggttaagacatgctaagttattgcacaaatctttgtcatctaggttcctgactatgcgatgtcattcatcaagggcaaatcactcaagtaagtggcaaaatggtcctgctttctttattttttttgggggaaaaactaggctattggttacttatccttgtatatatgatgttgtaggccattcgggcgcctgtggtgggacgagacggttcctacagttgtgaccagagcagagcctcataaccaggtcagcttcagcacaaactactcttatcctactccctgcggctgtctttactgcttgtgtagtctgtatacgaccctgattgaacgtgtccgtaggttatattgcatccgactcaagcaagagtcttgactatccgggagaacgcaaggttacagggcttccccgattactaccgattgtttggaccgatcaaggagaagtaagttccatcttttcagtttgcttgtacttgatctattaactcttggcagttgtcagctgttaaggattgatcagtcaattacagctcttgaaatcagaagcagttactgacataaactgcacggcgatgtgttactaacatgtgggcctagggccctaggtgctttagacccatagggatcatgctgcattgcaatccttctgaacaatgtgtgctttctcatggctataggtatattcaagtcgggaacgcagtggcagtccctgttgcacgggcactgggctactgtctgggtcaagcctacctgggtgaatctgacgggagtcagcctctgtaccagctgcctgcaagttttacctctgtggggcgaaccgcggttcaggcgaatgccgtttctgttggcactcctgcgggggaggtagtcgagcagtaaaaggatagcggagcaaccctggttggtattttgattcgagcccatccagtagcatgtttaccaataaataatcattggtcgtgctgattcttatggttggagatgaatgtatgtagggtgtactcgagctcgagtgcttgttgtactgtaggttgaggtttctcatccattggcctgcctatttgtggatgacgtttcatttcagattagcaatgtgcttatttaaggtttcgtcatgtacctgtattctacaatccactattgtttccaaagacagcatttgatccttgttcaacgcgagcagattttcgtccaccaaagctgtgtagggatcgaaatgtcaacaatgaattgagtcattcaatcatttgtctaa

SEQ ID NO: 673 - DNA, 10866 bp, Zea mays
  source 1..10866: mol_type = genomic DNA
gtggcccttgcagggaagttttgttcccggttgattgagaagaaggaaagctcactcggtccgagggaccgtttgagagagggaagggttgaaagagacccggcctttgtggcctcctcaacggggagtaggtttgcaagaaccgaacctcggtaaaacaaatccacgtgtcactctccttatttgcttgcgatttgttttgcgccctctcttgcggactcatttattattactaacgctaaccccggcttgtagttgtgattatttttgtaaatttcagtttcgccctattcaccccccctctaggcgactatcagttggccgtcaccaggtcgccgaggtacaccaccaagtctgagcgaagatgcgtggatcgaattccgccgccgcagagaccatgaggcagagagggagttccgtttcagttctttgattctttcggaggaaaagggaaagggtaaggggagcaaaaggagagcgtgcgcatgcacgcacctgggttctcgacgtcgaggacggcggccatgacgcggtcggacgcggcgtcctgcgcggggccccagtccgtccacgcgtcctcgccataatgcaggtccgcaaacagggccactttgaacactcctcctggcccgaaccacagcggcggcagcgagcagggcgggcgcgaggctgcgccaccacttgcacaatgcggatttgctcgacggcttgggcggtgtggtcctgggagcatcgggcttggcgcgttcttgtctggtgaagccccgcgttcggagtcggagggaggtgggcgacattcacggcgggactcgcttggttgacgggatctacgcgctggtggtaggagatcccttgatggcggcacggatggcgtggggcggaggcgttcgtcgcggagccgggatctacgcgctgggggaggatcgcggaggagagggggggcgcgggcagacagctgtagacgcgctgggggaggatcgcggaggagagggggcgcgcgggcagacagctgtagagaggcagaacacggcgggtgtgcacgcctacaataagaaagtaaagattggagttattttcacaaagctgattctcataaagacataaacggctaaagctgtctcatggtcataatccgactgaaaacgaaacaaacaggcccaactacccacacagtttgggccaccctacagctggttcatgtgacagacagggctggaggtagaggggccaacatccgaaagcctgcggcgctcgcgggagacgaacaaaaattcgaatccgggctctcccgctggccgctgcagcctgcagaaggctccgcgccgtaaaaaattggacgttcccgctccctccatctttttggttcgggtttcgttttcccactgccgctcccgcctcctctctgccctgtttccacatttgaccgatcctcttcgattcgatttctacacccccagagcttgccaaacccctcgtctcccaaccctagagagcagcagcagcagcagcagctaccgcatcccttgccatggcgccaagctccccgtcatccgctaggcccacgcgcgcctccggccggaagcgctccgccatggccgaggagatccaccagaaccaggaggaggaggaggaggttgtggctgcgtccaccgccaagcgcagacgcaaggcggcgtcttccgggaagaagcccaagccgacgcccaagcaggccaaaccggccgtggcggggatgaagaagaagggggagaccgagaagacggagcccgttgtggacgacgtgtgcgccgaggagcccgacgaggaggagttggccatgggcgaggaggaggcggaggccgaggagcaggccatgcaggaggtggtggccgcggtcgcggccgggtcgcccggtaagaagagggtggggagaaggagcgccgccgcctcgggcgaccacgtgcccgagttcatcggcagccccgttgctgcggccgaggcgcacagcaactggcccaagcgctacgagcgcagcactgccgcaaataagtatattgtccctcccttcttaccctggtttagtatgactatgactggatttttgctccctgttcgttgcttgagagctgagcaatttgctatttgttaatctattgcgcatgcagaccggaggaggacgatgagctcaaggccaggtgccactaccggagcgctaaggtggacaacattgtctactgcctcggggatgacgtttatgtcaaggttttgcccatcgtcttcattgcctttatttgtcatgctgctgctgctgctctcatttacgcactgctcatgtatttgttaaggaagcatcacttaattgttttttgttgtccatttgcaatctgttgtgcgtgtggtcagcgcccagcgttacatggtcagcggcgggcctaggatttgaagtatgagtattcaaatttttggtagaacatattttttgacaatttaaaattacactattgtactgtatgatcggttgaacggtacataaatgaagagggctagtgaaaaccaaagtttagacaaaatagctgtaaaacagtatgattttatgtttttttataatattttagcttatatacataacatatacatgtatatataattgttttgccaaaaataatgagtattcaattgaatacccttgcttgcatgtaggcccaccactatacatggtggtactttcgacgcaccgtttttttggtaatttttccgaaaaaagttcggtaaacgtgaattttggtccttttacaaatctatggcgccgagcaaagagttcataaatatcaagctttgccaaaaagctttgctaaatacaatttgggaacaaaaacaactttagcctctaatagtttccaattcttaggttgttaaatatttttaaattatgctaacttaatggtaagttcaacattttcaccgtttaaatcgcttgtgtgccattggaatactcacatgtgttaagtatttgtgactagagggagtataatataaaggggtgccagccattgatcacatccattatgatctctgagagcatttgaaaattttcttgtcttatttgcctgtttatgaagttaaagtgttgtttgtgtcttaaattttagtttgatgaaaattcttagtaattcagctgaacacaaacattgatgatgcaatgcaatgatttcaagtcgtccgactaatcgcgattaatcgcgattagtcgggctggtcggtaattagtacacgatttgctggacgactcgaccagataacctagtcgtcctggtcgtccgactaatcgtcgactagggtgactagtcgtccgacttatgtgtcctggtcgtcccggctagggtttagttattaggccttttttagcccatctacagtcactgcacgtctcctctcctctcctattataacctacccgccaacagtctctggctctctacacgtctcctctcctctcttgcaccgcccctgcagtcctggactttgattgctgacggctacagcaccctgcgtccctgccctttctcctggagtcctgcagcctgctgcactactgcagtctctaatttatataatgtatacatgtatatttatatatatacctatatacgtatagctactagtgtaggacgaccagggaccgactaggaccgactaggagtcgactagtcgccctagtcgtcgcctaatcgcgactagtcacctggtcggtcctagggttcgaccagacgactaggcgacttgaaatcattgatgcaatgaacaagtatggtcgaagtaatggttgtgtgcaattcttctggattgttttgctctcacattacaacattttatatgttctttaataatagttattgaccttaagtttctggttcctttttgcttatcttaggctggagaaaatgaggctgattacattggtcgcattactgaattttttgagggcactgatcgatgccactattttacttgccgttggtttttccgtgcagaggacacggtgtgtattgagcttaatgtcatttctatttatatcaagaattagcatagaactgaaccttaacagtgcaggtcatcaattcgttggtgtcgattaatgttgatggccacaagcatgaccctagacgtgtttttctttccgaggaaaagaatgacaatgtgcttgattgcatcatctccaaggtcaagatagtccatgttgatccaaatgtaagttccctgctaagagctttgcggttttgctatacacataatatttctcactacaattgtttctttgctttagatggatccaaaagctaaggcccaactgatagaacattgtgacctatactatgacatgtcttactctgttgcatattctacatttgctaatatctcatcaggtaattgcttctacatcattcttttttggttgactagctgcatggttattaaaacgacgaaacgttgaaacactcatggatggacttttaacttttaaactatttaaacaaagtttaaacgtagttataaacaacatagggaaatttcaatatatcataatttcaggggaaatttggatccataccattaaaagatcaccactttagattcataccattactatctcacttacatgtgggtccacatgagtcaatgacatgtggggtccatgatatatatctaaagtttggatcttttaatggtatagatccaattgttcctaatttcagacaattatataaagtcaaataccaaacaagcaacataagttcacataataatattgtgtaaaatgacatgtccacaaccacattaccacaataacacaagttcaactaatagcaagtcgacaaccgtaaacaaagtggaatgggatgtctaatagtccaccatcaaaaacatagcacaaaatcaactaaagtagaatgcaatgtccacaaccacaagcacacaagtgttactcaagcactcaataaccatcatccaaatcatctaaaccaatatcatccttgtcttgctcatcaccacgggcaccactgttgtttgtttcttcttcatcatccatatcaaggtcgtcaagcacaaaattgtaacctgggcggaatctctaattgggctgggccaaaatttacaagcaggcaacttaaacgttcgaaacgtggcgtttaactatatatcgcgtttaaacgtcaaaacatgacgtttaaacgtcgttaaacaacgttttacgaggaagtgtgaaacgtttcagcgtttcagcgtttcgctgttctattagcgttttatagtttaaacgacgtttaaacgttgttttaataaccatgactagctgaatacaatttactggctttgctaaattagtggaatgacactactaaccaaatgatctcccactctaatgccttttacaatatttctatgttatgctagaaaaaaaattaacttttatgtttccaattagatttacactgaaaatcagagtttttaaggcattaagctgactggccccctttttactttttaatctttatggtgtaagatgatgtgactcttgtgtagtatatagaaataggaaatacaatagtaaataggatcatagtctcaaataaatactctctcttcgcttgagtttgtcattctaggtttatcataagttaaattgtttgaactttaaccaataatgaatatatgattaagttattttaatctaaaagaattatatattatgataattcaatttatgataaatctaataattttattttttgttgtaaaattttataaaacatcttatataaccggtcaaagttgatagtgatggacttaatacaaaactaaaataacaaactcatatgtatggagtagacagtaataatagtactatataagcaataggagtacaagttaacctaaactaacatattagctataaagtctacaaagaggataattcacattcactttaccatttaaaaagcaaaatagagtgctgaaccggtattgctctgactcaacatagggtgggagcagagagagcagcacctcctgggtctaggccgctctcgcagagagagcagagagggcgaggggagctggccgatgttggacggtgatggatggcgggggcagggtggaggggagctcgcggaggcagggccactgactgctgcaggagagagggaagaggcaggggcgcagggcggctaacatcgctgccgcctagaggcagtgaagaggtaggggatctcgcgggaggcagggccgctgctgccacctggagatcccgaatcccgaccgccgccgcctggagctcccaaccgctgacgcctggagtgtttcgcgtcgtaaggctctatgtaccccgcggccctacttagggtgtttggttcttttagagcatgtaatccctttgccattcaattttgatctctcaaatctcctccattatcactgctcccaaaaaatccttagagcgtgtttgatttttagtcacccttttaaactttagtgattaaaccttattctctaaaaaattatttggaagacatttttgtcactccgtttagtattttagtgaataaaaataactaaactttagccattgaaattgaagtttaggaggtgggagacaaacacttccttagttcctaaactttaggactaaactttgtccttagaaattatatttggaagacctattttaatcaatctctttggtattttagttttaaaagatgggaaccaaacacccccttaatcctgcgtaccctaacatcaatcttttaccccaaaccctacaaaggctaagatcttcgcaaatcgaagcgccaaggtgacatatcaaaccctaaggcggatgcctttcgagttgctgcaagtttactatgacgccctagctgtcgaactcgcctttccacttaagctctatctaagtgatgcttaattgttgcctcgagttgttctttttaggagagtacataatcatgttttagtatcattgaaggataactgaactgtctaccttagacatctctattttaaagtttgtttttggctaccggccaaatgccaaaaactgaaataaattcaacttttaaaattagcttatgaagaagccaaaagcaggtctagagatgtttttcctgtcttttttttgtatatgagatagcaacgtgtatgtacccatatggtagtactgtttcatattcacagtactagataaaattctatttgccatgtctgcataacatgtacccaaatgtatacttgttatagacaaaatcctaaatacatcatgcaattaaaatctaatagtgtaagtttctgtaaacaaaaggacaattgttaaatgtgtatgttttttttgcaaaacctcacaattgtttttctactagaaaatgggcagtcaggcagtgaaaccgcttcgggtatttcttctgatgatgcgggtttggagacgtcatctaatatgccagagaggacagcaacccttcttgacttgtattcgggctgtgggggcatgtccactggtctttgcttgggtgctgctctttctggcctgaaacttgaaactgtaatattctacctagttatctgttggatagaacatgttcttacttaccactgattctactgttatggctatgattgcagcgatgggctgttgatcttaacagttttgcgtgccaaagtttaaaatacaatcatccacagactgaggtatgcatattaagctgcatcttggattccatctgttctgtccagctgctctcaaaaagtttctttggacctttgaatgtaggtgcgaaatgagaaagctgatgagtttcttgctctccttaaggaatgggcagtcttatgtgaaaaatatgttcatcaagacgtggattcgaatttagcaggttcagaggatcaagaggatgctgacactcttgacaaggatgaatttgttgtacagaagcttattggaatacgctatgatggcactggaaggaaaaaaggcgtatattttaaggtattcaagcattatctgttcatttatacttgattccaagaaaaagttcaattactatgatgatataggaaaaagtttttgaacaatggacatttctttgcattttggtgtaatgctaaatttctgcaggtccaatgggaaggatatggtcctgaagaggatacatgggaacctattgataacctgaggttagtattttggtagtgtcatctgcttgttgccttgtatgtctatttgtactctaatccttgtttcacgaaccagtgactgtccgctgaaaattagagaatttgtacaagaagggcgcaaaagaaaaattctcccgcttcctgtgagtatttagttgggtgtggttttcctctctgtttagctccccatttttatttggtgacatctacctaatctattctttcaaaagggtgatgttgatgtcatttgtggaggcccaccatgtcaaggtataagtgggtttaatcggttcaggaaccgtgatgagccacttaaagatgagaaaaacaagcaaatggtgactttcatggatattgtggcatacttgaagcccaagtatgttctcatggaaaatgtcgtggacatactgaaatttgctgatggctacctaggaaaatatgctttgagctgcctagttgctatgaagtaccaagcacgccttggaatgatggtggcaggctgctatggtctgccacagttcaggatgcgtgtgttcctctggggtgctctttcttccatggtcagttttgtaccttgctgttttatatgctttgctagatttatattgcattgtcgactggtggctaatcaggtgtagttgacaatgtaggtgctccctaagtatcctctgcctacatatgacgttgtagtacgtggaggagcacctaatgccttttcggtaagtgcaatcactacatcgaaatcctttggaatgtgtaaaatttgttgaccaactgaatttgtttgcagcaatgtatggttgcatatgatgagacacaaaggccatccctgaagaaagctttgcttcttggtgatgcattttcagatttaccaaaggcaagtgttttgtcaagttcaagtatttctcaatgtgcatgcagtcttacacttactcctctctgcaggtcgaaaaccatcaacctaacgatgtaatggagtatggtggttcccccaagacagagttccagcgctacattcgacttggtcgtaaaggtaaaaggcccattgaactttactggttgacctcttctaattttagaagaacaatcttttttcttggtgcttttctgcagctacatatgaagtttactctatttttattctttcagacatgttggattggtcgtttggtgaggaggctggtccagatgaaggcaagctcttggatcaccagcccttacggcttaacaatgatgattatgagcgggttaagcaaattcctgtcaagaaggttggtggcttgatagtgttattgtgccttcctttgttgtttgtcctgaaacaatcttcactctttcctatgacagggagccaacttccgtgacctaaagggtgtcaaggttggagcaaataatgttgttgagtgggatccagaagtcgaacgtgtgtacctttcgtctgggaaaccactggtatgtgctgttcattgctgttgtttccacaacaatgcaacatttatgctacatgttcaaacttaaaacagatgagatggtgcaagtactgtgagattcatggttaagacatgctaagttattgcacaaatctttgtcatctaggttcctgactatgcgatgtcattcatcaagggcaaatcactcaagtaagtggcaaaatggtcctgctttctttattttttttgggggaaaaactaggctattggttacttatccttgtatatatgatgttgtaggccattcgggcgcctgtggtgggacgagacggttcctacagttgtgaccagagcagagcctcataaccaggtcagcttcagcacaaactactcttatcctactccctgcggctgtctttactgcttgtgtagtctgtatacgaccctgattgaacgtgtccgtaggttatattgcatccgactcaagcaagagtcttgactatccgggagaacgcaaggttacagggcttccccgattactaccgattgtttggaccgatcaaggagaagtaagttccatcttttcagtttgcttgtacttgatctattaactcttggcagttgtcagctgttaaggattgatcagtcaattacagctcttgaaatcagaagcagttactgacataaactgcacggcgatgtgttactaacatgtgggcctagggccctaggtgctttagacccatagggatcatgctgcattgcaatccttctgaacaatgtgtgctttctcatggctataggtatattcaagtcgggaacgcagtggcagtccctgttgcacgggcactgggctactgtctgggtcaagcctacctgggtgaatctgacgggagtcagcctctgtaccagctgcctgcaagttttacctctgtggggcgaaccgcggttcaggcgaatgccgtttctgttggcactcctgcgggggaggtagtcgagcagtaaaaggatagcggagcaaccctggttggtattttgattcgagcccatccagtagcatgtttaccaataaataatcattggtcgtgctgattcttatggttggagatgaatgtatgtagggtgtactcgagctcgagtgcttgttgtactgtaggttgaggtttctcatccattggcctgcctatttgtggatgacgtttcatttcagattagcaatgtgcttatttaa

SEQ ID NO: 674 - DNA, 9255 bp, Zea mays
  source 1..9255: mol_type = genomic DNA
gtgcaccggactgttcggtggtgcaccagacagtgtccggtgcgccaggctggctctggtggaaaggccgtcctcgggaatcgtcggcggcgtacggctaaaattcaccggactgtccggtgtacaccggactgtccggtgagccaaccgtcgaccgcgcaatccgcgcgtgacgcgtgaccaagccaacagtcagaagggggcaccggactgtccggtgtgcaccggacaggggacaatttgtttttcaaaacaaactagtgtatgctcctactctgttagctgtacttaacattgttaagtgttgataaaaatacaagagataattgcgccaatgcccctgttttagcgcaattgtattttactatatttttagacttacatgttttatgacaattcaaattaatcccacaacgtttcaaattattttaacaacaattcaaactatttgcaacaatttaaattatttttaaagatttaaaaatattgacaaattattccatcaacattttaaattattttgcctcatcacactaatttaattagttagatattttttaactttgaaaataataatttgaattgtcataaaagcggacaaagtctaaaaaaagcggtaaaactatagttacacaacaaaacagtgacaatggcgcaattgtttcttgtcttctttatcatgacttaacactgttaagtataaccaacggagtatgggcatacatcgttttattttgaaaaacaggggcaaacgcgcaaagttttaaaaagggggtaattctacagttacaccctaaaacagggacaccatcacaattgttccttgtttttttagtaaagttttgttcatgtcacagctgatgtatgaatatcaattgtaagtactaaacatagtataattacaaaactaattacacaaacaaagactaaattgtaagacgaacctgttaagtctaattaattcatgattaacaaatgtttactgtaatatcatgttaccgaatcataaactaatcagatttaatatgttttccttattatgtgtgtaattagttttataattatattatatttaatatttgaaatgtgacaatactaaagctaagcctcttaagcccaacaatccacatattttagatttaaaatttgaaaacagacgtatcggctagaagagccctgtcactgtcagctaatcaattacaagaagtggcccatactagttccatcaccagtccagtagtccaccaccccaccctacagctgggtcatctggcacgggtggaggggccaacggccgaaagcgccgcgcacttccggcgggcaccctcgcggagtcgcgggtgacagcgaaatttcaaatccataccctcccgctgcagacgggtcccacgccgtcaaaatttggacgctcccgctccctcgatcttttgggtttcgttttcccagttcccaccctctcttccaccctgccctgtttccagatttgaccgatccccttcgattcgatttctacacctccagagcactcactctcctggcaaaccccttcgtctcccaaccctagagagcagcagcagctaccgcagcccctgccatggcgccgagctccccgtcacccgccgcgcccacacgcgtctctgggcggaagcgcgccgccaaggccgaggagatccaccagaacaaggaggaggaggaggaggaggaggaggtcgtggcggcgtcctccgccaagcgcagccgcaaggcggcatcttctgggaagaagcccaagtcgccccccaagcaggccaagccggggaggaagaagaagggggatgccgagatgaaggagcccgtggaggacgacgtgtgcgccgaggagcccgacgaggaggagttggccatgggcgaggaggaggccgaggagcaggccatgcgggaggaggtggttgcggtcgcggcggggtcacccgggaagaagagggtggggagaaggaacgccgccgccgccgccggcgaccacgagccggagttcatcggcagccctgttgccgcggacgaggcgcgcagcaactggcccaagcgctacggccgcagcactgccgcaaagaagtacagtttttctcccagctctggttttgatttgaccagatttttgctccatgtctattagtacttgtgagccgagcaatctgctatttgctgatttattgtgcgtgcagaccggatgaggaggaagagctcaaggccagatgtcactaccggagcgctaaggtggacaacgtcgtctactgccttggggatgacgtctatgtcaaggtccttgttcatcgctttctgttgcttctgctctcatttatgatgtgcatatgtgtttgttaaggaagcaagaattgcttgatttttgttgccgactcgcatttccgtgacgagttctgcgtatggtcaccggtacgtggcactgatacacaacgtggtatgctggaagtctggtagtatattttgcatcgaccaggaggtccagatcgatatgtgcggtatagtgcttatttgattgcaccctgttcggagattcatgcatgatggcgtgtttagatgacgcctcccagacagctgcctgctaggcagctgattctggcccaggcgtccggaatggtgaagttgcgctggcaagattctcaggccacctaccaaatatgccctggagcatattgcatgcttctttttttgttctctttccttctatatttatctcattgttagtgaagtttcacattgcgcgtgtcatggaatatttactttcaaatcaacgaggagatgctagcattgaggtgtgtgataattattacatactagaagatatcgtgcatgttgccattgggattgcgaagaatgtggaaatgatgttggtagcttgtattaagaggttaacagttagtgggatgacatgactattagttagagatgatgtggatagtaagtgggatatgatgtagatgacttgtgtgttgagacagaactataacatggagttggaaatgggagcagcatggtcaaacataccctaaatgcctgtctctacacaatgtggtgattggtgtatagtctggtgttaaaagctggatactttgattctgttgaagattgtcacacccgaatttaaggacaaatctagatacatctcatatgttcaccaggatagtgtatagataccaatgtcataatctttattacacgacgataatgtcttacaaaatatctggtgttacaagatgcacctttcaacatgtttaatgctgcaaactgttttaattaaacagaatgcagtgttttgaacaaaaaaatgctgctttatcctgcatcttgttttgcatgtgtcagcaattgcttacattccattatgatctctgagattctttaaatttctagcctgatgaaagtatttactaattcaactgaacacaaacattgtttgaatgaacaaggcaacacggatgcttggaataatggttgtgtataatatcacttagtggttttgctctcacaccacatctttcatgggttctataataatagttactgactttaagtttcttattcctttttgtctatcttaggctggagaaaacgaggcagattacattggccgcattactgaattttttgaggggactgaccagtgtcactattttacttgccgttggttcttccgagcagaggacacggtgtgtatttagtattttgtcattctatgcatgtcaagtggcatagcactcacatttgtcatggcaggttatcaattctttggtgtccataagtgtggatggccacaagcatgaccctagacgtgtttttctttctgaggaaaagaacgacaatgtgcttgattgcattatctccaaggtcaagatagtccatgttgatccaaatgtaagtttgctgcagtttgctgagagctttgtggttttgctatacacataatgtttctgactaccattgttttgttgcctacttgccttagatggatccaaaagccaaggctcagctgatagagagttgcgacctatactatgacatgtcttactctgttgcatattctacatttgctaatatctcgtctggtaattccttctgcatcatcttttttggttgactagctgaatgcagttagctttgccaaagagttaaatacatgagttgttcctgcactcgtcaagggatgtcaataatgtccacaaactctgaaaatgtatttttagatacttaacttgttaagtcagtaaaacctgtcagatacttgggttttgggtacgattaccatccttatgtgagtaaaactcgtcaagggatgtcaatgacgtgttgattgtgtattagatattctgtttgttcgaaagctaatctacacaaacagcttatgtaatgtaaaacctcaaacaaacttgcctcttcataagcttaggtttataggattagcgtttagtgcatgtaaggcctatttgcttcacggcctccctgccgagctcctggctagacagccatcctggccgtaggtgcccgaaatcgaacacctgggagccacgtttgcactggcaggttttcctgggtgcaaaccaaacacgcctatagtgttcaagtataactgaattggtgctcacctttgtctaatagcttaagtttttggttttcatcggtgcatgcaactccatactcaatagtcaatatgatatagtgttcaagcatagaactctcgagtttgaatcctggcaggggcaatcaaataaaataattgcagcttacccctatttccacgtttgagcacatgagggagagtgttgaattataagtgtgttctccatctttctctaacagattgaactggtttgtgcatgcaactcaatatgatatttgagtcaaatgtttactttaaaatcatagttgatgcaatttaataacatatttttttggtctcgtgtgagggagtgtacgtataactgaattgcacacatttccttatcagcttaggtttttgactgcaactgttggtgcatgtagctcaataactaaagttgatctggacagtctacagtgaataagtttgacacttgtaaaatgtgcatgtatttttacaaacgctggcacttttttcctaatagaaaatgggcagtcagacagtgataccgcttcgggtatttcttctgatgatgtggatctggagacgtcatctagtatgccaacgaggacagcaacccttcttgatctgtattctggctgtgggggcatgtctactggtctttgcttgggtgcagctctttctggcttgaaacttgaaactgtaatcttctaactagtcatctgttggatagaatatgttcacgatctcagaacttattctattgttctggcttgcagcgatgggctgttgatttcaacagttttgcgtgccaaagtttaaaatataatcatccacagactgaggtatggatagtaaacttcatcttggattccatctgttctgtcagctactcttacaaagtgtctggatttttggatgtaggtgcgaaatgagaaagccgatgagtttcttgccctccttaaggaatgggcagttctatgcaaaaaatatgtccaagatgtggattcaaatttagcaagctcagaggatcaagcggatgaagacagccctcttgacaaggacgaatttgttgtagagaagcttgtcgggatatgttatggtggcagtgacagggaaaatggcatctattttaaggtacttcagtgtcatttgttcatttctacttgattccaacaaaaaaatcaattacttaagcctgtcaaacgatggatatttctgtatattttgctgtaacgctagatttctgcaggtccagtgggaaggatacggccctgaggaggatacatgggaaccgattgataacttgaggttagtgtatggtatatcgtctgcttgttgccttgtatacctatttgcatctaatccttgttttgcaaaccagtgactgcccgcagaaaattagagattttgtacaagaagggcacaaaagaaagattctcccactgcctgtgagtatttagttcgttgtgattttgctcgctatttgtttagctccccttttttatttggtgatatctgcctattttattctttcaaagggtgatgttgatgtcatttgtggaggcccaccatgccaaggtatcagtgggtttaatcggtacagaaaccgtgatgagccactcaaagatgagaaaaacaaacaaatggtgactttcatggatattgtggcgtacttgaagcccaagtatgttctcatggaaaatgtggtggacatactcaaatttgcggatggttacctaggaaaatatgctttgagctgccttgttgctatgaagtaccaagcgcggcttggaatgatggtggctggttgctatggtctgccacagttcaggatgcgtgtgttcctctggggtgctctttcttccatggtctgttctgtaccttgctgttttatatgcttcgctagattcatattgcactgttggctgctggctaaccaggtgtacgtgtatttgacaatttaggtgctccctaagtatcctctgcccacctatgatgttgtagtacgtggaggagcccctaatgccttttcggtgagtgcaatcacaaaccactactatgaaatcatgtggaatgtgtaaaatacgctgaccaactgaatttgttgcagcaatgtatggttgcatatgacgagacacaaaaaccatccctgaaaaaagccttgcttcttggcgatgcaatttcagatttaccaaaggcaagtgttctgtcaagttcatgcatttctcagtgagcatgctatttaactcttctctgcaggttcaaaatcaccagcctaacgatgtgatggagtatggtggttcccccaagaccgaattccagcgctacattcgactcagtcgtaaaggtaaaaaaccccgtgaactactactggttggccttcactacgaatatgttaggatttaatttcagaagaaccgccttttttttcttggtgcttcggtactactgcagcaagctcactcttattatcatgtcagacatgttggattggtccttcggtgagggggctggtccagatgaaggcaagctcttggatcaccagcctttacggcttaacaacgatgattatgagcgggttcaacagattcctgtcaagaaggttggtggcttggtcgcatttgtgccttcctttgttgttttttccccttctgaaacaatcatctctctttcctatgacagggagccaacttccgcgacctaaagggcgtgagggttggagcaaacaatattgttgagtgggatccagaaatcgagcgtgtgaaactttcatctgggaaaccactggtatgtgtgctatttcgtgctgttgtttctataactgtgcaacatttactttccatattcaaactcataactgacgagatgctgcaactactgtaagattcatggctaacccatgacaacattttgcacacatctttgttatctaggttcctgactatgcaatgtcattcatcaagggcaaatcactcaagtaagtttcaaaacattttttttgtttttttggggaaaagtaggttattgtttacttgtgcttacatatgatgttgcaggccgtttgggcgcctgtggtgggacgagacagttcctacagttgtaaccagagcagagcctcacaaccaggtcagcttcagaaaggccactccttttcgccaatccctgcatctgtatttactattagcgtgtgttcccatatgatcattaccgaacatgttgtccacacaggttataattcatccgactcaagcaagggtcctcactatccgggagaacgcaaggttacagggcttccccgattactaccgattgtttggcccgatcaaggagaagtaagttcctgttttcaagttgcctgtaccagatctagtcactattgaaagttttcagcagcaagccattcatcagttagttacagctcttgaaagccttacctctgaacatgtgtgctttctctgatggtgataggtacattcaagtcgggaacgcagtggctgtccctgttgcccgggcactgggctactgtctggggcaagcctacctgggtgaatctgaggggagtgaccctctgtaccagctgcctccaagtttcacctctgttggaggacgcactgcggggcaggcgagggcctctcctgttggcacccctgcaggggaggtagttgagcagtaaaaggatgacagatctgagctgagctgggcaacatccagcggcaggagcatttctggttcggttcgattcgggctcacgagcgcattgtgctgattcgcagggtgcactcgagctcgagtgcggagttgttgtaatgtaggttgaggtttcaaaacatccatccatccatcggccccgcctatttgtggatggtgtttctcgtgccattttagttcagctgtattgatgcttcgtcatgtatgtgtattgtaccattcgttcttgttacctactagtaaggcaacatttgatccatgttcaacgcgagcaaaattccatccactttaggtactgagatgctcaagtagttcagtcatcaggtaacatttacaacctattattttgcctggtattatctgaaaacgatttgctgaggatgttttttttttgaagtaaaggtactgtaggaaggtcctacagtaatattattaaatcaaaagaactaagtttagggagacagaagaatattacaaagaaataaaagggagagtgaggagggggaagaattctggatacatgtatttactctatttcacataaacatatggacatcaacatagatgtgaaggtatctaatctaaataagcgccgacatgctttacaagatagtttgatctataaggtgagggatgttgtggatgaagattgtgaccaactagctcatgtgtagttttgtttgtagtacctgtcctaaaaaatatgtaattctaagtttaatttgaatcagccttgttttttaaaatttttttgaccaagtccgttaaaaagtaataacattttttacttcaaatagatttactatgaaattttgtcttatggttatctaatgacatttatttaaaactgtaacaaaaactggtttggttaggggactgagggagtagtgcttaaaatggaagacgataggagagatcacattagtggtggc

SEQ ID NO: 675 - DNA, 4481 bp, Zea Mays
  source 1..4481: mol_type = genomic DNA
agacgttaatatatattttttaaaagtttggttaggacagctaaaacgacttacaatttggaatgggtggagttcttgtttgtagtcgttatgcacagtgaatctggtttcattcatttattgtttatttaatatatgataaataaacaaaagtatctctaatgacactgtcttatttcattctcaaaggtacaaccaaacggaaagaactgcatggtacaaccaaagttctttccatgtctggctcttggggttcagatagaagtgtgactaaacttcaaggctacaagttgaattttgtttgtgatcaagttggtcaaaaatactctgcctttgtccttttaattgatgctagtatagcaaaagaagctgctactttagatattgatctatatttgcatgacaagatggtaaaagcttcagtttccccttgtggacctcttgagttggatgcttggcaggtttggtcaagtacattgttcacctactctgttttagctaatatttttttcttacctgaaagatttcttttggttctctcttagatggaacaaacaaaactatttcaagcacttctctttaatagtttgtttggaaaactgttcattggatcaaaagcatcaaaaaccccaagggagttcattctcaagaaagatgatgtgttcctttggaacaaagaaaatatgtatttgcttttacctgtggattctactctggattctcataaaagtgtttgcatcaactggagtgtaattgatgtagtggctacagctgttggattcatgagaagcatttattcagatggcaaatgtaacctaactgataaacttaattatgaaaaaaatggtgaagatcttattcatttggccaacaagtcatgcaagggtaatgatcttaaaaatatggtggttctagcaattcacactggaaagatctatactattgttgttgtatctgatttatgtgccaatagtaaatttgatggtacaactgacaagaaagaagcaaaattccggacatttgcagaatattttgagaagaagtatgctaaatctttcacatattcatatgcttattcaagaatacatagctaataaacggtaaactaacacacttcatttacaggtatagtatatttctttgtcatcctttacaaccattgctagtgttgaaacccacccataatcctcacaatcttctttcctcaaagaatagagatgaaggtataaattataatcttgaactctgttatccttttaactgtagccaagtaataattttgtacaatgatacaaattggttatgctttattgttttttgtagacaatgttgtggaaaataaaaatagggcgaacagccttgttcacatgcctccagagttgctgattccccttgatttacctattgatgttttgagagtattctacttgtttccatctctgatgcatcgtcttgagtcactaatgctagccagccaactaagaagtgaaattgcatacagagattctgatatatcaagcttcgtggtatgatatttatatttttagacatagtattatgttattccttaaaatgtaatgtcacaatccaattccctacacttcctcagattttggaagctatgacaacacttagatgctgtgaggacttctctatggagcgattagagttattgggggactctgttcttaagtatgcagtgagtgcccatcttttcatgacatttcttaataagcatgagggacagttatcgtccagaaggcaagaaacaatatgtaatgccacactttataggcttggtattgaacgcaggatacaggtaatttgcatctcatcattggtaatatgaagaaaagaggctgcattttgcttaaaaaaatgagctatatactgttttaattaactttgtaattgatggaatgtcatccatagggttacatacgtgatgctgcatttgatcctcgtcgatggcttgctcctggacagctgtccagacgtccttgtccttgtgaatgcccagtaaattctgaggttgtaactgaggatattcataggattgatgacaagtctataattataggcaaggcgtgtgacaagggacacagatggatatgttcgaaaaccatctctgattgtgttgaggctctaattggggcctattatgtcgaagggggattaaaagcagcttttgctgttctcaaatggttccagattgagactgaaatcgaggaagagttaattatggaagctctgtcgagtgcttcagtgcgaaactatcttccaaaagttgatgtagttgaattgcttgaagcaaaactaggctacacttttcaaatgaaaggtttgttaatagaggctctcacccactcatcacagcaagaatctggagcaacatactgctaccaagtatggttgatatttatcttgaactttggctagtttaagccttttttattccatttctcattttctctaacggaagacgttttactttcagcgcttggagttccttggtgatgcagtcttggatattttaataactcgccatctgttccttagtcataaagacacagatgagggggagctgacagatttacggtctgcatcagtaaataatgagaattttgcacaagttgcggtaaagcacaatctccatcagtttctacaacattcttcggggttcttacaagaccaaattactgaatatgtgaatagtcttgaaagttcgtccatggacagagccagccttttatccagtggaccatgtagggggccaaaagtatgttttctcctctctgtaggccagtgcatacgagattcgagatcccatgaatgacatgtgctttacgagtagcatattagtgcactatttgttaacatcctttacagcctattggactcctatggtagaaattaggatatatatccggttctacttgtttttcatgtagtttgatattgtcaactattgaaatcatgaaagtaaaagtgcaaaatgtgattggtaggtccatcacactaatcgccatttttgtccgaccccaaagatactgttgaaacacagtttttaaaaccttggtttaaacattgtttttatccagaatatgacatttcactgtcttctttcgcataggttttaggtgatattgtagaaagtatagcaggtgctattcttattgacagcaaacttgatttggatttagtttggcgggtttttaaacctcttctttcaccaattgtcacacctgagaatttggagttgccccgattcagagaacttaatgagtggtctgacaagaatgggtactttattggaattaagtgtgaaaatcgaggagacagcacaatggctatccttaacttacaactcaaggatttgcttcttgtgaggcaaggttgtgggaagaataaagtagatgcgaaagcacatgcagcttccttattgcttagggatctagaggtacttccttttacgccccattcttttggtgaatcatgctgctggttgattcgggacatagcatgtattcttgttgtgttagcaggaaaaaggacttataattccaaggaatgcaagcagagtggaacaacttgaaaagaattctggtactgtaaaacattgcaacaacgtgcttgatgttatggacacacaaaacgtagcaccacctaggcaaaaggaagtagctgtgttaagtaccaccactcctggctctgttcttgataagccatgtacgtgtttgtctcagttgttttgttttgtttttcatccaatatttgtcgggtcgacatctatgcgtatcatgtacaaaacttcacattggtttaatcattgatcttatttgtgcagtggttgtgaaggttaagttgagcaaaggaggacctcgtatatcattgtacgagtcgtgtaaaaagcttcagtggccaatgccgacctttgaattcgtgaaggtcgaaccaaggtactaatgtttcacattgtggggttgcagttggcttgtgtaaagtactacctaatatttcctcttttgaaaataccagcgtgtgctcctcttcctgtggttcgtcacaaaaggttgcgccccaaggattcgcatttgcttcgacaataacgttgcatataccgaacggcgatgtcatcagcctcacaggagatgggcgtgcggataagaagagctcacaggattctgctgcgttgctcatgctctatgagctgcagcggcaacgtagattccaagttcaagaagtatgaggaatcacctcgtggttccatcaccaaagatgcaatgttaccgccaccggcgattattgcttgggcatcttggagtaatgtcaccgccaaatcagtctttagtcgtcagccgcacgggggtgtaagaaaataatgtacttcattctgattctaaattataagacaccccgaattatgtaatctaattatcataatgtcctataatttgaaatggagcggtgttggttactct

SEQ ID NO: 676 - DNA, 18807 bp, Zea mays
  source 1..18807: mol_type = genomic DNA
cggatccatgaaggggccgacggaggaagaaggagcagctgacggtgggctagggaggggactggccggtggcaggtttggcgcagacctgcttggcgacgacggagggaaggggagggagagggcggtggttgcaggagcgtcagcgacgggggagggagagaccacggctagggacgtcgtcggctggggaaagggcggccgacgatggggacactagctgcggctgctggtgcagcggttggggtggggagggaggggagagaaaagtggaaaactaacctaactctatatctcgtgggaaactctaaccctaaccaaggttgtgagttgtattaatagactcagtttgttgggcctggcccattacacataggtgtaaatgtaattacaagagattaatcctaaaattttaaatgggtactctaacacctaacagtttatacatgcaactgttgaccataagtgtgttttttcaatataaacaacgactctatatcctatcggcccacaaattaacttttactagcaatgatagatggtatatagatagctcataacagttacccagcacgatagtaggagaatagagaaaagatcgctatacttggctaggaatgtaaaccactgctacccgtctaccatattcaagtgaaactcttgactgtgtgcccttcgaatgatagtgtttatctgccaccattgtactccctctgctgcaccttctagcttcgttctaaatcaaacttctctaatattaactaagtttatagaaaaaatacaccaacatctaaaacattaaattatttcatgacatccaccatgaaatatgttttgatggtacctttatttagtattgtatatgctaatatacttttgtacaaatttgatctgagatagagaagtttgacttagacgaaactaacattttggaatagagagagtgtggatgtgttagtgtgtaaatatattaactagtcctaaactctaatgagttgtttatggattattataatctagattatataatccacttaataatctatgttgtttgtttgtctcttaacttatttaagctagattatataatatagagggtaaacaaacatgggagatataatgcaagctaaagctaataggagattagaagcaaccaatcagatttcaagtgaaaggatgccgagctgctcgttattatactaacaaaagcatcagttctgttaagtaaaactaaacacaagaatggagaggttcgtcacgacggtattaggctgaggcgaaatcatgtgccaacaaacgcatttcgcgttcatttcgcaggcacgtgccatgtaacattatgggtccacgtgccagccgctcatcagcgccagcgggaacccgtccgtacctggcacctccggcctctggagtccgccttcgcaacggtaacggtagcggccgcctgccccccgccgtctcccggggcccagccaacgaacgaacacaggccacggccacggcgccacccacacccaccgcctcacgcacttcgccttctcgcccagttcagctcctctctcccccttccgccgtgtctcgctcctcctggctatgccgatttataaacccccaccgcgccatgcgctccccaccgccacagccactccacccgcaccgaaccaatggcggacgccgccacctccgaggatgccgacctgccgcccccacctccgccggcgcagctcccgcctcctcgccgcccgcacaagcggcttcagccgcgggggtactgatcgactctgatctcgcgctgcgcagccgtgtcggggcctgggcttatgtgggttatctcgcttgcaggtaccaggtggaggtgttcgctgcggcgctgcgcgggaacaccatcgcggtgctagacactggctctgggaaaaccatggtcgctatcatgctcgcgcgggagcacgtcctccgcgcgcgcgctggggaggcgctgcgccggatcgtggtattcctcgcgcccaccgtgcacctcgtccaccaggtgcgcgtctggtggcccgtttgtcttctccacgcgggaatgtggtggctggaggctgtgttgttgatgagggaagcggttgcctttccgtgtttgtgctgcagcaattcgaggtgattcgggagtatacagacctcgacgcggtggagtgccatggggcatcgggggttggccactggaacgccaagcgctggaaggaagcaattgggactaaggaggtacgcgccagggttcactgaagcctgccctatgcttgagcttgacacagtaattgagcaattgtgatgtactgtgagatttatggactaccgtgcctaccaactgcctgactaatggcctggaacagcaagcgtcctgtaggggctgtctgattggttgcctccatatgctccagccagacacacgagatgcaggctactgctgtttggtaacctgtatcgccacatgcaaaaggggctttcacgttggctccgtaaatatgtagattttggacgtttttgtggagccaggcccatttgaatgcagcttcttaaccagctaatgattttattagtgtgtgattagcacatatggagtaatattaatatatttcaaagaatattaaacacaataagataaaataaggtctataaaagtgtacttgcacaaaataaatattatagcaaaataattttagcggcttctatttcatgcatcatatctctatacaaacaaccatacaccatctctttctagctaggctaactagatacatgtaaccaaacaccatgcaattgcatgtagccagtctggttgagataggccaggctcacaaatttgagccaggttggaccatgcaggcaaccaatcggatccttagtgttgacagcactgctttttgtgagtagtgctcatcctgagtcaatgtagattgacgttatttttttcataaatgcagtagttcttgacaaaaaatattcttcagtcctggctgaagtacatatacatatgaaatatcctccatctttccgttgctacatggatacttctctacatcagcaaattctcataatccttataaatatgccattgtgatgaacttacatggctttttaatgcattttcttctcttggatttcagtcatttatatgattattcgcttttcagttcaaattcaaagtgctatctatgatttggaatatgtatttactcaagccatgactctttccgtttcttctccctcagattgttgttatgacaccacagatactattggatgctctcaggcatgcttttctaacaatgcgtgtgatgagcttgttaatatttgatgaatgccatcgtgcttgtggaaaccatccatactcactaataatgaaggtaacacaatttgaagatcgtttctttgttttgacttatatttttagataggctttgttccaaactttgcttgagactgaaatgctttgttgttgttgttggtgtttgttccaaactcccttgcattttttgtatagtacatgggttgcttaagccttagtatcacattttctaaataaatgtcatgcaaaagtcctaatgtctttaactcggcttgtgtttaaaggaattttacattgattcggagtggaggccagctatatttggaatgacggcgtctccagtttctaaaaagggtaggagtttctgtatatgacaatcatgtgtaatttctctttttgtcaatcgtttcagcaattatgctgtattgttattttaattatcatgttttatgactataattgtcttcctttttttgtcatactgcataaaaactcttttgataaatttatggtacattcatactccattttggtgtataacacttcttttttctgatattgatacatgttttatgcatcacaagacagtgcattttgggagtgtggtgttctctcttgtactaatgctgctctacttctcagcagtataaatttctaggttatctagcttacatgattagttgatgctttaattttttgtgattttgtgcatctaacttacttcttgggtgcactctgcatttccttgttaattgttttctagggctactattcatcctactggaagctacatatgactaatttactgagtcaaagttgtttctgatctatgactgttttcttaggcatatatttttgttactaattatggtagattcacattttttggatccctagctattatttgggtagggtcacgcagccagtagcacgggagcactattagaatatattgtcctcttggattcacattcctactattaaatgtgccatggtattctattttacatttagtatttactacaaccttctatttataaacaacaacaacagagccttttaattgcaaacaagttgggataagttagagttaaaagccaagagaagccacaagtcaaggttcacgtatgtggataactgttttccatgtactcgtattcaaggctaaatctttaagtatattcctttcaattctccttgtactgtctctttgtgtatcaacttcggtctttctagacctcttttttcattactatcgtgccttaggattccactacgcgctggtgcctatagatgtctctgttggacatgctcaaactatctcgatcggtgttggacaagcttttcttgaattggtgccacccctagcctatcacgtatatcatctttccagactcgatcaattcttgtaggtcataaatccaacgcaacctacgtatttccgcaacacttatctattgaacatgtcgtttttatatggtaacattttgcaccatacaacataacatgtctcattgttgtcctataactcacactttagcttctatggtaccctcttgtcactagaacgtcatatgcttgacgtcactttatccaccctattttgattctatggctaacatctttatcaatatctctgtctctctgtagcattgatcctaaataccaacttatccttcctgaggattacttgatttccaaactaacatagtcttcctcatgtatagaaggttgtgaagcacataagctaaaaccttatattttataggagcttctactatagaagattgtgaagcacagattgctcaacttgagctagtattggatgccaaggttctttctctcttgcagctaatgtttccttaatttttaaatttactgagttcttttaggaaacccaagtttgcagcagcaaactgatttaaatatcttacacgttatcccaggtatatattgttgaagataggaatgaacttgagagcttttcaactggtgcaaaagttgtgaataaatactatgacccttacttgtttgatttggataatctggaatcaaagttacagatgctgtttgaggaggtgacttaaccaaccaactatatatttcttctgattcactagaaaaatgtgtttttcgtagccacagcctagatacctagtatctttttctgcttgtacttacgtataggtttatataaatattgtactgttgggcagtttgatggtttgttggttagactgcaagaatcatctcctaataaatttgaagacactgatagtatattggagatgtcgagaaagagcttgtccagatgccatgggaagatattgtacgaactaaatactcttggtccaattgttactttggaggtattgttttatttaagcaccaagtatttctttttttactgaagggttataatgtccattgtgtcctgcgcgttcgataaaaaaataatgtccattgtggcattgtgctacattctatttattgatattgattagtggcaacaattaatatgcaagcaaccattaggtgcaaacgtgcaagcatgtttcttggtccattcgatttagatccaaccctagatgtaatcgtggtttgttagggtttttttataaagcagcccaacgtggtagtggaagggtttatgtgctaaatatgacatacggttggatctagatcgaatggaccaaaagacctgcttacacgcttgcacctaatgactgcttgcatattagttgttgccattgattagtagctgcataaattcctgtgtccttagtgactcctaattcctacacatttgttaattaatcccattgactctggcctggccagggaatatactggattaagaaattggcaatgctaatttaataggtcacctttgttgtaggaaacaccattaaaataccctttcccttgtttcacaaaagaaaaaaaaggctctgttagaatgtattgcgtgtgtgctgttattgtaatgtgcataggcccacctaactctctattaatacatccccaaccctatttagggttagggtttcactctcctaacaggctccactcagtgaatacatttgccctcctttctgaaaaatttctgattgtttccctgccagtcttaataatgtagcatttgcactgcaaaccatattaccataccgtaccatttgtattagaaaatatgtggtcctgatcgtatgttctgaacattcacctgtagccttttcgtttctttagattttttttttcagttttgaaggactatgttgttcgttctagaaaatcatacatgcatttatctagcaatcttattaaccagagtaactattggtacaatttgaatgtttatatgctaactctttattacatttctctgataggtggtgaagatatataatgaaagcattaataccatagatgattctgaagattgcgtattttctaaagagagcctcaacttacaggtttcctatttcaaagaagctttatttttgattgaagattttttgccacagggtatgatgcattattttactgaattcttacgatactgtcaccagctttgaaactacagtttttatgtatcaatatttgttttctaattcttgtggcattgttctataataggttatggggagctgatgaaatcagaatctggttctgcggaactaactaagaagggatatatttcttctaaagtggagtcactgatcaacattttcaaatcgtttgggtaataccttagtccacttaagatgtttattctattcttttgtttagtcttttgttcgtacaaagatacatttacatgtgttgtctctacagctcgtcagaggaagtgctttgcatgatttttgtagaaagaattacgacagccaaagctgttgaaaggtttatgagaggaaatgtgaacttctctcgtttttcaatttcatacttgactggagggagtacatcaaaagatgctttgagcccagcagtacaaagatttactttggatttgttccgagctgggaaggtattatattttgctagtgcaatttgattggaatattcaaatgatatactaacttttatgtcaatttataggtgaatttgctttttacaacagatgtcactgaagagggtattgatgtacctaactgttcctgtgtgatacgttttgacttacccagaactgtttgtagctatgtccagtctcgtgggcgtgccagaaaaagcagttcaagttatgttcttatgattgaaaggtaaaacattgccacatttaattaactttttttttgatatgggctgtttagctataaaaaagtttatatggtcaccaatattttctcccttcctgagttacacctgttcttaaaccttttcttatatgcttggtctggaactttcaggggtaacttggcgcagcaggaacacatatttcgtataatacgaactgaatactatgttaaaacctttgcactgcataaacaaccaaatactccatcacttgatttgcctctccaagagaagtacatataccatgttgaatcaacaggagcaactatcaccgcagaatgctgtgtcaacctaatttataaatattgtgagaagcttcctaaagataggtatgcttgtgcttttaatctgcttatgttcgttgatctgcaaagggcaggtcttgtgctgtggtgaagcgaaagggcttctaactgagttcgttaggtggtataagtagaactccccaggtcctgagttcgacatcccgtgggagtgaattttaggctggggttaaaaaaattccctcatctgttccatgccaaagcacaggcctaaggcctggtctcggtcgttctcatatgggctacggtgtcgttgtgtatgtgtgaggtaggttttttttgcgctgtggtgaaagctgtctcactgagtaatcaggttgtgggttcgaagcagtctctcatcatttgcagggggagatggcttgccttgttttattaatccttcctcagatcccactcatgtggagcccctggcactgggtctgcctattttatctgtttgttaatctctgtgataacaggaaacccagccatattataatacaatcactatatctctaacactctgtttcaacatatgcatgactgttatgcttaaactttcatttggatttgttcctgttatgggtagtatttgcatgtgggctgaaaagttgatcaaactgaaatgtcactcataatggaataactacacctcctaccccatgatattgctgtattttcgttgcataaacatggtgcttcacgataggattcctctccaggtattacttgccaaagccttgctttgaggtgggtcttaaggatgggtcatatcaatgtaccttgacaatgcctcacaatgctgcatttcgaagtatagttggtcctccaagtagttcatgtaatttagccaagcagcttgtatgcctggaggcatgcaagaaactgcacgagctgggagaactcgatgatcatctagtacccttgactgaagagcctatggatattgatacagacacaacagataaaaaatgtgtttctggaccaggtatggttctaatgtctttcaagtgttgcttcgtgcttacatcaatgttttattgagaggaatacctcttcatatatttagctctgtttcaacaataaaatactgtacagtgagtgagtctgtttatagtggttgtgactcagaacgggcatgaactttttattttttgacagtgccattattcttggggcatggcgcttatggctacaaaggaaccgggtcatctttgatggggaatctctttccataagcataagcaaagtgcaaagaagttttttagatgagttagtttgttgggtgatggctggagcgaaacatcttgggaatttaggcttagtgggagctcttaatgtcattgtcatcgggtcgagttagattctaatatgtaatagttcttttgtgtgtgtggttttggggcctagcatgccccccccttctagttgtaagaccgtttttctcctctctaatatataaagatgcgcagctctcctgcacgtcgagaaaaaaagatagaacttgatgaactagtggtgattgaatctgtttgtttccttgcatggtgcatcatatttacttgtgccgaaactctcttcatatatgttgttatctttgtgaacttgtttattaagaaaatgtctccagaccattgaaccctgtcacctttatgtaactatctctcatttgttatctttgacatttgattgagcaatcactgaatacttactttgcaaatggaagttggcagtagcattcccatgaagtattagcaacagctacaagtgtttctccttctgaagaagattttatatttttttcatgcccttgccctttcaccattttggcaggaacaactaaacgaaaggagcttcatggaacgataaatgttcatggtctatctggaaactggatccatgaaagtgaaactgtgattctgaatgcttacacatttgattttcgttgtgatcaagaaggtgaactttatgctgggttcgttctcttaatggaatcagtacttgatgatgatgtggcacgttcagagatagatctcttccttatacctaataaaatggtgtacaccaccatgactccttgtggaaaaattcaactgaacaaagagcaggttattcaagaaaccgcaactcctgttgctagatttctttttaagtttaccagtggcttactttccttagtttttttgtcagctgtgtaaaggaaaattattccaagaattcttcttcaatggtatatttggtagattatttcatggttcccgaacggatgaactgcaaagggaatttattttcacaaaaggtcatgaaatacaatggggctcagacaacatgtacttacttttgcctttgaggaactcttcacagatacaacatgatccaaacatatactgggaagccgttgagtcttgctctggtacagtagagcagttgagaaatttgtatctagaagatggaaatctcaaccatgaaaacttatgttcacataaaagaagcaacaagggagaagacatcattcatctggccaataaatctcttcatttttccacagtcaaagattcagttgtactatctcttcatactgggaggatctattctgttcttgacttgattttagataaaactgcagatgactcatttgatgagatgtataatgggaaagcttcaccatttgcttcatttgtggactactaccatcaaaagtagttgctcatttttaattttgtcaattcaaggatggatccactatgttatgcttgctcactaatttctccgttctcaactatatgtaggtatggtattgttattcaacatccagggcaacctttgttgctgttaaagcaaagtcacaatgcacacaacttacttttttcaaaaatgaagtaccaaggtactgtagtctcgatgtagtagcattctttccttttttctgttgcataatttgagatggtaattgtgttactttggctctgcttttacatggtattccatccaatttatggcagatggttcaactggcaatcctctgctcgtagaaaaagagcaaattcatgcccgagttccacctgaactactcatccatattgatgtcgcaactgatattctcaaatcattttacttgctcccttctgtaatgcatcgggttcagtctttaatgttagccagccagcttcgcagcaacattagttacattcaacgcataccaagttctctggtctgttctctcatggtattacatattgttttatttgttaaggatagtaatgcatataatgacttctcttcatgctagattttggaagctataacaactttaaggtgctgcgagtccttttctctggagcggttagagttattaggagactcagtactgaaatatgtaataggatgtgatctgttcctaagatacccaatgaaacatgaaggccatctctctgatatgagatccaaggcggtatgcaatgcgacactgcataaacatggaatatggcaatccctgcaggtagatgctttcaagcctaagttcatttgtgtgatcattttgctgaagttcataaatggatctgtcaatattcttacatcataattgaaccagttttgtctgagagtgacaccaataattcattgtcgtcatttaacaaaacttggaatttcccagaaggtttatcccgaaggaataagatacatgctattcatgctagaatggatagactaatccagttagacattttcatgttctgtgctacccatctgtagtttcctattataggcctaatcacttgtgtcatcttttctttgaagtctttcctttttattaggtttgtttttatttaatgtatatctactaatgctttcagggttatatacgtgatgctgcatttgaccctcgtcgttgggttgctcctggacagatatcattgcgcccttttccttgtaattgtggaatcgaaactgcatttgttccttttaatggaggttatatcagtgacgatccatcttttgttgtgggaaaaccatgtgacagaggccacagatggatgtgctcaaaaacagtatctgattgtgttgaagcactagttggagcatattatgttggtggtggcatcgctgctgcaatttgggttatgaggtggtttggtattgatgtcaggtgtgatatggaactagtgcagaaagcaaaatataattctaatgcatctcgaatgtgctatttatcaaaaataaaagatattgaggaactggaagcaaaactgaagtacaacttctcggtcaaaggccttctgcttgaagccatatcacatccatctgtacaggaattaggagttgactattgttaccaggtcagtgaagcagagtttcagtacattagtttattgcatttaagtcacattgatatacatatcttaatttctgatttgtaacagcgtctggaatttcttggtgattctgtgctggatctattaatcacacagcatctctatgctacccacactgatgttgatcctggagaattgacagacctgcgttccgcttcggttagtaatgagaattttgcacaagcagttgtaagaaacaatattcataatcatctacagcatggatctggaatacttttggaacaagtaacagaatatgtcaggtccaacttggagtaccatggtaaagagaatcaattccttcaacaagctacatgcaaagcacctaaggttagaaaacttagttctacttctgtttgtggattagcagcctatttttctttattgtatttttatatatttgagtgaataacatggagctctcctttgtgttcccattaaaaattgtgctttcattgtttgttcaatatttatctatttttactcagcaacgtagaactttccaaggcataggaagctaattttaatttccttgcacaggttcttggagacatcatggaaagtattactggtgcaatatttatagatgtaaattttgatgttgatctggtttggaagattgttgaaccgttactttctccaatgattacccctgataagcttgcgttgccaccttatcgggagttgctggagttatgtagtcaccttggttgcttcatagagtcaaaatgtactagtgaaggagaagagttaattattgagatgaaggtgcagttgcgagatgaacaactgatagcacaaggacatgacagaaatggtaaaaccgcaaaggcaaatgcagcagcccgaattttggtcgacatgaaggtatatcttttcaaacagaaacaaaatatcaagaaatgtctagtttaaggggttgggcaggtccattgtgaaagacagtgtattgggtaaatgttgaatgattaatgggagcaaaggctcgtctacatataggcaaggatgttcacaggaataggaaactatcctagacaataggaaactctcctagacaataggaagcaatcctagacaatccaatcagggaagatccttgcctattagaaccaattaaccaaactaggggacgacgcacaaggcaacatgcctgtgcagccgcactaccctaaacccaagggacctgcctaacatagcccattttaacacccccctagtcagatcgtcaaccactgcacaagttcaaactggtcctgaattcagtgaagactgatggaggcccttggtgaagatgtctgcatactgtgatgtcgtcggcacatgcagggcatgtagatcaccagcagaaacccgttctctgacgaagtgaagatcaatctcgatgtgcttggtgcgttgatgctggacggggttggaggtcatgttggcagcactgatgttgtcacagtacaccaatgtagcttgacgaagagggacgtggagttccaagaggagctggcacaaccatgtagcctctacaactccgtttgccagaacgtgatactcagcttcagcactagacctcgagacaatgttctgacgcttggaggactaggagacgaggttgtcaccaaggaacacatcatagcctgaggtgaacttgcgtgtatccaggcaatccacccaatcaacatcagtatagaccacaagatcagtcgttgtagatggtcacagcaggaggccaaggtcaagggtgccacgaatgtatcgaagaatcctcttaagtgcagcaagatgtggtcccaggagcatgcatgtcaagacaaacttgctgaacaacataagcaatatcaggccgagtgaatgtgagccactgtagtgcaccagcaagacaacgaaaatccgaggcgccagtcaccggcgcaccatctgctgaggcaaccttcgggttggtgttaactggtgtcagacagggcttgcactctgacatccctgcgggctcaaggagctcgaccatgtactgcttctaagaagaagaccatcgtctgagggctgaacatgcataccaaggaagtgatgcagcacaccgagatccttcatggagaactcctgttgcagggctaagatgatatgacgcaggagggcagaggaggaagcggtgaggacaatgttgtcgacatagagcagcaaataagcaatgtcggatccacactgaaagacgaagggtgacatgtctgacttggcctcaacaaaactaagggagagcaaatatgtggcaaatcagttgaaccatgcgcgaggagcctgcctcaaccatagagggacttgttcaatcgacaaacaagatctggatgtgtagggtcttccaatccggatgactgaatgcagtacacagtcttggacagagtgccatgtagaaaagcattcttcacatcaagctggtgcttaggccatcgctgggatagtaccagggagaggattgtgcgaaccgtagctggcttcaccacaggactgaatgtctcaaagaaatccacacttggacgctaggtgaaaccctgaagaacccatcataccttgtgccgctccagtgtctcgttggcattgaacttgtgcttgaagacccatttgcatgtcaccacgttggcatgaggtgaccgaggcacgagatcccaagtgtggttatgttgaagggcgacatgctcttcctccatggcggcatgctagctcggatcagcgaggccaccacgataggtcttgggcaccagggagagttgtgcagcatggaacagggctggaacgcgaaagccacgcttagcgcgcgtcgccatcaggtgttggttggtcacttgctggacatcaacaacacccttgggaagcggtgctggagacggtgacgggagcgctggtgctggagacgatgctgttggcgacagaacaagatccgtgggttcccggcgcatgtagacattggtgatgacgcgcgccggagcctggagaggtagaaagcctggcggtgagccacgcgtggcggcgcccggggacatttacgccgcgcggggcgctgacgaaatgcaggcggggcatggggacgcaacaggcgatgacgacgaagtctacaaataatgtgtgcaattgttaaggatgaccaaataatatttataactagacacactgacaaccagagatgtccaaaggttgcaatgtataagatcaaacttattagatgcatgagaggtagacacatgaaagggcaggtgagcatagcgccctagctgacaagcatgacataaagtggaggaatctctaaatgaatggagacactagacgcgagcttcgatagagcttcatgaccaggatgaccgagatggcggtgccaaggggggaggtggccttggcgacaaaagattgagctggaggaaggtgtaggggtacaggaccctagagctattgcgcctgatgatcatgttctgagtttgcagatccttcacagaacaaccagcatggtcaaactcaacagagcaattgttgttgatagtaattggcaaactaaaataagattcttaataatttgtggagacacaaggatattattaagaaataaagagtgagataattcagtacagccagtgtcaaccataggaagcagggagccattgccgacaacaatggatgaaggagtaggatactgcagggaaaaagtgtgtgaaagattgttgtaagaagatgtcatgtgggaagtagcacctgaattgaagtaccactcggtggacgggggttgctgcagcgtctccgtgctaaacccagaggccagcgactgattgtccctggagggcaggccgaccatggggtgatagaaccctggcggagcccattggtccccttagttggtgcagaaggagcaagagcagcaggtggctgctgctgggcgacgaaggcctgctgctgaggacgaggctgggaaattggcgacagaggaggacgtgtgccgggccacatgtggatggtgcctatccacgggttgtagaccgatggccaagggccagccgccggcataacatctttggtgtcgggctgctgctacccgctgttgttgctgcctgccgctgtcgtggccaccggcacgcttgctgcgactactgttgttcttggagctgttcccatggccacccccaccccgcgagttgaagtcggagagctgtgggggatgttgcgaggacttggtggcggcggcaagagcgacgaccataagaggccgctgatttgccagggtgaggtcatcgcagacgtcgaggtaggaggggaagggtcgagcgtgacgaagcagggcgccgacatgggtgaagcgctcattgaggtcgcgaatcacattgaggatgagggtgcggtccgagacgacttccttgagggcaccgaggtcgtcggccatcttgaggcggcggtagtactcggcgatggagatcgccctggacgaagttgtgaaaccttgtctcaagctggatggcgtgtatctcccgtttcccaaggaaccgaactcgacggcgagccaggtgtcccgggcagtgccaccctgggaggagacaatctcgacaaggtcgtatgtgaggcagtcgaggttctaggacttgacacaatccatttgatcccaatccggagaggggaccagggcgtcgaggtggacgtgatcctagagggagaacttgccgagggtcagtaaaaactaatgacgccaacggttgaggtggccagagttgacgttgaggacgatgtggacgaggctctggatgttggtgacaacgacgaccttggcgtggaggtggagggcggcggcctcctgcagtagcctggcgccatggagatccacaggcgtgggcatagaggacttgtccctgtggagcggggggcaagggcgatgccagtggcgcgagcctcctcctctgtcgcggcgaggcgggcaagggccacgtcgtaggcccgctggcgcttcaaggcgacgacgctgaccatttccgtggcccggcgggcggcgatctcgtcctgctggacgtgggtgtggatggccgaggatgacgagtcgacgaggccggcggtagccgccctgggcggtgtcgcccttgggcgacggaggcgcaatgccgagcatggcgctgcacagcagggagggtggcgcgcgggcgctataggtcagtaagacgggcgctgcacggcagagaagccgacacgcttattggggcggaagcgaagaaatccgatgtggaaccctgacaattgataccatgaaagacagtgtattgggaaaatgttgaatgattaatgggagcaaaggctcgagtacatataggcaaggatgtttacaggaataggaaactatcctagacaataggaaacaatgaagatccttgcctgttagaaccaattaaccaaactaggggagggcgcacaaggcaacatgcatgtgcagccgcactaccctaaacccaagggacctgcctcatatagcccatgctaacacattgtgatgctaatgggtagttcaacttcaactacacaccttgggtgtaactttctattctattgtaatgactgctttggcagtagatgctactccttcctgtcggaaatccatgatggtttgaaccggtggcttgaactgtaggcaaaatctgcctctcgagcgtcatgtatttttttgaaaggatggagtatgttttgctgactattttagaactggtttaatttttttctgaatgcagaaacggggtctctctcttaaacaatgcatctcgaaggctaatcaattggatattgtctcttcaaaactgcaatcagaattgacaaatgtaagcttataaagtgtttcccacaaaatggtacatcaaagtaatgaacttaattctgattctctgagtaatgaatagtatcgcatctctgtagttggaatcgcgacatgattgtcctcacatgaatggcactcttagcctaggtctttcctcagcgagagcagcaggtaatgccctgttttggttaattactctccctctgttccaaattatagttcactttagatttatcttaagttcagtttctctaactttgaccaaatttatagaaaaatgtatcgacatttacaacatcaaattagtatcattaaatccttcatgaaatatattttcatagtgcatttacttgaacctgaggtattaatatagtgttattaaaacttcttcaaagttagggaagtttgaattaagacaaagctagaatgaactatgatttggatgaatggagtatatggtactcactggtcagggtatcaaataggaaatattagtaattagatttgttctatacctagctctagcagccacaaaatacttagcattactcagatgtcatggcctttcatatgctttcagttgttcttcctctcaaaatggacaaaggtggacctcggactgcactttttaggctatgcaagagtttacagtggccaattccagaatttgaatttgtggaacaaaggtttaggtat

SEQ ID NO: 677 - DNA, 13240 bp, Zea mays
  source 1..13240: mol_type = genomic DNA
cggatccatgaaggggccgacggaggaagaaggagcagctgacggtgggctagggaggggactggccggtggcaggtttggcgcagacctgcttggcgacgacggagggaaggggagggagagggcggtggttgcaggagcgtcagcgacgggggagggagagaccacggctagggacgtcgtcggctggggaaagggcggccgacgatggggacactagctgcggctgctggtgcagcggttggggtggggagggaggggagagaaaagtggaaaactaacctaactctatatctcgtgggaaactctaaccctaaccaaggttgtgagttgtattaatagactcagtttgttgggcctggcccattacacataggtgtaaatgtaattacaagagattaatcctaaaattttaaatgggtactctaacacctaacagtttatacatgcaactgttgaccataagtgtgttttttcaatataaacaacgactctatatcctatcggcccacaaattaacttttactagcaatgatagatggtatatagatagctcataacagttacccagcacgatagtaggagaatagagaaaagatcgctatacttggctaggaatgtaaaccactgctacccgtctaccatattcaagtgaaactcttgactgtgtgcccttcgaatgatagtgtttatctgccaccattgtactccctctgctgcaccttctagcttcgttctaaatcaaacttctctaatattaactaagtttatagaaaaaatacaccaacatctaaaacattaaattatttcatgacatccaccatgaaatatgttttgatggtacctttatttagtattgtatatgctaatatacttttgtacaaatttgatctgagatagagaagtttgacttagacgaaactaacattttggaatagagagagtgtggatgtgttagtgtgtaaatatattaactagtcctaaactctaatgagttgtttatggattattataatctagattatataatccacttaataatctatgttgtttgtttgtctcttaacttatttaagctagattatataatatagagggtaaacaaacatgggagatataatgcaagctaaagctaataggagattagaagcaaccaatcagatttcaagtgaaaggatgccgagctgctcgttattatactaacaaaagcatcagttctgttaagtaaaactaaacacaagaatggagaggttcgtcacgacggtattaggctgaggcgaaatcatgtgccaacaaacgcatttcgcgttcatttcgcaggcacgtgccatgtaacattatgggtccacgtgccagccgctcatcagcgccagcgggaacccgtccgtacctggcacctccggcctctggagtccgccttcgcaacggtaacggtagcggccgcctgccccccgccgtctcccggggcccagccaacgaacgaacacaggccacggccacggcgccacccacacccaccgcctcacgcacttcgccttctcgcccagttcagctcctctctcccccttccgccgtgtctcgctcctcctggctatgccgatttataaacccccaccgcgccatgcgctccccaccgccacagccactccacccgcaccgaaccaatggcggacgccgccacctccgaggatgccgacctgccgcccccacctccgccggcgcagctcccgcctcctcgccgcccgcacaagcggcttcagccgcgggggtactgatcgactctgatctcgcgctgcgcagccgtgtcggggcctgggcttatgtgggttatctcgcttgcaggtaccaggtggaggtgttcgctgcggcgctgcgcgggaacaccatcgcggtgctagacactggctctgggaaaaccatggtcgctatcatgctcgcgcgggagcacgtcctccgcgcgcgcgctggggaggcgctgcgccggatcgtggtattcctcgcgcccaccgtgcacctcgtccaccaggtgcgcgtctggtggcccgtttgtcttctccacgcgggaatgtggtggctggaggctgtgttgttgatgagggaagcggttgcctttccgtgtttgtgctgcagcaattcgaggtgattcgggagtatacagacctcgacgcggtggagtgccatggggcatcgggggttggccactggaacgccaagcgctggaaggaagcaattgggactaaggaggtacgcgccagggttcactgaagcctgccctatgcttgagcttgacacagtaattgagcaattgtgatgtactgtgagatttatggactaccgtgcctaccaactgcctgactaatggcctggaacagcaagcgtcctgtaggggctgtctgattggttgcctccatatgctccagccagacacacgagatgcaggctactgctgtttggtaacctgtatcgccacatgcaaaaggggctttcacgttggctccgtaaatatgtagattttggacgtttttgtggagccaggcccatttgaatgcagcttcttaaccagctaatgattttattagtgtgtgattagcacatatggagtaatattaatatatttcaaagaatattaaacacaataagataaaataaggtctataaaagtgtacttgcacaaaataaatattatagcaaaataattttagcggcttctatttcatgcatcatatctctatacaaacaaccatacaccatctctttctagctaggctaactagatacatgtaaccaaacaccatgcaattgcatgtagccagtctggttgagataggccaggctcacaaatttgagccaggttggaccatgcaggcaaccaatcggatccttagtgttgacagcactgctttttgtgagtagtgctcatcctgagtcaatgtagattgacgttatttttttcataaatgcagtagttcttgacaaaaaatattcttcagtcctggctgaagtacatatacatatgaaatatcctccatctttccgttgctacatggatacttctctacatcagcaaattctcataatccttataaatatgccattgtgatgaacttacatggctttttaatgcattttcttctcttggatttcagtcatttatatgattattcgcttttcagttcaaattcaaagtgctatctatgatttggaatatgtatttactcaagccatgactctttccgtttcttctccctcagattgttgttatgacaccacagatactattggatgctctcaggcatgcttttctaacaatgcgtgtgatgagcttgttaatatttgatgaatgccatcgtgcttgtggaaaccatccatactcactaataatgaaggtaacacaatttgaagatcgtttctttgttttgacttatatttttagataggctttgttccaaactttgcttgagactgaaatgctttgttgttgttgttggtgtttgttccaaactcccttgcattttttgtatagtacatgggttgcttaagccttagtatcacattttctaaataaatgtcatgcaaaagtcctaatgtctttaactcggcttgtgtttaaaggaattttacattgattcggagtggaggccagctatatttggaatgacggcgtctccagtttctaaaaagggtaggagtttctgtatatgacaatcatgtgtaatttctctttttgtcaatcgtttcagcaattatgctgtattgttattttaattatcatgttttatgactataattgtcttcctttttttgtcatactgcataaaaactcttttgataaatttatggtacattcatactccattttggtgtataacacttcttttttctgatattgatacatgttttatgcatcacaagacagtgcattttgggagtgtggtgttctctcttgtactaatgctgctctacttctcagcagtataaatttctaggttatctagcttacatgattagttgatgctttaattttttgtgattttgtgcatctaacttacttcttgggtgcactctgcatttccttgttaattgttttctagggctactattcatcctactggaagctacatatgactaatttactgagtcaaagttgtttctgatctatgactgttttcttaggcatatatttttgttactaattatggtagattcacattttttggatccctagctattatttgggtagggtcacgcagccagtagcacgggagcactattagaatatattgtcctcttggattcacattcctactattaaatgtgccatggtattctattttacatttagtatttactacaaccttctatttataaacaacaacaacagagccttttaattgcaaacaagttgggataagttagagttaaaagccaagagaagccacaagtcaaggttcacgtatgtggataactgttttccatgtactcgtattcaaggctaaatctttaagtatattcctttcaattctccttgtactgtctctttgtgtatcaacttcggtctttctagacctcttttttcattactatcgtgccttaggattccactacgcgctggtgcctatagatgtctctgttggacatgctcaaactatctcgatcggtgttggacaagcttttcttgaattggtgccacccctagcctatcacgtatatcatctttccagactcgatcaattcttgtaggtcataaatccaacgcaacctacgtatttccgcaacacttatctattgaacatgtcgtttttatatggtaacattttgcaccatacaacataacatgtctcattgttgtcctataactcacactttagcttctatggtaccctcttgtcactagaacgtcatatgcttgacgtcactttatccaccctattttgattctatggctaacatctttatcaatatctctgtctctctgtagcattgatcctaaataccaacttatccttcctgaggattacttgatttccaaactaacatagtcttcctcatgtatagaaggttgtgaagcacataagctaaaaccttatattttataggagcttctactatagaagattgtgaagcacagattgctcaacttgagctagtattggatgccaaggttctttctctcttgcagctaatgtttccttaatttttaaatttactgagttcttttaggaaacccaagtttgcagcagcaaactgatttaaatatcttacacgttatcccaggtatatattgttgaagataggaatgaacttgagagcttttcaactggtgcaaaagttgtgaataaatactatgacccttacttgtttgatttggataatctggaatcaaagttacagatgctgtttgaggaggtgacttaaccaaccaactatatatttcttctgattcactagaaaaatgtgtttttcgtagccacagcctagatacctagtatctttttctgcttgtacttacgtataggtttatataaatattgtactgttgggcagtttgatggtttgttggttagactgcaagaatcatctcctaataaatttgaagacactgatagtatattggagatgtcgagaaagagcttgtccagatgccatgggaagatattgtacgaactaaatactcttggtccaattgttactttggaggtattgttttatttaagcaccaagtatttctttttttactgaagggttataatgtccattgtgtcctgcgcgttcgataaaaaaataatgtccattgtggcattgtgctacattctatttattgatattgattagtggcaacaattaatatgcaagcaaccattaggtgcaaacgtgcaagcatgtttcttggtccattcgatttagatccaaccctagatgtaatcgtggtttgttagggtttttttataaagcagcccaacgtggtagtggaagggtttatgtgctaaatatgacatacggttggatctagatcgaatggaccaaaagacctgcttacacgcttgcacctaatgactgcttgcatattagttgttgccattgattagtagctgcataaattcctgtgtccttagtgactcctaattcctacacatttgttaattaatcccattgactctggcctggccagggaatatactggattaagaaattggcaatgctaatttaataggtcacctttgttgtaggaaacaccattaaaataccctttcccttgtttcacaaaagaaaaaaaaggctctgttagaatgtattgcgtgtgtgctgttattgtaatgtgcataggcccacctaactctctattaatacatccccaaccctatttagggttagggtttcactctcctaacaggctccactcagtgaatacatttgccctcctttctgaaaaatttctgattgtttccctgccagtcttaataatgtagcatttgcactgcaaaccatattaccataccgtaccatttgtattagaaaatatgtggtcctgatcgtatgttctgaacattcacctgtagccttttcgtttctttagattttttttttcagttttgaaggactatgttgttcgttctagaaaatcatacatgcatttatctagcaatcttattaaccagagtaactattggtacaatttgaatgtttatatgctaactctttattacatttctctgataggtggtgaagatatataatgaaagcattaataccatagatgattctgaagattgcgtattttctaaagagagcctcaacttacaggtttcctatttcaaagaagctttatttttgattgaagattttttgccacagggtatgatgcattattttactgaattcttacgatactgtcaccagctttgaaactacagtttttatgtatcaatatttgttttctaattcttgtggcattgttctataataggttatggggagctgatgaaatcagaatctggttctgcggaactaactaagaagggatatatttcttctaaagtggagtcactgatcaacattttcaaatcgtttgggtaataccttagtccacttaagatgtttattctattcttttgtttagtcttttgttcgtacaaagatacatttacatgtgttgtctctacagctcgtcagaggaagtgctttgcatgatttttgtagaaagaattacgacagccaaagctgttgaaaggtttatgagaggaaatgtgaacttctctcgtttttcaatttcatacttgactggagggagtacatcaaaagatgctttgagcccagcagtacaaagatttactttggatttgttccgagctgggaaggtattatattttgctagtgcaatttgattggaatattcaaatgatatactaacttttatgtcaatttataggtgaatttgctttttacaacagatgtcactgaagagggtattgatgtacctaactgttcctgtgtgatacgttttgacttacccagaactgtttgtagctatgtccagtctcgtgggcgtgccagaaaaagcagttcaagttatgttcttatgattgaaaggtaaaacattgccacatttaattaactttttttttgatatgggctgtttagctataaaaaagtttatatggtcaccaatattttctcccttcctgagttacacctgttcttaaaccttttcttatatgcttggtctggaactttcaggggtaacttggcgcagcaggaacacatatttcgtataatacgaactgaatactatgttaaaacctttgcactgcataaacaaccaaatactccatcacttgatttgcctctccaagagaagtacatataccatgttgaatcaacaggagcaactatcaccgcagaatgctgtgtcaacctaatttataaatattgtgagaagcttcctaaagataggtatgcttgtgcttttaatctgcttatgttcgttgatctgcaaagggcaggtcttgtgctgtggtgaagcgaaagggcttctaactgagttcgttaggtggtataagtagaactccccaggtcctgagttcgacatcccgtgggagtgaattttaggctggggttaaaaaaattccctcatctgttccatgccaaagcacaggcctaaggcctggtctcggtcgttctcatatgggctacggtgtcgttgtgtatgtgtgaggtaggttttttttgcgctgtggtgaaagctgtctcactgagtaatcaggttgtgggttcgaagcagtctctcatcatttgcagggggagatggcttgccttgttttattaatccttcctcagatcccactcatgtggagcccctggcactgggtctgcctattttatctgtttgttaatctctgtgataacaggaaacccagccatattataatacaatcactatatctctaacactctgtttcaacatatgcatgactgttatgcttaaactttcatttggatttgttcctgttatgggtagtatttgcatgtgggctgaaaagttgatcaaactgaaatgtcactcataatggaataactacacctcctaccccatgatattgctgtattttcgttgcataaacatggtgcttcacgataggattcctctccaggtattacttgccaaagccttgctttgaggtgggtcttaaggatgggtcatatcaatgtaccttgacaatgcctcacaatgctgcatttcgaagtatagttggtcctccaagtagttcatgtaatttagccaagcagcttgtatgcctggaggcatgcaagaaactgcacgagctgggagaactcgatgatcatctagtacccttgactgaagagcctatggatattgatacagacacaacagataaaaaatgtgtttctggaccaggtatggttctaatgtctttcaagtgttgcttcgtgcttacatcaatgttttattgagaggaatacctcttcatatatttagctctgtttcaacaataaaatactgtacagtgagtgagtctgtttatagtggttgtgactcagaacgggcatgaactttttattttttgacagtgccattattcttggggcatggcgcttatggctacaaaggaaccgggtcatctttgatggggaatctctttccataagcataagcaaagtgcaaagaagttttttagatgagttagtttgttgggtgatggctggagcgaaacatcttgggaatttaggcttagtgggagctcttaatgtcattgtcatcgggtcgagttagattctaatatgtaatagttcttttgtgtgtgtggttttggggcctagcatgccccccccttctagttgtaagaccgtttttctcctctctaatatataaagatgcgcagctctcctgcacgtcgagaaaaaaagatagaacttgatgaactagtggtgattgaatctgtttgtttccttgcatggtgcatcatatttacttgtgccgaaactctcttcatatatgttgttatctttgtgaacttgtttattaagaaaatgtctccagaccattgaaccctgtcacctttatgtaactatctctcatttgttatctttgacatttgattgagcaatcactgaatacttactttgcaaatggaagttggcagtagcattcccatgaagtattagcaacagctacaagtgtttctccttctgaagaagattttatatttttttcatgcccttgccctttcaccattttggcaggaacaactaaacgaaaggagcttcatggaacgataaatgttcatggtctatctggaaactggatccatgaaagtgaaactgtgattctgaatgcttacacatttgattttcgttgtgatcaagaaggtgaactttatgctgggttcgttctcttaatggaatcagtacttgatgatgatgtggcacgttcagagatagatctcttccttatacctaataaaatggtgtacaccaccatgactccttgtggaaaaattcaactgaacaaagagcaggttattcaagaaaccgcaactcctgttgctagatttctttttaagtttaccagtggcttactttccttagtttttttgtcagctgtgtaaaggaaaattattccaagaattcttcttcaatggtatatttggtagattatttcatggttcccgaacggatgaactgcaaagggaatttattttcacaaaaggtcatgaaatacaatggggctcagacaacatgtacttacttttgcctttgaggaactcttcacagatacaacatgatccaaacatatactgggaagccgttgagtcttgctctggtacagtagagcagttgagaaatttgtatctagaagatggaaatctcaaccatgaaaacttatgttcacataaaagaagcaacaagggagaagacatcattcatctggccaataaatctcttcatttttccacagtcaaagattcagttgtactatctcttcatactgggaggatctattctgttcttgacttgattttagataaaactgcagatgactcatttgatgagatgtataatgggaaagcttcaccatttgcttcatttgtggactactaccatcaaaagtagttgctcatttttaattttgtcaattcaaggatggatccactatgttatgcttgctcactaatttctccgttctcaactatatgtaggtatggtattgttattcaacatccagggcaacctttgttgctgttaaagcaaagtcacaatgcacacaacttacttttttcaaaaatgaagtaccaaggtactgtagtctcgatgtagtagcattctttccttttttctgttgcataatttgagatggtaattgtgttactttggctctgcttttacatggtattccatccaatttatggcagatggttcaactggcaatcctctgctcgtagaaaaagagcaaattcatgcccgagttccacctgaactactcatccatattgatgtcgcaactgatattctcaaatcattttacttgctcccttctgtaatgcatcgggttcagtctttaatgttagccagccagcttcgcagcaacattagttacattcaacgcataccaagttctctggtctgttctctcatggtattacatattgttttatttgttaaggatagtaatgcatataatgacttctcttcatgctagattttggaagctataacaactttaaggtgctgcgagtccttttctctggagcggttagagttattaggagactcagtactgaaatatgtaataggatgtgatctgttcctaagatacccaatgaaacatgaaggccatctctctgatatgagatccaaggcggtatgcaatgcgacactgcataaacatggaatatggcaatccctgcaggtagatgctttcaagcctaagttcatttgtgtgatcattttgctgaagttcataaatggatctgtcaatattcttacatcataattgaaccagttttgtctgagagtgacaccaataattcattgtcgtcatttaacaaaacttggaatttcccagaaggtttatcccgaaggaataagatacatgctattcatgctagaatggatagactaatccagttagacattttcatgttctgtgctacccatctgtagtttcctattataggcctaatcacttgtgtcatcttttctttgaagtctttcctttttattaggtttgtttttatttaatgtatatctactaatgctttcagggttatatacgtgatgctgcatttgaccctcgtcgttgggttgctcctggacagatatcattgcgcccttttccttgtaattgtggaatcgaaactgcatttgttccttttaatggaggttatatcagtgacgatccatcttttgttgtgggaaaaccatgtgacagaggccacagatggatgtgctcaaaaacagtatctgattgtgttgaagcactagttggagcatattatgttggtggtggcatcgctgctgcaatttgggttatgaggtggtttggtattgatgtcaggtgtgatatggaactagtgcagaaagcaaaatataattctaatgcatctcgaatgtgctatttatcaaaaataaaagatattgaggaactggaagcaaaactgaagtacaacttctcggtcaaaggccttctgcttgaagccatatcacatccatctgtacaggaattaggagttgactattgttaccaggtcagtgaagcagagtttcagtacattagtttattgcatttaagtcacattgatatacatatcttaatttctgatttgtaacagcgtctggaatttcttggtgattctgtgctggatctattaatcacacagcatctctatgctacccacactgatgttgatcctggagaattgacagacctgcgttccgcttcggttagtaatgagaattttgcacaagcagttgtaagaaacaatattcataatcatctacagcatggatctggaatacttttggaacaagtaacagaatatgtcaggtccaacttggagtaccatggtaaagagaatcaattccttcaacaagctacatgcaaagcacctaaggttagaaaacttagttctacttctgtttgtggattagcagcctatttttctttattgtatttttatatatttgagtgaataacatggagctctcctttgtgttcccattaaaaattgtgctttcattgtttgttcaatatttatctatttttactcagcaacgtagaactttccaaggcataggaagctaattttaatttccttgcacaggttcttggagacatcatggaaagtattactggtgcaatatttatagatgtaaattttgatgttgatctggtttggaagattgttgaaccgttactttctccaatgattacccctgataagcttgcgttgccaccttatcgggagttgctggagttatgtagtcaccttggttgcttcatagagtcaaaatgtactagtgaaggagaagagttaattattgagatgaaggtgcagttgcgagatgaacaactgatagcacaaggacatgacagaaatggtaaaaccgcaaaggcaaatgcagcagcccgaattttggtcgacatgaaggtatatcttttcaaacagaaacaaaatatcaagaaatgtctagtttaaggggttgggcaggtccattgtgaaag

SEQ ID NO: 678 - DNA, 13731 bp, Zea mays
  source 1..13731: mol_type = genomic DNA
taaaaccttatattttataggagcttctactatagaagattgtgaagcacagattgctcaacttgagctagtattggatgccaaggttctttctctcttgcagctaatgtttccttaatttttaaatttactgagttcttttaggaaacccaagtttgcagcagcaaactgatttaaatatcttacacgttatcccaggtatatattgttgaagataggaatgaacttgagagcttttcaactggtgcaaaagttgtgaataaatactatgacccttacttgtttgatttggataatctggaatcaaagttacagatgctgtttgaggaggtgacttaaccaaccaactatatatttcttctgattcactagaaaaatgtgtttttcgtagccacagcctagatacctagtatctttttctgcttgtacttacgtataggtttatataaatattgtactgttgggcagtttgatggtttgttggttagactgcaagaatcatctcctaataaatttgaagacactgatagtatattggagatgtcgagaaagagcttgtccagatgccatgggaagatattgtacgaactaaatactcttggtccaattgttactttggaggtattgttttatttaagcaccaagtatttctttttttactgaagggttataatgtccattgtgtcctgcgcgttcgataaaaaaataatgtccattgtggcattgtgctacattctatttattgatattgattagtggcaacaattaatatgcaagcaaccattaggtgcaaacgtgcaagcatgtttcttggtccattcgatttagatccaaccctagatgtaatcgtggtttgttagggtttttttataaagcagcccaacgtggtagtggaagggtttatgtgctaaatatgacatacggttggatctagatcgaatggaccaaaagacctgcttacacgcttgcacctaatgactgcttgcatattagttgttgccattgattagtagctgcataaattcctgtgtccttagtgactcctaattcctacacatttgttaattaatcccattgactctggcctggccagggaatatactggattaagaaattggcaatgctaatttaataggtcacctttgttgtaggaaacaccattaaaataccctttcccttgtttcacaaaagaaaaaaaaggctctgttagaatgtattgcgtgtgtgctgttattgtaatgtgcataggcccacctaactctctattaatacatccccaaccctatttagggttagggtttcactctcctaacaggctccactcagtgaatacatttgccctcctttctgaaaaatttctgattgtttccctgccagtcttaataatgtagcatttgcactgcaaaccatattaccataccgtaccatttgtattagaaaatatgtggtcctgatcgtatgttctgaacattcacctgtagccttttcgtttctttagattttttttttcagttttgaaggactatgttgttcgttctagaaaatcatacatgcatttatctagcaatcttattaaccagagtaactattggtacaatttgaatgtttatatgctaactctttattacatttctctgataggtggtgaagatatataatgaaagcattaataccatagatgattctgaagattgcgtattttctaaagagagcctcaacttacaggtttcctatttcaaagaagctttatttttgattgaagattttttgccacagggtatgatgcattattttactgaattcttacgatactgtcaccagctttgaaactacagtttttatgtatcaatatttgttttctaattcttgtggcattgttctataataggttatggggagctgatgaaatcagaatctggttctgcggaactaactaagaagggatatatttcttctaaagtggagtcactgatcaacattttcaaatcgtttgggtaataccttagtccacttaagatgtttattctattcttttgtttagtcttttgttcgtacaaagatacatttacatgtgttgtctctacagctcgtcagaggaagtgctttgcatgatttttgtagaaagaattacgacagccaaagctgttgaaaggtttatgagaggaaatgtgaacttctctcgtttttcaatttcatacttgactggagggagtacatcaaaagatgctttgagcccagcagtacaaagatttactttggatttgttccgagctgggaaggtattatattttgctagtgcaatttgattggaatattcaaatgatatactaacttttatgtcaatttataggtgaatttgctttttacaacagatgtcactgaagagggtattgatgtacctaactgttcctgtgtgatacgttttgacttacccagaactgtttgtagctatgtccagtctcgtgggcgtgccagaaaaagcagttcaagttatgttcttatgattgaaaggtaaaacattgccacatttaattaactttttttttgatatgggctgtttagctataaaaaagtttatatggtcaccaatattttctcccttcctgagttacacctgttcttaaaccttttcttatatgcttggtctggaactttcaggggtaacttggcgcagcaggaacacatatttcgtataatacgaactgaatactatgttaaaacctttgcactgcataaacaaccaaatactccatcacttgatttgcctctccaagagaagtacatataccatgttgaatcaacaggagcaactatcaccgcagaatgctgtgtcaacctaatttataaatattgtgagaagcttcctaaagataggtatgcttgtgcttttaatctgcttatgttcgttgatctgcaaagggcaggtcttgtgctgtggtgaagcgaaagggcttctaactgagttcgttaggtggtataagtagaactccccaggtcctgagttcgacatcccgtgggagtgaattttaggctggggttaaaaaaattccctcatctgttccatgccaaagcacaggcctaaggcctggtctcggtcgttctcatatgggctacggtgtcgttgtgtatgtgtgaggtaggttttttttgcgctgtggtgaaagctgtctcactgagtaatcaggttgtgggttcgaagcagtctctcatcatttgcagggggagatggcttgccttgttttattaatccttcctcagatcccactcatgtggagcccctggcactgggtctgcctattttatctgtttgttaatctctgtgataacaggaaacccagccatattataatacaatcactatatctctaacactctgtttcaacatatgcatgactgttatgcttaaactttcatttggatttgttcctgttatgggtagtatttgcatgtgggctgaaaagttgatcaaactgaaatgtcactcataatggaataactacacctcctaccccatgatattgctgtattttcgttgcataaacatggtgcttcacgataggattcctctccaggtattacttgccaaagccttgctttgaggtgggtcttaaggatgggtcatatcaatgtaccttgacaatgcctcacaatgctgcatttcgaagtatagttggtcctccaagtagttcatgtaatttagccaagcagcttgtatgcctggaggcatgcaagaaactgcacgagctgggagaactcgatgatcatctagtacccttgactgaagagcctatggatattgatacagacacaacagataaaaaatgtgtttctggaccaggtatggttctaatgtctttcaagtgttgcttcgtgcttacatcaatgttttattgagaggaatacctcttcatatatttagctctgtttcaacaataaaatactgtacagtgagtgagtctgtttatagtggttgtgactcagaacgggcatgaactttttattttttgacagtgccattattcttggggcatggcgcttatggctacaaaggaaccgggtcatctttgatggggaatctctttccataagcataagcaaagtgcaaagaagttttttagatgagttagtttgttgggtgatggctggagcgaaacatcttgggaatttaggcttagtgggagctcttaatgtcattgtcatcgggtcgagttagattctaatatgtaatagttcttttgtgtgtgtggttttggggcctagcatgccccccccttctagttgtaagaccgtttttctcctctctaatatataaagatgcgcagctctcctgcacgtcgagaaaaaaagatagaacttgatgaactagtggtgattgaatctgtttgtttccttgcatggtgcatcatatttacttgtgccgaaactctcttcatatatgttgttatctttgtgaacttgtttattaagaaaatgtctccagaccattgaaccctgtcacctttatgtaactatctctcatttgttatctttgacatttgattgagcaatcactgaatacttactttgcaaatggaagttggcagtagcattcccatgaagtattagcaacagctacaagtgtttctccttctgaagaagattttatatttttttcatgcccttgccctttcaccattttggcaggaacaactaaacgaaaggagcttcatggaacgataaatgttcatggtctatctggaaactggatccatgaaagtgaaactgtgattctgaatgcttacacatttgattttcgttgtgatcaagaaggtgaactttatgctgggttcgttctcttaatggaatcagtacttgatgatgatgtggcacgttcagagatagatctcttccttatacctaataaaatggtgtacaccaccatgactccttgtggaaaaattcaactgaacaaagagcaggttattcaagaaaccgcaactcctgttgctagatttctttttaagtttaccagtggcttactttccttagtttttttgtcagctgtgtaaaggaaaattattccaagaattcttcttcaatggtatatttggtagattatttcatggttcccgaacggatgaactgcaaagggaatttattttcacaaaaggtcatgaaatacaatggggctcagacaacatgtacttacttttgcctttgaggaactcttcacagatacaacatgatccaaacatatactgggaagccgttgagtcttgctctggtacagtagagcagttgagaaatttgtatctagaagatggaaatctcaaccatgaaaacttatgttcacataaaagaagcaacaagggagaagacatcattcatctggccaataaatctcttcatttttccacagtcaaagattcagttgtactatctcttcatactgggaggatctattctgttcttgacttgattttagataaaactgcagatgactcatttgatgagatgtataatgggaaagcttcaccatttgcttcatttgtggactactaccatcaaaagtagttgctcatttttaattttgtcaattcaaggatggatccactatgttatgcttgctcactaatttctccgttctcaactatatgtaggtatggtattgttattcaacatccagggcaacctttgttgctgttaaagcaaagtcacaatgcacacaacttacttttttcaaaaatgaagtaccaaggtactgtagtctcgatgtagtagcattctttccttttttctgttgcataatttgagatggtaattgtgttactttggctctgcttttacatggtattccatccaatttatggcagatggttcaactggcaatcctctgctcgtagaaaaagagcaaattcatgcccgagttccacctgaactactcatccatattgatgtcgcaactgatattctcaaatcattttacttgctcccttctgtaatgcatcgggttcagtctttaatgttagccagccagcttcgcagcaacattagttacattcaacgcataccaagttctctggtctgttctctcatggtattacatattgttttatttgttaaggatagtaatgcatataatgacttctcttcatgctagattttggaagctataacaactttaaggtgctgcgagtccttttctctggagcggttagagttattaggagactcagtactgaaatatgtaataggatgtgatctgttcctaagatacccaatgaaacatgaaggccatctctctgatatgagatccaaggcggtatgcaatgcgacactgcataaacatggaatatggcaatccctgcaggtagatgctttcaagcctaagttcatttgtgtgatcattttgctgaagttcataaatggatctgtcaatattcttacatcataattgaaccagttttgtctgagagtgacaccaataattcattgtcgtcatttaacaaaacttggaatttcccagaaggtttatcccgaaggaataagatacatgctattcatgctagaatggatagactaatccagttagacattttcatgttctgtgctacccatctgtagtttcctattataggcctaatcacttgtgtcatcttttctttgaagtctttcctttttattaggtttgtttttatttaatgtatatctactaatgctttcagggttatatacgtgatgctgcatttgaccctcgtcgttgggttgctcctggacagatatcattgcgcccttttccttgtaattgtggaatcgaaactgcatttgttccttttaatggaggttatatcagtgacgatccatcttttgttgtgggaaaaccatgtgacagaggccacagatggatgtgctcaaaaacagtatctgattgtgttgaagcactagttggagcatattatgttggtggtggcatcgctgctgcaatttgggttatgaggtggtttggtattgatgtcaggtgtgatatggaactagtgcagaaagcaaaatataattctaatgcatctcgaatgtgctatttatcaaaaataaaagatattgaggaactggaagcaaaactgaagtacaacttctcggtcaaaggccttctgcttgaagccatatcacatccatctgtacaggaattaggagttgactattgttaccaggtcagtgaagcagagtttcagtacattagtttattgcatttaagtcacattgatatacatatcttaatttctgatttgtaacagcgtctggaatttcttggtgattctgtgctggatctattaatcacacagcatctctatgctacccacactgatgttgatcctggagaattgacagacctgcgttccgcttcggttagtaatgagaattttgcacaagcagttgtaagaaacaatattcataatcatctacagcatggatctggaatacttttggaacaagtaacagaatatgtcaggtccaacttggagtaccatggtaaagagaatcaattccttcaacaagctacatgcaaagcacctaaggttagaaaacttagttctacttctgtttgtggattagcagcctatttttctttattgtatttttatatatttgagtgaataacatggagctctcctttgtgttcccattaaaaattgtgctttcattgtttgttcaatatttatctatttttactcagcaacgtagaactttccaaggcataggaagctaattttaatttccttgcacaggttcttggagacatcatggaaagtattactggtgcaatatttatagatgtaaattttgatgttgatctggtttggaagattgttgaaccgttactttctccaatgattacccctgataagcttgcgttgccaccttatcgggagttgctggagttatgtagtcaccttggttgcttcatagagtcaaaatgtactagtgaaggagaagagttaattattgagatgaaggtgcagttgcgagatgaacaactgatagcacaaggacatgacagaaatggtaaaaccgcaaaggcaaatgcagcagcccgaattttggtcgacatgaaggtatatcttttcaaacagaaacaaaatatcaagaaatgtctagtttaaggggttgggcaggtccattgtgaaagacagtgtattgggtaaatgttgaatgattaatgggagcaaaggctcgtctacatataggcaaggatgttcacaggaataggaaactatcctagacaataggaaactctcctagacaataggaagcaatcctagacaatccaatcagggaagatccttgcctattagaaccaattaaccaaactaggggacgacgcacaaggcaacatgcctgtgcagccgcactaccctaaacccaagggacctgcctaacatagcccattttaacacccccctagtcagatcgtcaaccactgcacaagttcaaactggtcctgaattcagtgaagactgatggaggcccttggtgaagatgtctgcatactgtgatgtcgtcggcacatgcagggcatgtagatcaccagcagaaacccgttctctgacgaagtgaagatcaatctcgatgtgcttggtgcgttgatgctggacggggttggaggtcatgttggcagcactgatgttgtcacagtacaccaatgtagcttgacgaagagggacgtggagttccaagaggagctggcacaaccatgtagcctctacaactccgtttgccagaacgtgatactcagcttcagcactagacctcgagacaatgttctgacgcttggaggactaggagacgaggttgtcaccaaggaacacatcatagcctgaggtgaacttgcgtgtatccaggcaatccacccaatcaacatcagtatagaccacaagatcagtcgttgtagatggtcacagcaggaggccaaggtcaagggtgccacgaatgtatcgaagaatcctcttaagtgcagcaagatgtggtcccaggagcatgcatgtcaagacaaacttgctgaacaacataagcaatatcaggccgagtgaatgtgagccactgtagtgcaccagcaagacaacgaaaatccgaggcgccagtcaccggcgcaccatctgctgaggcaaccttcgggttggtgttaactggtgtcagacagggcttgcactctgacatccctgcgggctcaaggagctcgaccatgtactgcttctaagaagaagaccatcgtctgagggctgaacatgcataccaaggaagtgatgcagcacaccgagatccttcatggagaactcctgttgcagggctaagatgatatgacgcaggagggcagaggaggaagcggtgaggacaatgttgtcgacatagagcagcaaataagcaatgtcggatccacactgaaagacgaagggtgacatgtctgacttggcctcaacaaaactaagggagagcaaatatgtggcaaatcagttgaaccatgcgcgaggagcctgcctcaaccatagagggacttgttcaatcgacaaacaagatctggatgtgtagggtcttccaatccggatgactgaatgcagtacacagtcttggacagagtgccatgtagaaaagcattcttcacatcaagctggtgcttaggccatcgctgggatagtaccagggagaggattgtgcgaaccgtagctggcttcaccacaggactgaatgtctcaaagaaatccacacttggacgctaggtgaaaccctgaagaacccatcataccttgtgccgctccagtgtctcgttggcattgaacttgtgcttgaagacccatttgcatgtcaccacgttggcatgaggtgaccgaggcacgagatcccaagtgtggttatgttgaagggcgacatgctcttcctccatggcggcatgctagctcggatcagcgaggccaccacgataggtcttgggcaccagggagagttgtgcagcatggaacagggctggaacgcgaaagccacgcttagcgcgcgtcgccatcaggtgttggttggtcacttgctggacatcaacaacacccttgggaagcggtgctggagacggtgacgggagcgctggtgctggagacgatgctgttggcgacagaacaagatccgtgggttcccggcgcatgtagacattggtgatgacgcgcgccggagcctggagaggtagaaagcctggcggtgagccacgcgtggcggcgcccggggacatttacgccgcgcggggcgctgacgaaatgcaggcggggcatggggacgcaacaggcgatgacgacgaagtctacaaataatgtgtgcaattgttaaggatgaccaaataatatttataactagacacactgacaaccagagatgtccaaaggttgcaatgtataagatcaaacttattagatgcatgagaggtagacacatgaaagggcaggtgagcatagcgccctagctgacaagcatgacataaagtggaggaatctctaaatgaatggagacactagacgcgagcttcgatagagcttcatgaccaggatgaccgagatggcggtgccaaggggggaggtggccttggcgacaaaagattgagctggaggaaggtgtaggggtacaggaccctagagctattgcgcctgatgatcatgttctgagtttgcagatccttcacagaacaaccagcatggtcaaactcaacagagcaattgttgttgatagtaattggcaaactaaaataagattcttaataatttgtggagacacaaggatattattaagaaataaagagtgagataattcagtacagccagtgtcaaccataggaagcagggagccattgccgacaacaatggatgaaggagtaggatactgcagggaaaaagtgtgtgaaagattgttgtaagaagatgtcatgtgggaagtagcacctgaattgaagtaccactcggtggacgggggttgctgcagcgtctccgtgctaaacccagaggccagcgactgattgtccctggagggcaggccgaccatggggtgatagaaccctggcggagcccattggtccccttagttggtgcagaaggagcaagagcagcaggtggctgctgctgggcgacgaaggcctgctgctgaggacgaggctgggaaattggcgacagaggaggacgtgtgccgggccacatgtggatggtgcctatccacgggttgtagaccgatggccaagggccagccgccggcataacatctttggtgtcgggctgctgctacccgctgttgttgctgcctgccgctgtcgtggccaccggcacgcttgctgcgactactgttgttcttggagctgttcccatggccacccccaccccgcgagttgaagtcggagagctgtgggggatgttgcgaggacttggtggcggcggcaagagcgacgaccataagaggccgctgatttgccagggtgaggtcatcgcagacgtcgaggtaggaggggaagggtcgagcgtgacgaagcagggcgccgacatgggtgaagcgctcattgaggtcgcgaatcacattgaggatgagggtgcggtccgagacgacttccttgagggcaccgaggtcgtcggccatcttgaggcggcggtagtactcggcgatggagatcgccctggacgaagttgtgaaaccttgtctcaagctggatggcgtgtatctcccgtttcccaaggaaccgaactcgacggcgagccaggtgtcccgggcagtgccaccctgggaggagacaatctcgacaaggtcgtatgtgaggcagtcgaggttctaggacttgacacaatccatttgatcccaatccggagaggggaccagggcgtcgaggtggacgtgatcctagagggagaacttgccgagggtcagtaaaaactaatgacgccaacggttgaggtggccagagttgacgttgaggacgatgtggacgaggctctggatgttggtgacaacgacgaccttggcgtggaggtggagggcggcggcctcctgcagtagcctggcgccatggagatccacaggcgtgggcatagaggacttgtccctgtggagcggggggcaagggcgatgccagtggcgcgagcctcctcctctgtcgcggcgaggcgggcaagggccacgtcgtaggcccgctggcgcttcaaggcgacgacgctgaccatttccgtggcccggcgggcggcgatctcgtcctgctggacgtgggtgtggatggccgaggatgacgagtcgacgaggccggcggtagccgccctgggcggtgtcgcccttgggcgacggaggcgcaatgccgagcatggcgctgcacagcagggagggtggcgcgcgggcgctataggtcagtaagacgggcgctgcacggcagagaagccgacacgcttattggggcggaagcgaagaaatccgatgtggaaccctgacaattgataccatgaaagacagtgtattgggaaaatgttgaatgattaatgggagcaaaggctcgagtacatataggcaaggatgtttacaggaataggaaactatcctagacaataggaaacaatgaagatccttgcctgttagaaccaattaaccaaactaggggagggcgcacaaggcaacatgcatgtgcagccgcactaccctaaacccaagggacctgcctcatatagcccatgctaacacattgtgatgctaatgggtagttcaacttcaactacacaccttgggtgtaactttctattctattgtaatgactgctttggcagtagatgctactccttcctgtcggaaatccatgatggtttgaaccggtggcttgaactgtaggcaaaatctgcctctcgagcgtcatgtatttttttgaaaggatggagtatgttttgctgactattttagaactggtttaatttttttctgaatgcagaaacggggtctctctcttaaacaatgcatctcgaaggctaatcaattggatattgtctcttcaaaactgcaatcagaattgacaaatgtaagcttataaagtgtttcccacaaaatggtacatcaaagtaatgaacttaattctgattctctgagtaatgaatagtatcgcatctctgtagttggaatcgcgacatgattgtcctcacatgaatggcactcttagcctaggtctttcctcagcgagagcagcaggtaatgccctgttttggttaattactctccctctgttccaaattatagttcactttagatttatcttaagttcagtttctctaactttgaccaaatttatagaaaaatgtatcgacatttacaacatcaaattagtatcattaaatccttcatgaaatatattttcatagtgcatttacttgaacctgaggtattaatatagtgttattaaaacttcttcaaagttagggaagtttgaattaagacaaagctagaatgaactatgatttggatgaatggagtatatggtactcactggtcagggtatcaaataggaaatattagtaattagatttgttctatacctagctctagcagccacaaaatacttagcattactcagatgtcatggcctttcatatgctttcagttgttcttcctctcaaaatggacaaaggtggacctcggactgcactttttaggctatgcaagagtttacagtggccaattccagaatttgaatttgtggaacaaaggtttaggtat

SEQ ID NO: 679 - DNA, 6460 bp, Zea mays
  source 1..6460: mol_type = genomic DNA
cacgtataaatggcccatgttgcagggtcccacttgtaagctgataagagggcagagttgttagtgtgtctgtgtgtgcttgtaattaatcacgctgtaatgacccaccataacccccaagggagaatattccagggataacataggtaaccgagggcacaatcgtctttgatagggtagagttgtccctcggttacctataaatacccccgtacagtccattgcgggggacggaaaaacagtgttgccctaatactctgtgttaaacggcatcaaactttttcctgttctcccactgtttgagcttggctgaccacgagttagcgagttctaacagggggtcatggtctgaattattggagctagagtccaagagctctagtttaggtgactaaaagttaggtgatgctatgatgacagaacgatgctataggtgccaaacttcccacgggtgtcgtaccaaacacactaggatatcaaaagtacttgacgaaagattgtttagggagcgaggagtgaaccctaacaccgtgaagtatgcctactaggtcacgacattttgagcctaacacatagatttttatagagtttcgagtcgtaatatacgtcctcttactgatcatggattagcatatatatagatggtatgtaagattgcaagcctaagatcaggacagatagctcctctttggaggggagtagataaggcaagctactctaacacttttgttgccgcctttgtccgattgtcttttaggtctcccgacttagctttgatggatactatttgagatataaacgataaactaaaattaattatatatgtgcgtgagtatcaaaatatcacacaatataataaataatttaatagtatattttatgtaaaattataaaaatcaatttagatctatcatgatatacccatgacaaggctattctcggtaggagtttgattctcattaaatcataaagccacataagcaaacagaatgacatgtcatgcaatttaataaaaagaagtataagagaattttatatggtgaaactttgaatacattgtttctaaataaatattgatctgacagccttaaaaacggtgcataaaactatatctacgaaaatgatctaattataataaattaaatactagtatgctatattggtgacagctagcacactaaatacgtgacaactatagtatggttggtggcagcatctctgccaccaccatcaataaaacaactttttttctctttattgcattgagagttgggctacacccctaattatgcgttcagccgtgtggcttccaaagctcttcgggaaatgctctccacccgagtgaccactgatcagccgccacacgggatctttcaacccctacggcctacgcgtacctgggaccgttcagcaccgtctcgctgacagacatgacacacatgaggcggtccctacaaatgctagtggtgtacaacaagtgacgtgcccaatgcccgtgcagtttggcgggcgccgcgcgtatgtttctcgttgcgacttggaggagaaggagattcgccgtctcaccccttccctgcctgctccctcgtctaagaaaagcgggcagagcagagacggcggcggcaggccatcgcggactcccgctcaccctcgtctgccaccgcctcccaggtcaggggccgacggcgacgggtggggaggggcggcagaggtagtccgaggggaggctgtggagcggagggcggagagaggccacgccgtccggagtctccagttccgtcgccacagcttcctgccgcgcctgggccgaggtaaacgagagggatcgaggaagaagtatcccccggagccccttcccccgaacccgaaggctccggaatggcggtaagactttcctttctttcccatgcttttctttgctgtgtcctattccatatactgtgaggggatgatctctcgcgccatgaattcttgatgctcatagtctggtccgctgcgcgttagagtggggtccctgatgtcgcgacgttgggttttgttcctttctgctgctcaacataggggttttcttaacactggatcgagttagggacctgcattttgggtgttatttcgggttggatgatggtttcgtcctactgttgctcgatgtgcctgatgtcttgttcttaatccgtgtcacagcactgggttagcgacagtgatggcagtgacaactttgaatgggatagtgatggcaatggggaggagccagcgaacttcaatgctgctggtgccggttcatcagctctgagatcaacgaacactgatgctccaggtccatcaacacgggtaatccatctaactgatccgtacatatgctactatatgttcttcagttcatgttactcagggatgttcaaaccacttgtgccaacctggccggggtgggggtggatacatatggtcatcatgaacataatcaggatcatgattagcgtacagcgacacgaacactctcaatgttattgttaccttgtttgtagtggctacgattgtaatgtttctgtttgtttgtggggctgcttttaaggttgctaatggcaatgggaaggctgggccatctgcctccttggttcaaaagtatatggacatgggtttcacggaagagattgttcggaaggccatgaaggacaatggtgcttacccatttcttctctatttagattccaggtgatttatatactctatctcacagctgccttttctttcaggggataatggagcagattcattagttgagcttcttcttacttaccaggtatccatttgtgttcctgcttctatcagttattctttgatgattttgcatggtatcaaagaggatttttatttacaaagtgatgccaagtgcaggaactaggcaatgacctcaaagtggataacggcttcgcttctggttgtgccccccaaactgttgatgatagtgatgatgacgacattctagaaaactgggatgatgaggatgctgatggtgggagaagcaccagggttgctaactctattgatgattctgaagacgaggtattttcatgtgcccccttggtgactgtattcgtttactttattcttttgagaaacctgctatgtatttactttgcttcaataatatatacttctgcattaaacatgtttaatgttaatccagtaagtagactaattaccccgaaaaccataacgttccttacttttacttgcacatgttcctttgttttcaaacagctgttagctacatagctgtgctataaaggcaatctatttttgtttttcccttatatttttggacaactgagttctttgggccagaacagcatgttccaatgaaaccaaaatccttaattttgtaagaaaatcttatcagtaagacggtgggcaagatagttgtgtccatcataaacttggaactgtttcgtttcatcttatgcatatgaatagaactctcgtgttagtgatattcttgaacaaggcaccactgtggactaacaaatgaaattccaaaattgtgggtggttcgttactgatgataatcttatcttgtatgtggcattaatttctttttacttaagtttgctgtaccccctcttccctgtaacagcattctctcctactgttttaattcaaaaagaaaactttaggtatgggttattatctatttacattttggtatttatgcaaattgattagtgatcctgagaatttgaggctccgtagtgcaacaacattcttgttcgactctaacatggaacttgcatactttttggtgtttggcatgtgacttcatgtagctgagagttgattgaactggactacagctggagttccatttttttacgcagtacatttgtttttctcaataaaaaagctaattgttttccaaacttgtccatagttacgttacttcccatttctatacacattacaagactcattgtttttgtcctttggaaggtaattgcaatgctagtttatgtagcttgtcaacacaggatttctcagtgctctcctgtgctttcaacacaggatttcttaaatgagatgtcacagaaggacaagaaagttgattccttagttaaaatggggtttcctgaagacgaggctgcactggctattactagatgcggtgtgatttctgagccttttttccatgcccctctgtttgccttagattcgtcagcaaaataaacatcaatttccaacctgaaagtaggatatgctctcacttagaataaatctgttgaataataacattgccatgtttaattatatgccaaacattctattggtttatctctggattctgagaattttcctcaaatgctgtaagttggaactcgtaaactggctgcaatcttgaactgagataacctggaatggttgattctttccaagcttgatagactgattgcacctggttaaccagttataaatctgaagacaaatcagttaggcatgcccacaataacttgtagaaagcaaggtgtatgataaatattgtttcttagaagaataactgggattttaggaacttatccatccaattagtagatgtaaacctttgattctatgaataggaagcatccggatgctcaattcaaagcaggcaaccaacagtttattaatttttttggggtcagaacattttaaatgcatttgttgtcaaataaaactgttttttgcatgcaacttgtagaactcaggttctgtccttgtctctgttttattttgagttatcttcagagcttgtggtttaaaactgtttttattttaagtatgctccaaacgcccctgttcactgatcatgcaccttattgttgtccgtggtttaaaattactcagggcaggatgcatctatttctgttctggtggattccatatatgcttcacagaccgcaggagatggttactgtggcaatttgtctgactacgaggttcgttcgtcttaggtgacctgcccatacaagtctgcaataagatttagttcaaatttaatggtctgatgatggaactgtgtttgcaatactgcagggtaattccaatggagggagaaacaaaggaaggttcatggacgggaacaaaaaaaagagaaaaagatatggaggtcaagcacagggaaatagaggcccattagatggtagctgtgaagaacccatgcctctcccaaatccaatggttggatttaatttgccggaccattggacaagaccagtagacagatcgctgcctacacaagctattggaccaccatacttctactacgagaatgttgctcttgctccaaagggtgtctggactaccatatctagattcttgtacgatattcagccggagtttgtggactccaagtacttctgcgctgctgccaggaaaagaggctacatacacaatctaccacttgagagaaggtcgcctctcctccccttacctccgaagacaatatttgaagcatttcctcgtaccaagaggtggtggccttcatgggacccaaggcggcagttcaattgcctccagacttgtacgtctagcgcaaaactgttagagaggattcgtgtaacccttgcaaacagttcggatccaccacctccattagttcagaagtttgtgctggaggagtgtaggaaatggaatctggcttgggttggcctaaacaaggttgctcccctagagcctgatgagatggagttcctgcttggctttcccaaggatcacaccagaggtatcagcaggacagagaggtaccgatctcttggaaactcgtttcaggttgacactgttgcttaccatctctcagtcctcaaggataggtacccacaaggcatgaacgtgttgtctctattcactggcatcggaggagccgaggtggctctccataggctcggtatacgcatgaacacagtcgtttcagtagagaagtctgaggtgaacaggactattctgaagagctggtgggatcagacacagactggtaccttgattgagatcaatgatgtgcagacgctgacagctgataggatcgaggcatatattagacgaattggcggctttgatctcgtgataggtggaagcccatgcaacaatctcgctgggagcaaccgccaccacagagatggcttggagggcgaacattcttcattgttttaccattattttaggatcttggactccgtcaagtccatcatggagcgcctgtagtttttagaaacttttgatgttctggttcgtagaattgtagccgtctttccctgtgatcaaacttgtgaatgatttgaaggtcgactggtgtaatattcatgtcactctaatttaggctactttcgttaattacctcttgtgatcaatgcaaattgaaaggcaggtttcatttcttaagtttgtatttctcaatgcgagatctagtatctttgtcgaaaaaaaaaacctaaaa

SEQ ID NO: 680 - DNA, 7300 bp, Zea mays
  source 1..7300: mol_type = genomic DNA
aatacttgcttcacaaaccaacaagacccttaattttgttagttcaaaattgtattgttttatgatccggctctaacttgactcgatccttaaatttgctaggctaaattaaatggcccgttaccacccctagtcacaagccacctatattctccagctctctagatcctttacatgctgatgattggctgaaatcagtggataagatgcttaatattgctcaatgcaccgatcgatagaaggtgctctatgctttgggtcgtctcactggccccgttgctgattggtgggactcctacagtgcttcccatgccgctgccaacactattacgttggcagaattttctacacaattctggaactatcatattcatgcaggcttgatgaaaattaagaaggaattcttgtcacttaagcagggcaacatgtcagtcagtgaatatcgtgataaatttattcaactgtcaaggtacgctccatacaaggttgctgatgatgaaaggaagcaggagcatttcatggagggacttgttgggccactttagtatcagctggtatgtcacaccttcccatctttccacaggcttttggacaaggctatacacaaacgtgtttagatcagcgagatgaagaggaaggctatcacccaggggcaggggagcagtaacacccgtcctcgctatgtttgaccctagggtacacccactcgtcctggaggagggcaacgtcctgctcagtatacaccacatgcgactccacagaatccacatactcggtaggctgcccccactggcaccccggtgagacctgctggacagggtacagtcaccacttgcttcaagtgtggtgaggttgggcactacgccaatgtttgtccgaagaggatcccaaacacacccgctcgaagcaacatttagggcaagcaacaaactccagcttcaggcaagtgattcagtgttccgcccctgtgcagagagcaccgccgctgattcgtgttaagtgattgacgccctaaaaaggtgtcaacattcagcatttgataaaagtttgtaattttaacattacaatttcctaaagcttctaatgatctgctttatcaactttactgaattctatgaagctcaagcagttctaaacatagcctaaaaattaaatccatattcgagaaagagaggcatacatatgttccatttgcttctcaaaaatactcatgttccattttaagcttttaaccatagctttgattagaaaatcacatgaaatcttttggcgtaccttcattttctcgaaatcttactgtaagaaacattttacaacgaatgatatatgctgcataaaacgagaggaaaataaggggaaaaaaatcttgcagacgcggaaaagagctcctggaatcccggtccgggacggggacgggctcccaaagcggtgggaacgtcttttccctttcttctctcccgcgcggctgcgctcccccagaccactctcccccgtgctgtactgatgtggcctgtggcaatgcaggtgtccgtactctgcgcttaaatcctttccgggtggagttcttgcctttctcgccgcttccgactctgccatgccaccatagatccagctagggcgttcaatcctgtgcgagagtacgcgaaatcgccgccggattgatattgaccaggggtttctccgcccaactgaggtttcgctgccatttgcagggaccgtgctccagttcggcctttcgggggaaaaggcgagtcctcccatttcctcttttttagatgcatgagttgacgaacatttgggagaaacatcccctctttaatccgaaagattcgacaaagaacggctgttcttctgagcaggaatcgtatctgctgaatccccgggctccggggatggatcttgacatggacggctacgtagacccctacgaggaggccgcggccgagggcgactccgacgaccctgacgaggacgactcggatgcggagagcgactacgaggagaagtcgttcggcctcctcaagtccggcaagcaccgggtgcgcaacccggacggcaccttccgctgccccttctgcctcggcaagaagaagcagggttacaagatcaaggacctcctccagcatgccgacggcatcggcgtctccagcaagcaccgacgtcacggccgcgaacgcgcgaaccaccgcgcctttgcacgctttgtccgcaccgatccgtcctttgcggaagacctcgtcggtataactggcattcaaggtgccattacaactacccctgctaatgagaactacagcgccaatggcaacgggaaggccaaggctaatgtagatactgctggttccagttctgtggcggcaaaagtgggtccgccacaggaggttgagaggtttgcttggccgtgggcttgtgttcttgcagctggggcaggctttaatgctgaggactttgttggtagagtagcattgttcagttcggttgaggttgtgcctttgtttgtcgatgagatggaagtcacagaaaccttcgcaattgtgaggtttaccaatgattggagtggattcaatgatgcacttacgatagagaactatttcagcgtcaataagcttggtaagaaggaatttcagatgagagatagtggtcttggttccgtggagggagatggcgaaggcgatgtcaaggtttatgggtgggttgcccgagctgaggactacgatgcaacgactgtggtaggaagattcttgagaaagcacactgtcctgcaaacaatagacgaggtttccaagactgaattagagaaatcaggggagatggtggcgatactggcatcccagatcgaggaaaagaaccgatacttgcaggatttggagacaaagaagaatgcgacagaactctccatctcaaggcttgaggaggacaacaggaaacttcatgaggcatacaatgaaggtaatctgtgcaaattgcctcccttttcctttggttctacttatggtatagagttttcctgcatgcttgacatgtatgtctagagcatattcacatatgttctctgtcttgtactttacatttttatatttttcatggaagtcctgaaactatttgtttggtttttgttccctctttttatattgtacatggattatttggagaaaaagaaattatgaattggttagatgaatgcaggacttattgagataacattatgatgcatgaagttattccttgtcttatatgctttagcattatatttatcagtaagacaaaacaaaagacttacctgatgatagatagatactagacgctgcaatgaaggaaaataggtaatagaccaactctgaaacttcatattgatgtgaagttcctactgaaactgaaagtaaataaatcccttatgacctagtgacctcatctaaagttctaaacatttaaacaagcaaactcacagttactagagagtagagacctagagcagaagatcattgtccagctgaaagacatcagcagggacagcagcagctccccctccaactaattcacattcatcttggtccatatttgttgttgtttctggtggtggtggttcagctggttcagtagcatcttcatattgattactgtcatcttcaccaagaccttgagttgctgtgtttctggaaagtttccttttcctaacatacgttctttaaggctgagaagatgaaccagcacctacagcagtagccctagaaaaatttctgccccggacttgcacctaatttggtctggtcgaattgctccctaatcggacgatttaatcgctctagttggacgacgagaggacctgatcgaggcctcctcctagtcgaggacctgctggcgtctggcgaccagaccgaataactgagattagttggacgacttgaaaacagagtttttgagtgcttgaatttcttggctttacaaaatcgacaaagcaaattatttcggttggaagtcatttatcatgtaagttttatatcctcttcatttatcttataagttttatattctctcttcagaaatgcgcaatcttcatcgcagggctcgtgaaaatgcgctacggattttccaagagaatgaaaacttgaggattgacttagaaaataagaggagagaactgaacttacgagctaaggagcttgaaaaaatgtcagctgagaatgctaacgacaggaagacactcgatgatcagaagcagaaggtaagctaaacaactatacaagtgaaggactaagctatgcatatataactgcttctgaggtattatgtatatgatgctctgatatggatttatggggggtgtaaaaaacattcttttatttgagtgtctgaatgattaataagataaagaatttaggaagaatattctcatattgacgcaatacaaagataagtatatgcaaaatcgatccctttttagttaaaggaatttaattggttagcataaaataatatctaataaatagaaaatcgaatagtggataatccgttatgaaagaaatggaatacattctttgaagaatcaagattcgtaatcaatccttgtcttgtttgttggattaggtctaattttcttgaccaaacagcaagcatggaactttacaagaagaacttaaaagaaaagggtaattgaagtaactttgaatccacttttgttggggttcaaaaaacgaataaaaataaataaaaaaagtaaatttaaggaatagttccctttttgagggggcccctcgggggtcgtagaatgcttttcttcttctcttattccatatggaatacaatgagttcaaatttgctccaaaaagaggatgaaatccatcctattaaaaaagaaataatccgaatccgaaatagaaagattttttttttcaaattcaattctttatttatcttttattccaaaattctcccgaaaatccaatttcatttttcaatggggttagatgatctagttcttatgaattatgaattttccataacttaaacttaggtaagtgctttaccaacatatgtagtgtagtaaaaaaaatggaattgaaccccttcatgcttactataactagttatttcggttttctactggctgctttaactataaccccagctctatttattagcttgaacaagatacgtcttatttgaaatgaattgaatgaatagaagaatctttcttttggattcttggtattctagactcttttccacactaattaccaattcttttcttggtcattgagattcgtggatagtttagactattatttagagatagatcgtacctctttttttatcccctcgaacaaatcgaaatgattgaagtttttctatttggaatcgtcttaggcctaattcctattactttagcgggattattcgtgactgcgtatttgcaatacaggcgtggggatcagttggatctttgattgagtaatatttcttttttgattgacctcctctctggtctggaggaggtcaaattggagttgcaattctactttgttttttttaagttattttagtttcgacataagatatatggaatcacgctctgtaggatttgaacctacgacatcgggttttggagacccgcgttctaccaaactgaactaagagcgctttcaaaacaaaaagaaaaaagaaaatccttttctattccaaaacaaggacttcatttgctattgcaaagttagtttaaactgatttttcatcattactttcactttgacaagggacatattgctattaagtactttatcgtcttaattttatgcacttttcctatggacaccagttttctttctacaacctaattgtgtgcatataaaactaaaattaacagcctgagcatatcaatataacagcataagttcatgctgcagtatcttatacaattttttgtgtttctcttctgaaacatacagacaaagtatgataatagtgaacttgagctagctagcatagagcaacagagggctgatgcagatgttctgaagctattggctgaccaagaggtttgcactttccttaatgttgtttttttaatctttatctatattgtggagatgagaattgatacaccttaataacatcagagggaaaaggaagatgtacttgctagaatgcttcagctggaaaaagagctgcatgagaagcaacagcttgagctcgaagtagaacggttgaatggtacactccaagtgatgaaacatctagagggagacgatgacgggggagatatccatgaaaagatggagaagctgagtgaaagatttgagcgggaaaagaagcgcctggaggatttgagtggtgatctggtgacaaaagagcgtgaaagtaatgatgagctacaacaagcccgaaaagaattgataaaggtacggcccattttctctgttatagtttattttttagtaattaccatgcgtccaacaatctctcaaccaattgatgttcatagtatgatttaaaatggtgtaatgatttgcacaatgatcagggtttggaggaagagctaaatggacggacagctgttgggatcaaaagaatgggggaactcgatgaaaagcctttcctaaatgcatgtaagagaaaatatgggaacaatgaataccaggtcaaagcagcagagctggtcacaaattggcaggaggaactaaagaatccatcctggtatccttttaagatgattcatgttgacggagaggacaaggtacttgcttagtactgttcagctatgtgttattatctttagtgtttatagaacctacttgtatttgctcggaaatcacattcatcctcattcgtcgcaggaaattctggttgacgatgatacgaaactgaagtttctgtggattgagtttggcgatgacgtgtgtaatgcggtgaagacggcattgatggagataaacgagtataacccaagtgggaggtatgttgtgcccgagctgtggaacttcaggaaaggcaggaaggcgacgatgaaggaggtgctcaagtacctgttcagtcagatggacacgacgaccaagcgcaggaggggctgagtaggtgcccttggccatgccgtgaagcccagtcgtgtgctgctcgatcccgtagtggcagtctgtcttgtactgtgtagtgacatctgacgtaataatgttcaggcttgggtatggtttgagctaacgagccatatagtgtgcttggctaggctcgtttacgagctctttagctcgcgagtcaggtgagaacagaaaaaacaatatgtatataataattaatttctagttaattt

SEQ ID NO: 681 - DNA, 5771 bp, Zea mays
  source 1..5771: mol_type = genomic DNA
cacgacccaaactccatttctaacttgaagaacacctcccattctctctcacacatctcttgcctctcccattttaaatctttggagagaaatctttgagtgagttttgagagctacagtttttgtgcttcatctccaaatctctcttgctcttcttcattcgagctttggtactacatcgagttctttgtggattcattactcttagagcttctagctcctagatgactaggtgtctcttgtgagtctccaaatcttgtggaagaccacaagaaagtttgtattacccactcgtttgagcaaagattagtgtgtgagcttgacctttgtggtcggcaaagggaggattagggttgaaagagacccgactctttgtggacgcctcaacgaggaagtagggcaccttggtggtgtgatcgaacctcgggataaatcttgtgtctcttgtgttcttgttcattgtgcttatttgtgttcttcgttctctcaccattccgtgaaagatttgtttatatctttttggtgtgtggattttgagaagtgcccttctcagatctactactttgaaccctgtggatcatttagaacatctcattttcaaagttaactgggtgaatttcgagatcaattcagttttacccagtttgcttctagtttttgttgaaaaagctttaacttgtctattcacccctctaggcaactttcaataacatgtagaaatcaagcaacacacattagattcgtcatagtgaggtatgaaggaccaagataacatatctgaggataaataagcaagcatagatccaaggaaccgatcacaagcataaccatttatcacatcaacacttgaatcaaccatacttgaagaaatatcgtgggatctagcaagcaaccgaccagatccatgtcagaatctaagaagcaaatgatcggatctagcaatcaagcatacttgattaataggaagcctagatcaaaatcaagcaaacaaccaacaaaatatgggaggggaactcctaactgtagagagagttaaatcctcctactataatgatatatagctctcacaaggatcaccatggtgccaagtgctaactagtggccagcctctggctaccggtaaagctatctccaacagattattcataccatatcttatttcaaaatccactttataaacaatacgatctataatgtaaaacatttttttcacgatcatatacataatcttcttgatatagctcaacgctatagtcgcctttgcagatgttccaatatgactggtgtgtcgcagcagaatacgtaatcggtaatccaagtagcggccaacatcctgcatcccctgcctagacgctgtagccgatggccacaagcgagtcacacacgctgctgcaaaagaaatatagttgaaataggaaaatgtggacatatgagaatgacataattttaaaatatttaataacctaagaattgagaataagattacttttatttctttatatttaataatttgctaaatctgagttttttagtaaccagggtagatatgatagtaaagattgttcagctcgacgcaaacgacaaaaccatcttgaaaatggcagaaagaaaaaattcagaaggagccctcgaatcccggtcctaggaaccgtctgtcaacgcggtcggggtacttgagtgcctttttcttctctcacgtgcgcccctaaaccccagtgtgctgtgctaatggggatcgaacgccctgcgcttaaatcctcgggtagaactctcgcctcttccgactccgccataccaccaatagatccagctatggcggtgtagtcgaattcaatcctgtgcgagaaaacacgaaatcgccgctggctcgatattggccagggctttctccgcccaactgcatcttgcagcgactgtgctccagttcgggggaaaaaaaggtgagtccttcccatttcctctttttagattcctggatcgacgaacatttgggagaaatatcgcctctttgcttcgaaagatctgacaaagaacggctgttcttgtgtacgtacaggaaccgtatctgcttgaatccctgcgctccggggcggggatggatcttgacctggacgactacgtggacccctacgaggaggccgaggccgaggctgccgcggcggaggacggctccgacgaccccgacgaggacgactcggatgcggagagcgactacgaggaggagtcgtttggcctcctcaagtccggcaagcaccgggtgcgcaacccggacggcaccttccgctgccccttctgccccggcaagaagaagcaggggtacaagataaaggacctcctccagcacgccgacggcatcggcgtctccagcaagcaccgccgtcacggccgcgagcgcgcgaaccaccgcgccttcgcgcgctttgtccgcaccgagccgtcatttgcggaagacctcgtcggtatcactggcattcaaggtgccattaaacccacccctgctaatagagatggcagtaccaatggcgacgggaaggccaaggctaatgtagatactgctggatccagttctgtggcggcgaaagtgggtctgccgcgggaggttgagaggttttcttggccgtgggcttgtgtccttgcggctggggcagggttcaatactgaggactttgctggtagagtagccatgtttagttcggttgaggttgtgcctttgtttgtcgatgaggtcgaagtcgcagaaacctttgcagttgtgaggtttaccaatgattggagcggattcagcgacgctcttacgctggagaaccatttcagcatcaataagctagggaagaaggaatttgagatgagagataatggtataggttccgtggagggagatggtggcgaaggtgaggtcaaggtttatgggtgggttgcccgagctgaggattatgattcgccgagtgtggtagggagattcttgagaaagcacaccgtcctgaaaacaatagacgaggtttccaagactgaattagagaaatcaggggagatggtggcaatactggcatccaagatcgaggaaaagaaccgacacttgcaggatttggaaacaaagaagaatgcgacagaactctccatctcaaggcttgaggaggacaacaggaaactacatgaggcatataatgaaggtaatccgtgcaatttctctccctttcccttggttctacttgatggtttagagttttgcctgcatggttgacatgtctagccatttctatagcatatccatctatgttaactgtatcttgtaccttgcattttatatattttcatggaagttctaaaactgtttgtttgttttttgttccttctttatattatacatggattatttgaagaaaagaaatcacgggttggttagatgaacgcatgacttgttgagataatattatgtcttatgatgcatcatgcatgaagttattcatgccttatgtgctttagcattaatttttatcggtaaggcaagactaaagatttacctgatgggatgaacattggctacacgtacaaacaaatctctgacctctcccaatctttaattttgagcgctcaaatttttgactttacaaaatcaacaaagcaaacttctctattggaagtcatttatcttataaattatatattctattttcagaaatgcgcaatcttcatcgtagggctcgtgaaaatgctttgcggattttccaagagaatgaaaacttgaggattgacttagaaagtaagaagagagaactgaacttgcgagctaaggagcttgacaaaatatcaactgagaatgctaacgacaggaagacacttgataatgagaagcagaaggtaagctaaacaattttacaagtgaagcactaaagctatgcacatgcaaccttttctgaagtgtcatgtagatggtgctctaatatggatctatggtggtgtcaaacatttttttattttaagcgtttgactttatcctgaaaataaggacttcatagttatttgctattttttcaatggttgttaaaatgatatatcatcaatgctttcactttgataaggatgcattactattaagtactttatcgttttgattttatggcatttccccaaggatatcaggtttctttgtacaatctaattgcatgcccatagtttggtggacatatagaactaaaagtaacaactgagcatatcgttacgatagcataagtgcatactgcagtatcttatactttttttttgtttctcttctgaaatgtacaggcaaaatacgataacagtgaacttgagctagcaagtatagagcagcagagggctgatgcagatgttctgaagctattggctgaccaggaggtttgcacttagcattttttcttaatgatgttttgtacatgtttctctataatgtagagatgaaaacggatacaccttaataccaacagagggaaaaggaagatgtacttgctagaatgcttcaactagaaaaagagctgcatgagaagcagcagcttgagctcgaagtagaacggttgaatggtacactccaagtgatgaaacatttagagggagatgatgacgggggagatatccatgagaagatggagaagctgagcgaaagatttgagcgtgaaaagaagcgtctggaggaattgagtggggatctcgtgaggaaggagcgtgaaagtaatgatgagctacaagaagcccgaaaagaactgataaaggtgctgcctattttctctaccatgcacctaacaattcctctaccagttgatgctcataaaatgattttgaatgatgaaatgattttcacaatgagcagggtttggaggaagagctaaatggacggacagctatcggggtcaaaagaatgggggaactcgatgaaaagcctttccaaaatgcatgtaaaacaaaatacggaaaggatgagtacgagatcaaagcagcagagctagtcacaagttggcaggatgaactaaagaagccatcctggcatccttttaagatggttgaggttaacggagaaaataaggtacttgctcagttctgtccagctatgtgttatctttaatgcttatagaacctctattagtatttgtttggaaaaaaaaatcatatccaccctcattcgttgcaggaaattctggatgacgatgacacaaaactgaagttcctgtggatcgagtacggcgatgatgtgtgcaatgcggtgaagaccgcactgatggagattaacgagtataaccctagcgggaggtatgttgtgccggagctctggaactttaggaaaggccggaaggcgacggtgaaggaggtgctcaagtacctgttcagtcagatggacacgacgacgaagcgcaggaggggctgaggaggtgcctgatgccgagtagtgccttctatgttgttgcatcagtcgtgtgctgctcgatccccaagtggcagtctggcataggagatgcccctcttgtgtagtgaaatctggcacgataaagtgcccgcgatccaggcttgggtatgccttatgcatcatgttcatatgcttgtgcatgtggtgctgttgccgcaggcgccctagcctaacctgtatgattgttgagatgagtagtctttcttgctgctgttactcccttcgcccctcaatgtctctgaataaatcaattcctaaagttatcataaaatcgagcttttttaatcagactttttaaagtttaactgaacttatagaaaagagtcaggatttatga

SEQ ID NO: 682 - DNA, 7898 bp, Zea mays
  source 1..7898: mol_type = genomic DNA
cccacacgcggattcgagaacaagctctatgagcatcttcctccctattgactgtcaaaaaaaagacggtgatgcatgacaccacctcaccttatcgaatcatgtctcccttgttctgttctccaaccatgctgcacacctgccatttgtcatatactcatcaaaattcatataaaacccccaattgtatcaattccaatcccgtactagttaaaagataactatgtggagttgtcgcttcttcccgtaatgtagttaagttagagggccctggtgtggcgctccttcctgggtttgagccttggcattgcaccggtggtgcacccacctcatggctggtggcggtgcagatggttctgtgaccaccaatgaagcgagtgcacatgaggttcttgcctgctttccgtggtttggtgggtccctatcttaatacagtcaaatgtacatctctccttgatcaaatttccccgttaacccatgtggattatgtggtattgagtcgtttaaatccatagcaagtcaaaattcatcacaatccattccaatacactccaatccacatggaattggaataaccgaacaagaccttagttggaaattgagtcattccagtaatccagtctcttacatctgacacaaatatctttcctgagttgtgacaaccagtgttacccagacatctgcgttccttttttttgcggagccagaaaacttgtcggtttccaagtggtgtaccccccccccccccaatttttttttgtcaaactggacacctgcacccgtaccggacacaaatacccgcactagcatgtgtcccatgtgacactggtaaagtatttggcattttgtgttcccatttaccctcccataatggtaatgtcagttgttgcagaatcttacgttataagcaaatcatgtgaattggttaccgttttcctatacacatttcacatgaaccattgggattggtattgcaactatgataacagaggtatgctgagtgttcagtaaattcaagccatttttgaggatctattttgtttctccaagggtacactggtagattaattacataggctctggcattccagtggcttatattattattttttctttctattcttggaatggtcggatattaaactgcctaccttttagaatgtggtctcctgatgcaatattgtggctcatgtagttttaaatttaggaaagggaacactatttacaggctacaactccattttttaccactaatgatattttagaaaaaaaatgaaggtatttctaaatgatctattgtcttaaatattgtctttgttgctgcacttcacaggtctatatttttctagttactgatagcaagcattaacaatcttttgtcatttggtcagtatttattctgttccttaaatctagtcagtcaccctaaccttccttttttgttgattttgtgttttgtctgcatctctggccggtgtgtttttcttttctttctgttcacttttcagtactgttattttaacttttgttcccctatataggcatatatctgattgatatgctgaccaatgatttttcaggaacaagaagatgcagagcaaagccacaaaagaaggaagaggaatccacagaaaacaacaagctggagaatggatctctggatgcaacagaagaggtgcatcatggagtcgaaaaaggtgatggacatgttacccgcaagagaccaaggagatcagcggcctgttctgatttcaaagagaaatccatacgcttatccgaaaaaaaatctgttgtcatggtcaagaagaatcggatggaggaggaagaagtagatgctgtcaatctgacaaaacttggaccagaagatccaccaccttgccggaagttgatcgattttatcttgcatgatgcagaagggaacccacaaccctttgaaatgtcagaaattgatgacttctttataacagctcttatcatgcccatggatgatgatctagaaaaagagcgtgaaagaggagtacgctgtgaaggatttgggcgaattgaggactggaatatttctggttatgatgaaggtactcctgtaatctgggtgtcaactgatgttgctgactatgaatgtgtgaaaccatcaaccaattacaaatcttattttgaccacttctatgagaaggctcaggtgtgtgttgaagttttcaaaaagcttgcaaaatcagttggtgggaatcctaaccagggcctggatgaattgcttgctagtgttgttcggtcaaccaatgccatgaaaggatatagtggaaccatgagcaaagatttggtgatatccattggagaatttgtatacaatcaacttgttggtttggatgagacatcaaacaatgatgatgaaaagtttgctaccctgccagttcttctttctctaagagaccagtgcagatctagggtggaactgaccaagttgccctctaacttctcgaacacaagtctgaaaattaaggactcagagtgtgatgagacagcagaagacgatgatgatgcaaaattagctagattacttcaacaagaagaagaatggaaaatgatgaagaaacagaggggtaggcgtggaacaccatcccagaaaaatgtctacataaaaatcagtgaagctgagattgccaatgactatccccttcctgcatactataagccatttagccaggaaatggatgaatacatatttgatagtgatgacagcatattttctgatgatgtgccagttaggatactcaataactggacactgtacaatgcagattccaggcttatatctttggaattgatccctatgaaatcaggggcagaaaatgatgtggttatctttggatctggtttcatgagagatgatgatggcagttgctgttctacagctgagtctgtgaaatcttcgtcttcctccagcaaagctgaccaactggatgcaggaatccctatttatttgagcccaatcaaagaatggattatagagtttggtggctcaatgatttgtataaccattcggactgatgtggcctggtaagtaccctcagctactttctttcagtacactgcttcattatgtggtcattaattgtgttcttaacagttgtgtcactgtatcctcttataccatttcagtgttattaaaactacgtttaaacgatgtttaaactacgtttaaacgtcaaaactctaattagatgttgaaaccacgttttagcgttttggcgttctaaactgtaaaacgtagtgttttatgcattttagaccattagctacttttgggcccagtctattagttactttcgaggtttaatccagctcatgggtgaagttttggtaagccactagcctctctattttggtatttaacttcatattattgtctgaaattataatgtattggtatttttcctatgttgtttaaaactacatttaaacaaagttcaaacttttaaaagtcaaaatttcacccatgagcgttccaacgttttatcgttttaataaccttgtaccatttgaacatcacttttagctcttttaatctttgctccattacaacttacatttagagttttatttcaggtacaagctacgccaaccaacaaaacaatatgctccatggtgtgagcctgtactgaaaacagcaaggcttgctgttagcatcattaccctgttgaaagagcagagtcgtgcctcaaagctttcttttgctgatgtcataagaaaagtagctgaatttgacaaaggaaaccctgcatttatatcttcaaacatcacacttgttgagagatatattgtggtgcatggacagataatactccagcagtttgcagattttccagatgagactatccgtcggagtgcatttgtcagtggtcttttattgaagatggaacagaggaggcatacaaagttagttatgaagaaaaaaactcaagtgatgaggggagagaatctgaatccaagtgcagcaatgggtccagcatcgaggaaaaaagcaatgcgtgcaacaacaaccaggctcatcaacagaatctggagtgattactatgcacatcatttccctgaagattccaaggagggagatggaaatgaaacaaaagaaattgatgatgaacaagaagaaaatgaagatgaggatgctgaagatgaagggcagattgaagagaacatctcaaagactcctccatcaacacggtcccggaagttgctatcacaaacttgtaaggaaatcagatgggaaggtgaaacatctgggaaaacattgtctggagaaactctatataaatgtgcttatgttagggaactcagaatacctgttggtggaacagtggctctagaagatgattcaggagacacagtcatttgttttgttgagtacatgttccagaaagttgatggttcaaaaatggttcatgggaggattctgcaaaaaggttcacagacaattcttggcaatgcggcaaatgagagggaggttttcttaactaatgactgcttagaattcaaattagatgacatcaaggaattggtaatggttgatatccaatcaaggccttggggtcacaagtacagaaaagagaattctgaagctgataaagttgagcaggtcaaagcagaagagagaaagaaaaagggccagcccatggtatatttctgcaaaagcttgtactggcctgagaagggtgccttctttgccctctcccgagataaaatgggtcttggtagtggtttatgtagttcttgtgataatatagagccagattctgatgaattgaaaatattctcgaagaccagctttgtctacagaaaggttacatataatgtcaatgagtttttatacataagacctgatttttttgctgaagatgaggatcgtgcaaccttcaaggctggccgaaatgtgggtctaaagccctatgcagtttgtcaaatattgtccatccctgaaggggctggatctaaaaaactcaatccagcatcagcaaatatcagtgctagaagattttacagaccagatgacatttcatcagccaaagcctatgcatctgacatcagagaggtcatctttttttctatcttgtatgcttgatttatctactccataacttcattgttactttttctcaaacatgtgagcaaatcctagagtcctgagaatggtcattcttgtttctttcttcttaactttagtttgttcgattcaggtctactatagtgaggatgtaattgatgtgcctgtggatatgatagagggaaaatgtgaggttagaaagaagaacgatcttgcaagttcagaccttccagtgatgtttgaacatgtatttttctgtgaacttatatatgaccgtgccagtggagctctcaagcaggttagctgtactgtactgaagttgctattctgattcattgagtggcagttttgatagtttcctgaatatgtgttccatgtctggagcagttgcctccaaatgttaggtttatgtctatggtgcaaaggacaagtgcgttgaaaaagaacaaaggaaagcagatctgtgagcctgatcaaatagattcaggtaaatggttggatgtgcctaaagagaaccgtctagctactcttgacatttttgctggctgtggaggtttatcagaagggctgcagcaagctggtatgtattgttaacactgatgctgtataccatgaacatgaccaacaaataaaaaatttcctcattgttcaatgctgtaggtgtatcttttacaaaatgggcgattgaatacgaagagcctgctggtgaagcatttaataaaaatcatccagaggctgtggtctttgtagataactgcaatgtgattctaaagtaagtgcaaattgtttgatgccattattatattttttgttgttgaacagaaccaatatttttggtaatgcagggcaattatggataaatgtggggatactgatgattgtgtttcaacttctgaagctgctgaacaagcagcaaaacttccagaagtgaacattaataatcttccagtccctggcgaagttgaattcataaatggtggtcctccgtgtcaggtttgttattatctacagttctatgtataggccagaaaatcatcagtcacctgttcagttttgtcattcaaatgcttgaattgtttattcttttgttgtcagggattctctgggatgaatagattcaaccaaagcccatggagtaaagttcagtgtgagatgattctagcattcctctcattcgctgagtatttccgtcccagattctttctgttagaaaatgttcggaactttgtttccttcaacaaagggcagaccttccgtttggcagttgcatctcttctggagatgggataccaggtatttctgttaattcattatctgctaagacctatagcttacactttttatggtggtttaaatctgtatactcagaaattgtttgccatttggttaggtccggtttggaattctagaagcaggggcttttggtgttgcccagtccaggaaaagggcgtttatttgggctgctgcacctggagagatgcttcctgattggccagagccgatgcatgtgtttgctagccctgagctgaagataacactgcctgatggccaatactatgcagctgcaagaagcactgctggtggagcgcctttccgagcgattactgttagagatacaattggggatctgcctaaagtgggaaatggtgccagcaaactcacgcttgaggtaactggtgcttcttgatcatctatttttttcttttctttgagctatatgctaaatgagctactgattatcttgtgcagtatggaggtgagcccgtgtcttggttccagaagaagataagagggaatatgatggtactgaatgatcacatatctaaggagatgaatgagctgaacctaataaggtgccaacacattccgaaacggccgggttgtgattggcatgacctaccggacgagaaggtaattttctgaaatctgttgttatattccttctgtccatggagcactgacccttggcccttgctattcttacaggttaagctgtcaaatgggcagatggctgacctgataccttggtgcctgcccaacacagccaagaggcacaatcagtggaaaggactgtacgggaggctggactgggaaggcaacttccccacatccgtcactgatccccagccaatgggcaaggtcggcatgtgcttccaccctgatcaagacaggatcatcacagtccgggaatgtgctcggtcacaggtaagctggtctacatccatttccatctgcaaaatgacaatgacactcctgtctaatatgatccaatctttgccgtgcagggctttcctgacagctatgaatttgcgggcaacatccagaacaagcaccggcagattggcaatgccgtgcccccgcctcttgcctatgcacttgggaggaagctgaaggaagccgttgacaagcgtcaggaagccagcgcaggcgtgcctgcaccatgagaagttttccttccatcaaaccatgacccatgaagctaagcgctgaggtcgtccttgaggaccagttaattttggttttatcagtcttaatgcactcctgaatgtatatgttagagaagtgtcgattgctgattgttaccctgattcagggtagcggttatatctaaaaacttgagaaaatctagtgtactctagttgtcatgtgttccattttgttggctctaaactttcaactagttttggtgattaatgacaacatgagattaaattaaattttgtagaggcatttaaattaggccactaatagtgactatttagtcgctcaatttttttgcccctaattatggaatttgtttttt

SEQ ID NO: 683 - DNA, 5725 bp, Zea mays
  source 1..5725: mol_type = genomic DNA
cccacacgcggattcgagaacaagctctatgagcatcttcctccctattgactgtcaaaaaaaagacggtgatgcatgacaccacctcaccttatcgaatcatgtctcccttgttctgttctccaaccatgctgcacacctgccatttgtcatatactcatcaaaattcatataaaacccccaattgtatcaattccaatcccgtactagttaaaagataactatgtggagttgtcgcttcttcccgtaatgtagttaagttagagggccctggtgtggcgctccttcctgggtttgagccttggcattgcaccggtggtgcacccacctcatggctggtggcggtgcagatggttctgtgaccaccaatgaagcgagtgcacatgaggttcttgcctgctttccgtggtttggtgggtccctatcttaatacagtcaaatgtacatctctccttgatcaaatttccccgttaacccatgtggattatgtggtattgagtcgtttaaatccatagcaagtcaaaattcatcacaatccattccaatacactccaatccacatggaattggaataaccgaacaagaccttagttggaaattgagtcattccagtaatccagtctcttacatctgacacaaatatctttcctgagttgtgacaaccagtgttacccagacatctgcgttccttttttttgcggagccagaaaacttgtcggtttccaagtggtgtaccccccccccccccaatttttttttgtcaaactggacacctgcacccgtaccggacacaaatacccgcactagcatgtgtcccatgtgacactggtaaagtatttggcattttgtgttcccatttaccctcccataatggtaatgtcagttgttgcagaatcttacgttataagcaaatcatgtgaattggttaccgttttcctatacacatttcacatgaaccattgggattggtattgcaactatgataacagaggtatgctgagtgttcagtaaattcaagccatttttgaggatctattttgtttctccaagggtacactggtagattaattacataggctctggcattccagtggcttatattattattttttctttctattcttggaatggtcggatattaaactgcctaccttttagaatgtggtctcctgatgcaatattgtggctcatgtagttttaaatttaggaaagggaacactatttacaggctacaactccattttttaccactaatgatattttagaaaaaaaatgaaggtatttctaaatgatctattgtcttaaatattgtctttgttgctgcacttcacaggtctatatttttctagttactgatagcaagcattaacaatcttttgtcatttggtcagtatttattctgttccttaaatctagtcagtcaccctaaccttccttttttgttgattttgtgttttgtctgcatctctggccggtgtgtttttcttttctttctgttcacttttcagtactgttattttaacttttgttcccctatataggcatatatctgattgatatgctgaccaatgatttttcaggaacaagaagatgcagagcaaagccacaaaagaaggaagaggaatccacagaaaacaacaagctggagaatggatctctggatgcaacagaagaggtgcatcatggagtcgaaaaaggtgatggacatgttacccgcaagagaccaaggagatcagcggcctgttctgatttcaaagagaaatccatacgcttatccgaaaaaaaatctgttgtcatggtcaagaagaatcggatggaggaggaagaagtagatgctgtcaatctgacaaaacttggaccagaagatccaccaccttgccggaagttgatcgattttatcttgcatgatgcagaagggaacccacaaccctttgaaatgtcagaaattgatgacttctttataacagctcttatcatgcccatggatgatgatctagaaaaagagcgtgaaagaggagtacgctgtgaaggatttgggcgaattgaggactggaatatttctggttatgatgaaggtactcctgtaatctgggtgtcaactgatgttgctgactatgaatgtgtgaaaccatcaaccaattacaaatcttattttgaccacttctatgagaaggctcaggtgtgtgttgaagttttcaaaaagcttgcaaaatcagttggtgggaatcctaaccagggcctggatgaattgcttgctagtgttgttcggtcaaccaatgccatgaaaggatatagtggaaccatgagcaaagatttggtgatatccattggagaatttgtatacaatcaacttgttggtttggatgagacatcaaacaatgatgatgaaaagtttgctaccctgccagttcttctttctctaagagaccagtgcagatctagggtggaactgaccaagttgccctctaacttctcgaacacaagtctgaaaattaaggactcagagtgtgatgagacagcagaagacgatgatgatgcaaaattagctagattacttcaacaagaagaagaatggaaaatgatgaagaaacagaggggtaggcgtggaacaccatcccagaaaaatgtctacataaaaatcagtgaagctgagattgccaatgactatccccttcctgcatactataagccatttagccaggaaatggatgaatacatatttgatagtgatgacagcatattttctgatgatgtgccagttaggatactcaataactggacactgtacaatgcagattccaggcttatatctttggaattgatccctatgaaatcaggggcagaaaatgatgtggttatctttggatctggtttcatgagagatgatgatggcagttgctgttctacagctgagtctgtgaaatcttcgtcttcctccagcaaagctgaccaactggatgcaggaatccctatttatttgagcccaatcaaagaatggattatagagtttggtggctcaatgatttgtataaccattcggactgatgtggcctggtaagtaccctcagctactttctttcagtacactgcttcattatgtggtcattaattgtgttcttaacagttgtgtcactgtatcctcttataccatttcagtgttattaaaactacgtttaaacgatgtttaaactacgtttaaacgtcaaaactctaattagatgttgaaaccacgttttagcgttttggcgttctaaactgtaaaacgtagtgttttatgcattttagaccattagctacttttgggcccagtctattagttactttcgaggtttaatccagctcatgggtgaagttttggtaagccactagcctctctattttggtatttaacttcatattattgtctgaaattataatgtattggtatttttcctatgttgtttaaaactacatttaaacaaagttcaaacttttaaaagtcaaaatttcacccatgagcgttccaacgttttatcgttttaataaccttgtaccatttgaacatcacttttagctcttttaatctttgctccattacaacttacatttagagttttatttcaggtacaagctacgccaaccaacaaaacaatatgctccatggtgtgagcctgtactgaaaacagcaaggcttgctgttagcatcattaccctgttgaaagagcagagtcgtgcctcaaagctttcttttgctgatgtcataagaaaagtagctgaatttgacaaaggaaaccctgcatttatatcttcaaacatcacacttgttgagagatatattgtggtgcatggacagataatactccagcagtttgcagattttccagatgagactatccgtcggagtgcatttgtcagtggtcttttattgaagatggaacagaggaggcatacaaagttagttatgaagaaaaaaactcaagtgatgaggggagagaatctgaatccaagtgcagcaatgggtccagcatcgaggaaaaaagcaatgcgtgcaacaacaaccaggctcatcaacagaatctggagtgattactatgcacatcatttccctgaagattccaaggagggagatggaaatgaaacaaaagaaattgatgatgaacaagaagaaaatgaagatgaggatgctgaagatgaagggcagattgaagagaacatctcaaagactcctccatcaacacggtcccggaagttgctatcacaaacttgtaaggaaatcagatgggaaggtgaaacatctgggaaaacattgtctggagaaactctatataaatgtgcttatgttagggaactcagaatacctgttggtggaacagtggctctagaagatgattcaggagacacagtcatttgttttgttgagtacatgttccagaaagttgatggttcaaaaatggttcatgggaggattctgcaaaaaggttcacagacaattcttggcaatgcggcaaatgagagggaggttttcttaactaatgactgcttagaattcaaattagatgacatcaaggaattggtaatggttgatatccaatcaaggccttggggtcacaagtacagaaaagagaattctgaagctgataaagttgagcaggtcaaagcagaagagagaaagaaaaagggccagcccatggtatatttctgcaaaagcttgtactggcctgagaagggtgccttctttgccctctcccgagataaaatgggtcttggtagtggtttatgtagttcttgtgataatatagagccagattctgatgaattgaaaatattctcgaagaccagctttgtctacagaaaggttacatataatgtcaatgagtttttatacataagacctgatttttttgctgaagatgaggatcgtgcaaccttcaaggctggccgaaatgtgggtctaaagccctatgcagtttgtcaaatattgtccatccctgaaggggctggatctaaaaaactcaatccagcatcagcaaatatcagtgctagaagattttacagaccagatgacatttcatcagccaaagcctatgcatctgacatcagagaggtcatctttttttctatcttgtatgcttgatttatctactccataacttcattgttactttttctcaaacatgtgagcaaatcctagagtcctgagaatggtcattcttgtttctttcttcttaactttagtttgttcgattcaggtctactatagtgaggatgtaattgatgtgcctgtggatatgatagagggaaaatgtgaggttagaaagaagaacgatcttgcaagttcagaccttccagtgatgtttgaacatgtatttttctgtgaacttatatatgaccgtgccagtggagctctcaagcaggttagctgtactgtactgaagttgctattctgattcattgagtggcagttttgatagtttcctgaatatgtgttccatgtctggagcagttgcctccaaatgttaggtttatgtctatggtgcaaaggacaagtgcgttgaaaaagaacaaaggaaagcagatctgtgagcctgatcaaatagattcaggtaaatggttggatgtgcctaaagagaaccgtctagctactcttgacatttttgctggctgtggaggtttatcagaagggctgcagcaagctggtatgtattgttaacactgatgctgtataccatgaacatgaccaacaaat

SEQ ID NO: 684 - DNA, 7512 bp, Zea mays
  source 1..7512: mol_type = genomic DNA
gtgcatttttagcccacatacggattcgaaaacaagcgctatgagcatcttcctccctattgactgtaaaaaaagactgggtgatgcatgacaccacctcaccttatcgaaccatgtctcccttgttctgttctccaaccatgctgcacacctgccatttgtcatatactcatcaaaattcatataaaacccccaatcgtatcaattccaatcacgtactagttaaaagataactatgtggatttgtcgcttcttcctgtaatgtagttaagttagagggccctggtgtggcgctcctgtcctgggtttgagccttggcattgcaccggtggtgcacccacctcatggctggtggcggtgcagatggttctgtgaccaccaattaagcaagtgtacatgaggttcttgcctgctttccgtggtttggtgggtccctatcttaatacagtcaaatgtacgtctctccttgatcaaattagggcttgtcagttccccgttaacccatgtgggtattgagtcggtttaaatccacagcaagtcaaaattcatcccaatccattccaatacactccaatccacatggaattggaataaccgaacaaggccttagttggatatggagtcatcccagtctcttacatctgacgcaaatatctttcctgagttgtgacaccagtgttacccagacatctgtgttccctttttttttgcggagccagaaaccttgtcggtttccaggtggtccccccccatttttttgtcaaactggacacctgcacccataccggacaccaatacccgcactagcacgtgtcccatgtgacactggtaaagtatttggcatttttgtgttcccatttacccgcccataatggtaatgtcagttgttgcagaatcttacgttataagcaaattatgtgaattggttaccgttttcctctacacatttcacatgaaccattgggattggtattgcaactatgataacagaggtatgctgagtgttcagtaaattcaagccatttttgaggatctattttgtttctccaagggtacactggtagattaattacataggctctggcattccagtggcttatattatttttttctttctattcttggaatggtcggatattaaagtgcctacctttttagaatgtggtcccctgatgcaatattgtggctcatgtagttttaaatttaggaaaggggacactatttacaggctacaactccattttttaccactaatgatattttagaaaaaaaatgaaggtatttctaaatgatcttttgtcttaaatattgtctttgttgctgcacttcacaggtctatatttttctagttactgatagcaagcattaacaatcttttgtcatttggtcagtatttattctgttccttaaatctagtcagtcaccctaaccttccttttttgttgaatttgtgttttgtctgcatctctggccggtgtgtttttcttttctttctgttcacttttcagtactgttattttaacttttgttcccctatataggcatatatctgattgatatgctgaccaatgatttttcaggaacaagaagatgcagagcaaagccacaaaagaaggaagaggaatccacagaaaacaacaagctggagaatggacctctggatgcaacagaagaggtgcatcatggagtcgaaaaaggtgatggacatgttacccgcaagagaccaaggagagcagcggcctgttctgatttcaaagagaaatccatacgcttatccgaaaaaaaatctgttgttatggtcaagaagaatcggatggaggaggaagaagtagatgctgtcaatcttacaaaacttggaccagaagatccaccaccttgccggaagttgatcgattttatcttgcatgatgcagaagggaacccacaaccctttgaaatgtcagaaattgatgacttctttataacagctcttatcatgcccatggatgatgatctagaaaaagagcgtgaaaaaggagtacgctgtgaaggatttgggcgaattgaggactggaatatttctggttatgatgaaggtactcctgtaatctgggtgtcaactgatgttgctgactatgaatgtgtgaaaccatcaaccaattacaaatcttattttgaccacttctatgagaaggctcaggtgtgtgttgaagttttcaaaaagcttgcaaaatcagttggtgggaatcctaaccagggcctggatgaattgcttgctagtgttgttcggtcaaccaatgccatgaaaggatatagtggaaccatgagcaaagatttggtgatatccattggagaatttgtatacaatcaacttgttggtttggatgagacatcaaacaatgatgatgaaaagtttgctaccctgccagttcttctttctctaagagaccagtgcagatctagggtggaactgaccaagttgccctctaacttctcgaacacaagtctgaaaattaaggactcagagtgtgatgagacagcagaagacgatgatgatgcaaaattagctagattacttcaacaagaagaagaatggaaaatgatgaagaaacagaggggtaggcgtggaacaccatcccagaaaaatgtctacataaaaatcagtgaagctgagattgccaatgactatccccttcctgcatactataagccatttagccaggaaatggatgaatacatatttgatagtgatgacagcatattttctgatgatgtgccagttaggatactcaataactggacactgtacaatgcagattccaggcttatatctttggaattgatccctatgaaatcaggggcagaaaatgatgtggttgtctttggatctggtttcatgagagatgatgatggcagttgctgttctacagctgagtctgtgaaatcttcgtcttcctccagcaaagctgaccaactggatgcgggaatccctatttatctgagcccaatcaaagaatggattatagagtttggtggctcaatgatttgtataaccattcggactgatgtggcctggtaagtaccctcagctactttctttcagtacactgcttcattatgtggtcattaactgtgttcttaacagttgtgtcactgtatcctcttataccatttgaacatcacttttagctcttttaatctttgctccattacaacttacatttagagttttatttcaggtacaagctacgccaaccaacaaaacaatatgctccatggtgtgagcctgtactgaaaacagcaaggcttgctgttagcatcattaccctgttgaaagagcagagtcgtgcctcaaagctttcttttgcagatgtcataagaaaagtagctgaatttgacaaaggaaaccctgcatttatatcttcaaacatcacacttgttgagagatatattgtggtgcatggacagataatactccagcagtttgcagattttccagatgagactatccgtcggagtgcatttgtcagtggtcttttattgaagatggaacagaggaggcatacaaagttagttatgaagaaaaaaactcaagtgatgaggggagagaatctgaatccaagtgcagcaatgggtccagcatcgaggaaaaaagcaatgcgtgcaacaacaaccaggctcatcaacagaatctggagtgattactatgcacatcatttccctgaagattccaaggagggagatggaaatgaaataaaagaaattgatgatgaacaagaagaaaatgaagatgaggatgctgaagatgaaggacagattgaagagaacatctcaaagactcctccatcaacacggtcccggaagttgctatcacaaacttgtaaggaaatcagatgggaaggtgaaacatctgggaaaacattgtctggagaaactctatataaatgtgcttatgttagggaactcagaatacctgttggtggaacagtagctctagaagatgattcaggagacacagtcatgtgttttgttgagtacatgttccagaaagttgatggttcaaaaatggttcatgggaggattctgcaaaaaggttcacagacaattcttgacaatgcggcaaatgagagggaggttttcttaactaatgactgcttagaattcaaattagatgacatcaaagaattggtaatggttgatatccaatcaaggccttggggtcacaagtacagaaaagagaattctgaagctgataaagttgagcaggtcaaagcagaagagagaaagaaaaagggccagcccatggtatatttctgcaaaagcttgtactggcctgagaagggtgccttctttgccctctcccgagataaaatgggtcttggtagtggtttatgtagttcttgtgataatatagagccagattctgatgaattaaaaatattctcgaagaccagctttgtctacagaaaggttacatataatgtcaatgagtttttatacataagccctgatttttttgctgaagatgaggatcgtgcaaccttcaaggctggccgaaatgtgggtctaaagccctatgcagtttgtcaaatattatccatccctgaaggggctggatctaaaaaactcaatccagcatcagcaaatatcagtgctagaagattttacagaccagatgacatttcatcagccaaagcctatgcttctgacatcagagaggtcatctttttttctatcttgtatgcttgatttatctactccataacttcattgttactttttctcaaacatgtgagcaaatcctagagtcctgagaatggtcattcttgtttctttcttgttaactttagtttgttcgattcaggtctactatagtgaggatgtaattgatgtgcctgtggatatgatagagggaaaatgtgaggttagaaagaagaacgatcttgcaagttcagaccttccagtgatgtttgaacatgtatttttctgtgaacttatatatgaccgtgccagtggagctctcaagcaggttagctgtactgtactgaagttgctattctgattcattgagtggcagttttgatagtttcctgaatgtgtgttccatgtctggagcagttgcctccaaatgttaggtttatgtctatggtgcaaaggacaagtgcgttgaaaaagaacaaaggaaagcagatctgtgagcctgatcaaatagattcaggtaaatggttggatgtgcctaaagagaaccgtctagctactcttgacatttttgctggctgtggaggtttatcagaagggctgcagcaagctggtatgtattgttaacactgatgctgtataccatgaacatgaccaacaaataaaaaatttcctcattgttcaatgctgtaggtgtatcttttacaaaatgggcgattgaatacgaagagcctgctggtgaagcatttaataaaaatcatccagaggctgtggtctttgtagataactgcaatgtgattctaaagtaagtgcaaattgtttgatgccattattatattttttgttgttgaacagaaccaatatttttggtaatgcagggcgattatggataaatgtggggatactgatgattgtgtttcaacttctgaagctgctgaacaagcagcaaaacttccagaagtgaacattaataatcttccagtccctggcgaagttgaattcataaatggtggtcctccgtgtcaggtttgttattatctacagttctatgtataggccagaaaatcatcagtcacctgttcagttttgtcattcaaatgcttgaattgtttattcttttgttgtcagggattctctgggatgaatagattcaaccaaagcccatggagtaaagttcagtgtgagatgattctagcattcctctcattcgctgagtatttccgtcccagattctttctgttagaaaatgttcggaactttgtttccttcaacaaagggcagaccttccgtttggcagttgcatctcttctggagatgggataccaggtatttctgttaattcattatctgctaagacctatagcttacactttttatggtggtttaaatctgtatactcagaaattgtttgccatttggttaggtccggtttggaattctagaagcaggggcttttggtgttgcccagtccaggaaaagggcgtttatttgggctgctgcacctggagagatgcttcctgattggccagagccgatgcatgtgtttgctagccctgagctgaagataacactgcctgatggccaatactatgcagctgcaagaagcactgctggtggagcgcctttccgagcgattactgttagagatacagttggggatctgcctaaagtgggaaatggtgccagcaaactcacgcttgaggtaactggtgcttcttgatcatctattttttcttttctttgagctatatgctaaatgagctactgattatcttgtgcagtatggaggtgagcctgtgtcttggttccagaagaagataagagggaatatgatggtactgaatgatcacatatctaaggagatgaatgagctgaacctaataaggtgtcaacacattccgaaacggccgggttgtgattggcatgacctaccggacgagaaggtaattttctgaaatctgttgttatattccttctgtccatggagcactgacccttggcccttgctattcttacaggttaagctgtcaaatgggcagatggctgacctgataccttggtgcctgcccaacacagccaagaggcacaatcagtggaaaggactgtacgggaggctggactgggaaggcaacttccccacatccgtcactgatccccagccaatgggcaaggtcggcatgtgcttccaccctgatcaagacaggatcatcacagtccgggaatgtgctcggtcacaggtaagctggtctacatccatttccatctgcaaaatgacaatgacactcctgtctaatatgatccaatctttgccgtgcagggctttcctgacagctatgaatttgcgggcaacatccagaacaagcaccggcagattggcaatgccgtgcccccgcctcttgcctatgcacttgggaggaagctgaaggaagccgttgacaagcgtcaggaagccagcgcaggcgtgcctgcaccatgagaagttttccttccatcaaaccatgacccatgaagctaagcgctgaggtcgtccttgaggaccagttaattttggttttatcagtcttaatggactcctgaatgtatatgttagagaagtgtcgattgctgattgttaccctgattcagggtagcggttatatctaaaaacttgagaaaatctagtgtactctagttgccatgtgttccattttgttggctctaaactttcaactagtgttggtgattaatgacaacatgagattaacttaaattttgtagaggcatttaaattatgccactaatagtgactatttagtcgctcaatttttttgcccctaattatggaatttatttttt

SEQ ID NO: 685 - DNA, 5340 bp, Zea mays
  source 1..5340: mol_type = genomic DNA
gtgcatttttagcccacatacggattcgaaaacaagcgctatgagcatcttcctccctattgactgtaaaaaaagactgggtgatgcatgacaccacctcaccttatcgaaccatgtctcccttgttctgttctccaaccatgctgcacacctgccatttgtcatatactcatcaaaattcatataaaacccccaatcgtatcaattccaatcacgtactagttaaaagataactatgtggatttgtcgcttcttcctgtaatgtagttaagttagagggccctggtgtggcgctcctgtcctgggtttgagccttggcattgcaccggtggtgcacccacctcatggctggtggcggtgcagatggttctgtgaccaccaattaagcaagtgtacatgaggttcttgcctgctttccgtggtttggtgggtccctatcttaatacagtcaaatgtacgtctctccttgatcaaattagggcttgtcagttccccgttaacccatgtgggtattgagtcggtttaaatccacagcaagtcaaaattcatcccaatccattccaatacactccaatccacatggaattggaataaccgaacaaggccttagttggatatggagtcatcccagtctcttacatctgacgcaaatatctttcctgagttgtgacaccagtgttacccagacatctgtgttccctttttttttgcggagccagaaaccttgtcggtttccaggtggtccccccccatttttttgtcaaactggacacctgcacccataccggacaccaatacccgcactagcacgtgtcccatgtgacactggtaaagtatttggcatttttgtgttcccatttacccgcccataatggtaatgtcagttgttgcagaatcttacgttataagcaaattatgtgaattggttaccgttttcctctacacatttcacatgaaccattgggattggtattgcaactatgataacagaggtatgctgagtgttcagtaaattcaagccatttttgaggatctattttgtttctccaagggtacactggtagattaattacataggctctggcattccagtggcttatattatttttttctttctattcttggaatggtcggatattaaagtgcctacctttttagaatgtggtcccctgatgcaatattgtggctcatgtagttttaaatttaggaaaggggacactatttacaggctacaactccattttttaccactaatgatattttagaaaaaaaatgaaggtatttctaaatgatcttttgtcttaaatattgtctttgttgctgcacttcacaggtctatatttttctagttactgatagcaagcattaacaatcttttgtcatttggtcagtatttattctgttccttaaatctagtcagtcaccctaaccttccttttttgttgaatttgtgttttgtctgcatctctggccggtgtgtttttcttttctttctgttcacttttcagtactgttattttaacttttgttcccctatataggcatatatctgattgatatgctgaccaatgatttttcaggaacaagaagatgcagagcaaagccacaaaagaaggaagaggaatccacagaaaacaacaagctggagaatggacctctggatgcaacagaagaggtgcatcatggagtcgaaaaaggtgatggacatgttacccgcaagagaccaaggagagcagcggcctgttctgatttcaaagagaaatccatacgcttatccgaaaaaaaatctgttgttatggtcaagaagaatcggatggaggaggaagaagtagatgctgtcaatcttacaaaacttggaccagaagatccaccaccttgccggaagttgatcgattttatcttgcatgatgcagaagggaacccacaaccctttgaaatgtcagaaattgatgacttctttataacagctcttatcatgcccatggatgatgatctagaaaaagagcgtgaaaaaggagtacgctgtgaaggatttgggcgaattgaggactggaatatttctggttatgatgaaggtactcctgtaatctgggtgtcaactgatgttgctgactatgaatgtgtgaaaccatcaaccaattacaaatcttattttgaccacttctatgagaaggctcaggtgtgtgttgaagttttcaaaaagcttgcaaaatcagttggtgggaatcctaaccagggcctggatgaattgcttgctagtgttgttcggtcaaccaatgccatgaaaggatatagtggaaccatgagcaaagatttggtgatatccattggagaatttgtatacaatcaacttgttggtttggatgagacatcaaacaatgatgatgaaaagtttgctaccctgccagttcttctttctctaagagaccagtgcagatctagggtggaactgaccaagttgccctctaacttctcgaacacaagtctgaaaattaaggactcagagtgtgatgagacagcagaagacgatgatgatgcaaaattagctagattacttcaacaagaagaagaatggaaaatgatgaagaaacagaggggtaggcgtggaacaccatcccagaaaaatgtctacataaaaatcagtgaagctgagattgccaatgactatccccttcctgcatactataagccatttagccaggaaatggatgaatacatatttgatagtgatgacagcatattttctgatgatgtgccagttaggatactcaataactggacactgtacaatgcagattccaggcttatatctttggaattgatccctatgaaatcaggggcagaaaatgatgtggttgtctttggatctggtttcatgagagatgatgatggcagttgctgttctacagctgagtctgtgaaatcttcgtcttcctccagcaaagctgaccaactggatgcgggaatccctatttatctgagcccaatcaaagaatggattatagagtttggtggctcaatgatttgtataaccattcggactgatgtggcctggtaagtaccctcagctactttctttcagtacactgcttcattatgtggtcattaactgtgttcttaacagttgtgtcactgtatcctcttataccatttgaacatcacttttagctcttttaatctttgctccattacaacttacatttagagttttatttcaggtacaagctacgccaaccaacaaaacaatatgctccatggtgtgagcctgtactgaaaacagcaaggcttgctgttagcatcattaccctgttgaaagagcagagtcgtgcctcaaagctttcttttgcagatgtcataagaaaagtagctgaatttgacaaaggaaaccctgcatttatatcttcaaacatcacacttgttgagagatatattgtggtgcatggacagataatactccagcagtttgcagattttccagatgagactatccgtcggagtgcatttgtcagtggtcttttattgaagatggaacagaggaggcatacaaagttagttatgaagaaaaaaactcaagtgatgaggggagagaatctgaatccaagtgcagcaatgggtccagcatcgaggaaaaaagcaatgcgtgcaacaacaaccaggctcatcaacagaatctggagtgattactatgcacatcatttccctgaagattccaaggagggagatggaaatgaaataaaagaaattgatgatgaacaagaagaaaatgaagatgaggatgctgaagatgaaggacagattgaagagaacatctcaaagactcctccatcaacacggtcccggaagttgctatcacaaacttgtaaggaaatcagatgggaaggtgaaacatctgggaaaacattgtctggagaaactctatataaatgtgcttatgttagggaactcagaatacctgttggtggaacagtagctctagaagatgattcaggagacacagtcatgtgttttgttgagtacatgttccagaaagttgatggttcaaaaatggttcatgggaggattctgcaaaaaggttcacagacaattcttgacaatgcggcaaatgagagggaggttttcttaactaatgactgcttagaattcaaattagatgacatcaaagaattggtaatggttgatatccaatcaaggccttggggtcacaagtacagaaaagagaattctgaagctgataaagttgagcaggtcaaagcagaagagagaaagaaaaagggccagcccatggtatatttctgcaaaagcttgtactggcctgagaagggtgccttctttgccctctcccgagataaaatgggtcttggtagtggtttatgtagttcttgtgataatatagagccagattctgatgaattaaaaatattctcgaagaccagctttgtctacagaaaggttacatataatgtcaatgagtttttatacataagccctgatttttttgctgaagatgaggatcgtgcaaccttcaaggctggccgaaatgtgggtctaaagccctatgcagtttgtcaaatattatccatccctgaaggggctggatctaaaaaactcaatccagcatcagcaaatatcagtgctagaagattttacagaccagatgacatttcatcagccaaagcctatgcttctgacatcagagaggtcatctttttttctatcttgtatgcttgatttatctactccataacttcattgttactttttctcaaacatgtgagcaaatcctagagtcctgagaatggtcattcttgtttctttcttgttaactttagtttgttcgattcaggtctactatagtgaggatgtaattgatgtgcctgtggatatgatagagggaaaatgtgaggttagaaagaagaacgatcttgcaagttcagaccttccagtgatgtttgaacatgtatttttctgtgaacttatatatgaccgtgccagtggagctctcaagcaggttagctgtactgtactgaagttgctattctgattcattgagtggcagttttgatagtttcctgaatgtgtgttccatgtctggagcagttgcctccaaatgttaggtttatgtctatggtgcaaaggacaagtgcgttgaaaaagaacaaaggaaagcagatctgtgagcctgatcaaatagattcaggtaaatggttggatgtgcctaaagagaaccgtctagctactcttgacatttttgctggctgtggaggtttatcagaagggctgcagcaagctggtatgtattgttaacactgatgctgtataccatgaacatgaccaacaaat

(The sequence listing continues in the following parts.)

What is claimed is:

1. A method of obtaining seeds comprising clonal embryos comprising
(a) collecting one or more seeds produced by a maternal plant, wherein the maternal plant is defective for RdDM activity for:
(i) a nucleic acid having at least 90% identity to the full length of a nucleic acid of any of the nucleotide sequences set forth in SEQ ID NOs: 1-64, 100-230, 300-365, 399-541, 616-708, 757-820, 853-911, or 942-980, or a fragment, complement or combination thereof; or
(ii) a polypeptide having at least 90% identity to the full length of a polypeptide of any of the amino acid sequences set forth in SEQ ID NOs: 65-99, 231-299, 366-398, 542-615, 709-756, 821-852, 912-941, or 981-1005, or a fragment, complement or combination thereof; and
(b) sorting the seeds to separate the seeds comprising clonal embryos from the seeds comprising non-clonal embryos;
wherein the maternal plant is pollinated prior to collecting the seeds, and wherein the one or more seeds produced by the maternal plant comprise an embryo that is a clone of the maternal plant.

2. The method of claim 1, wherein the plant defective for RdDM activity has an insertion, deletion, substitution or mutation of one or more nucleotides that makes RdDM activity defective.

3. The method of claim 1, wherein the plant defective for RdDM activity is male-sterile.

4. The method of claim 1, wherein the maternal plant is unable to self-pollinate.

5. The method of claim 1, the method further comprising sorting seeds comprising parthenogenically-derived clonal embryos from seeds not comprising parthenogenically-derived clonal embryos.

6. The method of claim 1, the method further comprising sorting the seeds comprising parthenogenically-derived clonal embryos based on the absence of a paternal-inherited trait or marker in the seeds.

7. The method of claim 1, wherein the plant defective for RdDM activity is maize, rice, sorghum, sugarcane, barley, oat, wheat, turfgrass, soybean, canola, cotton, tobacco, sunflower, safflower, or alfalfa.

8. A method of screening for maternal plants that produce seeds comprising parthenogenically-derived clonal embryos comprising
a) obtaining a maternal plant unable to pass on paternally-derived chromosomes to embryos, wherein the plant is silenced for RdDM activity for:
a. a nucleic acid having at least 90% identity to the full length of a nucleic acid of any of the nucleotide sequences set forth in SEQ ID NOs: 1-64, 100-230, 300-365, 399-541, 616-708, 757-820, 853-911, or 942-980, or a fragment, complement or combination thereof; or
b. a polypeptide having at least 90% identity to the full length of a polypeptide of any of the amino acid sequences set forth in SEQ ID NOs: 65-99, 231-299, 366-398, 542-615, 709-756, 821-852, 912-941, or 981-1005, or a fragment, complement or combination thereof; and
b) harvesting the seeds; and
c) determining whether the seeds comprise clonal embryos, wherein the presence of seeds comprising clonal embryos indicates the maternal plant can produce parthenogenically-derived clonal embryos.

9. The method of claim 8, wherein the plant defective for RdDM activity has an insertion, deletion, substitution or mutation of one or more nucleotides that makes RdDM activity defective.

10. The method of claim 8, wherein the plant defective for RdDM activity is male-sterile.

11. The method of claim 8, wherein the maternal plant is unable to self-pollinate.

12. The method of claim 8, the method further comprising sorting seeds comprising parthenogenically-derived clonal embryos from seeds not comprising parthenogenically-derived clonal embryos.

13. The method of claim 8, the method further comprising sorting the seeds comprising parthenogenically-derived clonal embryos based on the absence of a paternal-inherited trait or marker in the seeds.

14. The method of claim 8, wherein the plant defective for RdDM activity is maize, rice, sorghum, sugarcane, barley, oat, wheat, turfgrass, soybean, canola, cotton, tobacco, sunflower, safflower, or alfalfa.

15. A method for the enriching for asexual embryos and endosperm in the seed population of a plant comprising providing a plant comprising an asexual female gametophyte defective for RdDM activity, wherein the plant is disrupted for an activity that regulates endosperm development and wherein the seeds formed comprise parthenogenically-derived clonal embryos.

16. The method of claim 15, wherein an activity that regulates endosperm development in the PRC2 complex is disrupted.

17. The method of claim 15, wherein the asexual female gametophyte is disrupted for activity in for CYCLIN DEPENDENT KINASE A, cdka, or MULTIPLE SUPPRESSOR OF IRA1 (MSI1) CUL4-DDB1, Fertilization Independent Embryo (FIE), Fertilization Independent Seed-1 (FIS1), Fertilization Independent Seed-1 (FIS2), or Fertilization Independent Seed-3 (FIS3).

18. The method of claim 15, wherein the plant is defective for RdDM activity is defective for:
(a) a nucleic acid having at least 90% identity to the full length of a nucleic acid of any of the nucleotide sequences set forth in SEQ ID NOs: 1-64, 100-230, 300-365, 399-541, 616-708, 757-820, 853-911, or 942-980, or a fragment, complement or combination thereof; or
(b) a polypeptide having at least 90% identity to the full length of a polypeptide of any of the amino acid sequences set forth in SEQ ID NOs: 65-99, 231-299, 366-398, 542-615, 709-756, 821-852, 912-941, or 981-1005, or a fragment, complement or combination thereof.

19. The method of claim 15, wherein the plant defective for RdDM activity is defective for AGO4 (ARGONAUTE 4), AGOG (ARGONAUTE 6), AGO8 (ARGONAUTE 8), AGO9 (ARGONAUTE 9), CMT3 (CHROMOMETHYLASE 3), DCL3 (DICER-LIKE 3), DRM2 (DOMAINS REARRANGED METHYLASE 2), EXS1 (EXTRA SPOROGENOUS CELLS1), IDN2 (INVOLVED IN DE NOVO 2), MET1 (METHYL TRANSFERASE 1), NPRD1a (NUCLEAR POLYMERASE D 1a), NRPD1b (NUCLEAR POLYMERASE D 1b), NRPD2 (NUCLEAR POLYMERASE D 2), NRPE1 (NUCLEAR RNA POLYMERASE E 1), NRPE2 (NUCLEAR RNA POLYMERASE E 2), RDR2 (RNA-DEPENDENT RNA POLYMERASE 2), RDR6 (RNA-DEPENDENT RNA POLYMERASE 6), SGS3 (SUPPRESSOR OF GENE SILENCING 3), SUVH2 (SUPPRESSOR OF VARIEGATION 3-9 HOMOLOG 2), and SUVH9 (SUPPRESSOR OF VARIEGATION 3-9 HOMOLOG 9).

20. The method of claim 15, wherein the plant defective for RdDM activity is maize, rice, sorghum, sugarcane, barley, oat, wheat, turfgrass, soybean, canola, cotton, tobacco, sunflower, safflower, or alfalfa.
